United States Patent Application Publication US 2018/0126003 A1 - sequence listing, part 190

SEQ ID NO: 340224 - DNA, 1326 bp, Artificial Sequence
  derived and/or modified sequence
atgggacggaaaaaaatccagataactcgcattatggacgagaggaaccgtcaggtaaccttcacaaagaggaaattcggtcttatgaagaaagcctacgaactctctgtgctgtgtgattgtgagatagctctgattatatttaactccacaaacaaattgtttcagtatgcgtctaccgatatggacaaggttttgctgaagtacaccgaatacaatgagccacacgagtcccgcacaaactcagatatcgtggaaacactgcggaagaaaggtctgaatgggtgcgatagtcccgatcctgacgcagatgacagcgtgggccacagtcctgagtctgaggacaagtatagaaagattaacgaggacattgatttgatgatcagtcgacagagactctgtgctgtgcctccgcctaattttgagatgcccgtctctatccccgtgtctagtcataacagcctagtgtactccaaccccgtgtcttcccttggtaatccaaacctcctaccactagcccacccatctctccaacggaactcaatgtctcctggtgttacccaccgcccacctagtgcaggcaacacggggggtcttatgggcggagatctgacgtcaggggcggggaccagcgcggggaacggatatggtaacccacgtaattcgccaggcctcctggtgtctccaggaaatctcaacaaaaatatgcaggccaaatctccccctcctatgaatttagggatgaacaaccggaaacctgaccttcgggtgctcattccccccgggtcaaagaacacaatgccaagcgtaagcgaggacgtggatctcttgttgaatcagagaattaataatagccagtccgcgcaaagccttgcaacaccggtagtttctgtcgccacccccacgctgcctggacagggcatggggggctacccatccgctattagcacaacctatggaaccgaatacagcctctcctccgcagacttgtcttccctcagtgggtttaacacagcttctgccctgcatctgggttcagttacaggatggcagcagcagcacctccataacatgccgccatcggctttatctcaactgggtgataggacaaccactccttctcggtatccgcagcacaccaggcacgaggctggccgatctcctgtggactcacttagctcttgtagctcgtcctatgatggcagcgatagagaagaccatagaaacgaattccatagccctatcggcctaactaggcccagtcctgatgagagagagagcccatcagtcaaacgcatgcgcctcagcgagggttgggccacatag

SEQ ID NO: 340225 - DNA, 1326 bp, Artificial Sequence
  derived and/or modified sequence
atgggcaggaagaagatccagatcacccgcatcatggatgaaagaaaccggcaggtgaccttcaccaagaggaagtttggcctgatgaagaaggcctatgagctgtctgtgctgtgtgactgtgaaattgccctgatcatcttcaacagcaccaacaagctgttccagtatgccagcacagacatggacaaggtgctgctgaagtacacagagtacaatgagccccatgagagcaggaccaacagcgacatcgtggagaccctgaggaagaagggcctgaatggctgtgacagcccagaccctgatgctgatgacagcgtgggccacagccctgagagcgaggacaagtacaggaagatcaatgaagacatcgacctgatgatcagccggcagaggctgtgtgctgtgcccccacccaactttgagatgcctgtgtccatccctgtgagcagccacaacagcctggtgtacagcaaccctgtgagcagcctgggcaaccccaacctgctgcccctggcccaccccagcctgcagagaaattccatgagccctggggtgacccaccggccccccagcgctggcaacacaggaggcctgatgggcggggacctgaccagcggggccggcaccagcgctggaaatggctacggcaaccccaggaacagccctggcctgctggtgtccccaggcaacctgaacaagaacatgcaggccaagagccccccacccatgaacctgggcatgaacaacaggaagccagacctgcgggtgctgatccccccaggcagcaagaacaccatgcccagcgtgtctgaagatgtggacctgctgctgaaccagaggatcaacaacagccagagcgcccagagcctggccacccctgtggtgtctgtggccacccccaccctgcccggccagggcatgggcggctaccccagcgccatcagcaccacctatggaacagagtacagcctgagcagcgctgacctgagcagcctgagcggcttcaacacagccagcgccctgcacctgggctctgtgacaggctggcagcagcagcacctgcacaacatgcctccttctgccctgagccagctgggggacaggaccaccacccccagccgctacccccagcacaccaggcatgaggccggccgcagccctgtggacagcctgagcagctgcagcagcagctatgatggcagtgaccgggaggaccacagaaatgagttccacagccccatcggcctgacccggcccagcccagatgagcgggagagccccagcgtgaagaggatgaggctgtctgagggctgggccacctag

SEQ ID NO: 340226 - DNA, 1747 bp, Artificial Sequence
  derived and/or modified sequence
acacgcacacatcgtctccagctctctgctcgctctgctcgcagtcacagacacttgagcacacgcgtacacccagacatcttcgggctgctattggattgactttgaaggttctgtgtgggtcgccgtggctgcatgtttgaatcaggtggagaagcacttcaacgctggacgaagtaaagattattgttgttattttttttttctctctctctctctcttaagaaaggaaaatatcccaaggactaatctgatcgggtcttccttcatcaggaacgaatgcaggaatttgggaactgagctgtgcaagtgctgaagaaggagatttgtttggaggaaacaggaaagagaaagaaaaggaaggaaaaaatacataatttcagggacgagagagagaagaaaaacggggactatggggagaaaaaagattcagattacgaggattatggatgaacgtaacagacaggtgacatttacaaagaggaaatttgggttgatgaagaaggcttatgagctgagcgtgctgtgtgactgtgagattgcgctgatcatcttcaacagcaccaacaagctgttccagtatgccagcaccgacatggacaaagtgcttctcaagtacacggagtacaacgagccgcatgagagccggacaaactcagacatcgtggagacgttgagaaagaagggccttaatggctgtgacagcccagaccccgatgcggacgattccgtaggtcacagccctgagtctgaggacaagtacaggaaaattaacgaagatattgatctaatgatcagcaggcaaagattgtgtgctgttccacctcccaacttcgagatgccagtctccatcccagtgtccagccacaacagtttggtgtacagcaaccctgtcagctcactgggaaaccccaacctattgccactggctcacccttctctgcagaggaatagtatgtctcctggtgtaacacatcgacctccaagtgcaggtaacacaggtggtctgatgggtggagacctcacgtctggtgcaggcaccagtgcagggaacgggtatggcaatccccgaaactcaccaggtctgctggtctcacctggtaacttgaacaagaatatgcaagcaaaatctcctcccccaatgaatttaggaatgaataaccgtaaaccagatctccgagttcttattccaccaggcagcaagaatacgatgccatcagtgtctgaggatgtcgacctgcttttgaatcaaaggataaataactcccagtcggctcagtcattggctaccccagtggtttccgtagcaactcctactttaccaggacaaggaatgggaggatatccatcagccatttcaacaacatatggtaccgagtactctctgagtagtgcagacctgtcatctctgtctgggtttaacaccgccagcgctcttcaccttggttcagtaactggctggcaacagcaacacctacataacatgccaccatctgccctcagtcagttgggagaccgtaccaccaccccttcgagatacccacaacacacgcgccacgaggcggggagatctcctgttgacagcttgagcagctgtagcagttcgtacgacgggagcgaccgagaggatcaccggaacgaattccactcccccattggactcaccagaccttcgccggacgaaagggaaagtccctcagtcaagcgcatgcgactttctgaaggatgggcaacatgatcagattat

SEQ ID NO: 340227 - DNA, 1326 bp, Artificial Sequence
  derived and/or modified sequence
atgggccggaagaagatccagatcacccggatcatggacgagcggaaccggcaggtcaccttcaccaagcgcaagttcggactgatgaagaaggcttatgaactgtccgtcctatgcgattgcgagattgccctgattattttcaactcaactaacaaactgtttcagtacgctagtaccgatatggataaagtcctgctgaagtatactgaatacaatgagcctcacgaaagccgcaccaattctgacatcgtggagacattgcgaaagaaaggccttaatggctgcgatagccccgatcctgatgcagacgactcagttggacatagccctgagtcagaagataagtaccgtaaaatcaacgaggacattgacctgatgatctcacgacagaggttatgcgccgtgccacctcctaacttcgagatgccagtgagcattcccgtgagtagtcataactccctggtgtactccaaccctgtgtcctcactggggaaccctaatctgcttcccctcgcccacccatctctgcagaggaattcaatgtccccgggtgtaactcacaggcctccttccgccggcaacactggtgggctgatgggaggtgaccttacttcgggtgctggcacctccgctgggaacggatatggaaatccccggaacagccccgggctcttggtgtcccctggcaatttgaataaaaatatgcaggccaagtcaccacccccaatgaacctcggcatgaataatcgtaagccagacctgagagtgctgatccctccagggagtaaaaataccatgcccagcgtgagcgaggacgtcgacctgctgttgaaccagcgcataaataactcccagagtgctcagtctctggcgacgcccgttgtcagcgtagccactcccactctgccaggtcagggaatgggggggtatcctagtgccatctcaactacttatggcactgagtatagcttgagtagcgccgacctttcgtcactgtcgggatttaacacggccagtgcccttcaccttgggtctgtgaccggctggcagcagcagcatctgcataatatgccgcctagcgcattgagccagctgggcgatcgcactactaccccttcacgatatccacagcatacacgccatgaggccggccggtcccctgtagattcgctgagttcctgcagctcgtcatatgatggatcggaccgagaagaccacagaaatgaatttcactcaccaatcgggttgacccgcccgtccccagatgaacgagaaagtccgtcagtgaaacgcatgaggttgtcagaagggtgggcaacctag

SEQ ID NO: 340228 - DNA, 1326 bp, Artificial Sequence
  derived and/or modified sequence
atggggaggaagaagattcaaataaccaggatcatggatgaacgcaacagacaagtgacttttaccaaacggaagtttggcctcatgaagaaagcatatgagctcagtgtcctgtgcgactgtgagatcgcgttgattattttcaatagcacaaataagctgttccagtacgccagtacagatatggataaggtgttattgaaatacactgaatataacgagcctcacgaaagcaggacaaatagtgatatcgtggaaacactgaggaaaaagggactgaacggatgcgatagccctgaccccgatgcggatgactctgtgggccattcaccagagagcgaggataagtaccgcaagatcaacgaggatatcgacctcatgattagccggcagaggctctgcgccgtgccgccacccaattttgaaatgccggtctctatacctgtgtcttcacacaactctctggtctattccaaccccgtaagcagtttggggaaccccaacttgctccctttggcccatccatctctgcagagaaattccatgagcccaggggtcacgcatcggcctccctcggcaggcaacacagggggtctcatggggggagacttaaccagtggagccggtacttcagctggcaatggttatggcaacccccgtaatagccccggtcttctggtgtctcccggtaatttgaataagaacatgcaggccaagtccccaccacccatgaatttagggatgaataacaggaaacccgatctgcgggttctgataccacctggaagcaagaacactatgcccagtgtgtctgaggatgtcgacctccttttaaatcaaaggataaataacagccaaagtgcgcaaagcctggcaacacccgttgtcagcgtcgcaaccccaaccctcccgggtcagggtatggggggatacccaagcgccatatcaacaacatatgggacagaatacagcctgtcttctgctgatttaagttcactgtcagggttcaatactgcctctgctctccacctcggatccgtaacaggctggcagcagcagcatctgcacaatatgcccccatctgctttgtctcaactgggtgaccggacaacaacaccttccaggtacccacagcacactcgccatgaggcaggcaggtcccccgtagacagtctgtcatcttgttcctcctcatatgacggctctgatcgagaggaccacaggaatgaatttcactcacccatcggtttgacgagaccctctccggacgaacgggaaagtcctagcgtgaaacgaatgcgactgtcagaggggtgggctacgtag

SEQ ID NO: 340229 - DNA, 1326 bp, Artificial Sequence
  derived and/or modified sequence
atgggcagaaagaagatccagatcaccagaatcatggacgagagaaacagacaggtgaccttcaccaagagaaagttcggcctgatgaagaaggcctacgagctgagcgtgctgtgcgactgcgagatcgccctgatcatcttcaacagcaccaacaagctgttccagtacgccagcaccgacatggacaaggtgctgctgaagtacaccgagtacaacgagccccacgagagcagaaccaacagcgacatcgtggagaccctgagaaagaagggcctgaacggctgcgacagccccgaccccgacgccgacgacagcgtgggccacagccccgagagcgaggacaagtacagaaagatcaacgaggacatcgacctgatgatcagcagacagagactgtgcgccgtgcccccccccaacttcgagatgcccgtgagcatccccgtgagcagccacaacagcctggtgtacagcaaccccgtgagcagcctgggcaaccccaacctgctgcccctggcccaccccagcctgcagagaaacagcatgagccccggcgtgacccacagaccccccagcgccggcaacaccggcggcctgatgggcggcgacctgaccagcggcgccggcaccagcgccggcaacggctacggcaaccccagaaacagccccggcctgctggtgagccccggcaacctgaacaagaacatgcaggccaagagccccccccccatgaacctgggcatgaacaacagaaagcccgacctgagagtgctgatcccccccggcagcaagaacaccatgcccagcgtgagcgaggacgtggacctgctgctgaaccagagaatcaacaacagccagagcgcccagagcctggccacccccgtggtgagcgtggccacccccaccctgcccggccagggcatgggcggctaccccagcgccatcagcaccacctacggcaccgagtacagcctgagcagcgccgacctgagcagcctgagcggcttcaacaccgccagcgccctgcacctgggcagcgtgaccggctggcagcagcagcacctgcacaacatgccccccagcgccctgagccagctgggcgacagaaccaccacccccagcagatacccccagcacaccagacacgaggccggcagaagccccgtggacagcctgagcagctgcagcagcagctacgacggcagcgacagagaggaccacagaaacgagttccacagccccatcggcctgaccagacccagccccgacgagagagagagccccagcgtgaagagaatgagactgagcgagggctgggccacctag

SEQ ID NO: 340230 - protein, 129 aa, Artificial Sequence
  derived and/or modified sequence
MGRKKIQITRIMDERNRQVTFTKRKFGLMKKAYELSVLCDCEIALIIFNSTNKLFQYASTDMDKVLLKYTEYNEPHESRTNSDIVETLRKKGLNGCDSPDPDADDSVGHSPESEDKYRKINEDIDLMIS

SEQ ID NO: 340231 - protein, 126 aa, Artificial Sequence
  derived and/or modified sequence
MGRKKIQITRIMDERNRQVTFTKRKFGLMKKAYELSVLCDCEIALIIFNSTNKLFQYASTDMDKVLLKYTEYNEPHESRTNSDIVETLRKKGLNGCDSPDPDADDSVGHSPESEDKYRKINEDIDL

SEQ ID NO: 340232 - DNA, 297 bp, Artificial Sequence
  derived and/or modified sequence
atgggcagaaagaaaattcagatcacccgcatcatggatgagcgcaaccgacaggtgacttttactaaaagaaaattcgggctcatgaagaaagcttatgagttgtcagtactttgcgactgtgaaatagcacttatcatttttaatagcaccaacaagctttttcagtatgcgagcacagacatggataaagtgcttctcaagtacaccgaatataatgagccccatgagtcccgaaccaactccgatatcgtggagacgcttagaaaaaagggcctcaatggctgcgactcctag

SEQ ID NO: 340233 - DNA, 390 bp, Artificial Sequence
  derived and/or modified sequence
atgggccggaaaaagattcagatcacccgcataatggacgagaggaatcggcaggttacattcacaaagaggaaattcggtctgatgaaaaaggcctacgagctgagcgttctgtgcgattgtgagatcgctcttataatatttaacagcactaataagctgttccagtatgcatccacggacatggataaggtcttgctgaagtacactgagtataatgagccccacgaatcgagaaccaattcagatatcgtggagaccttgcgcaagaaaggcttgaacggatgtgatagccctgaccccgacgccgatgatagtgttggacatagcccggagagtgaggacaaatatagaaagattaacgaggacattgacctgatgatctcttag

SEQ ID NO: 340234 - DNA, 381 bp, Artificial Sequence
  derived and/or modified sequence
atgggccggaagaaaatccaaattacaagaattatggacgagcgcaacagacaggtgaccttcacaaagagaaagtttggactgatgaagaaggcctacgaactctcagtgttgtgtgactgcgaaattgcccttatcatctttaactcaacgaacaagcttttccagtacgcctctactgacatggacaaggtcttgctcaagtatactgaatataacgagccccacgaatcccgcacaaactctgatatcgtggagactctccgaaaaaaaggcttgaatggatgcgactctccagatcctgatgcagacgactccgtcggacactctcccgaaagcgaagataagtataggaagattaacgaagatattgatctttag

SEQ ID NO: 340235 - DNA, 297 bp, Artificial Sequence
  derived and/or modified sequence
atgggcaggaagaagatccagatcacccgcatcatggatgaaagaaaccggcaggtgaccttcaccaagaggaagtttggcctgatgaagaaggcctatgagctgtctgtgctgtgtgactgtgaaattgccctgatcatcttcaacagcaccaacaagctgttccagtatgccagcacagacatggacaaggtgctgctgaagtacacagagtacaatgagccccatgagagcaggaccaacagcgacatcgtggagaccctgaggaagaagggcctgaatggctgtgacagctag

SEQ ID NO: 340236 - DNA, 390 bp, Artificial Sequence
  derived and/or modified sequence
atgggcaggaagaagatccagatcacccgcatcatggatgaaagaaaccggcaggtgaccttcaccaagaggaagtttggcctgatgaagaaggcctatgagctgtctgtgctgtgtgactgtgaaattgccctgatcatcttcaacagcaccaacaagctgttccagtatgccagcacagacatggacaaggtgctgctgaagtacacagagtacaatgagccccatgagagcaggaccaacagcgacatcgtggagaccctgaggaagaagggcctgaatggctgtgacagcccagaccctgatgctgatgacagcgtgggccacagccctgagagcgaggacaagtacaggaagatcaatgaagacatcgacctgatgatctcctag

SEQ ID NO: 340237 - DNA, 381 bp, Artificial Sequence
  derived and/or modified sequence
atgggcaggaagaagatccagatcacccgcatcatggatgaaagaaaccggcaggtgaccttcaccaagaggaagtttggcctgatgaagaaggcctatgagctgtctgtgctgtgtgactgtgaaattgccctgatcatcttcaacagcaccaacaagctgttccagtatgccagcacagacatggacaaggtgctgctgaagtacacagagtacaatgagccccatgagagcaggaccaacagcgacatcgtggagaccctgaggaagaagggcctgaatggctgtgacagcccagaccctgatgctgatgacagcgtgggccacagccctgagagcgaggacaagtacaggaagatcaatgaagacatcgacctgtag

SEQ ID NO: 340238 - DNA, 721 bp, Artificial Sequence
  derived and/or modified sequence
aagggggcaaagcctcggtcttcatagaaaaggagaggaggcaaacgcagcccaaactggggggtttctcttcaaagccagctggtctggctttattctgcaggaatttttttacctgtcagggtttggacaacaaagccctcagcaggtgctgacgggtacaacttcctggagaagcagaaaggcactggtgccaaagaagagttgcaaactgtgaagtaacttctatgaagagatgaagtaaagaacggaaggcaaatgattgtggcagtaaagaagtgtatgtggaacgaatgcaggaatttgggaactgagctgtgcaagtgctgaagaaggagatttgtttggaggaaacaggaaagagaaagaaaaggaaggaaaaaatacataatttcagggacgagagagagaagaaaaacggggactatggggagaaaaaagattcagattacgaggattatggatgaacgtaacagacaggtgacatttacaaagaggaaatttgggttgatgaagaaggcttatgagctgagcgtgctgtgtgactgtgagattgcgctgatcatcttcaacagcaccaacaagctgttccagtatgccagcaccgacatggacaaagtgcttctcaagtacacggagtacaacgagccgcatgagagccggacaaactcagacatcgtggagacgttgagaaagaagggccttaatggctgtgacagcc

SEQ ID NO: 340239 - DNA, 609 bp, Artificial Sequence
  derived and/or modified sequence
gaagctgcttcctcggtaaatatttccaaactgattagaaagttcatggccccgcgatgaagtcgagatctcaaatactgcaggaacgaatgcaggaatttgggaactgagctgtgcaagtgctgaagaaggagatttgtttggaggaaacaggaaagagaaagaaaaggaaggaaaaaatacataatttcagggacgagagagagaagaaaaacggggactatggggagaaaaaagattcagattacgaggattatggatgaacgtaacagacaggtgacatttacaaagaggaaatttgggttgatgaagaaggcttatgagctgagcgtgctgtgtgactgtgagattgcgctgatcatcttcaacagcaccaacaagctgttccagtatgccagcaccgacatggacaaagtgcttctcaagtacacggagtacaacgagccgcatgagagccggacaaactcagacatcgtggagacgttgagaaagaagggccttaatggctgtgacagcccagaccccgatgcggacgattccgtaggtcacagccctgagtctgaggacaagtacaggaaaattaacgaagatattgatctaatgatcagc

SEQ ID NO: 340240 - DNA, 557 bp, Artificial Sequence
  derived and/or modified sequence
acatttcttcccttggagaattgaagcaaatatgcagtacgaacgaatgcaggaatttgggaactgagctgtgcaagtgctgaagaaggagatttgtttggaggaaacaggaaagagaaagaaaaggaaggaaaaaatacataatttcagggacgagagagagaagaaaaacggggactatggggagaaaaaagattcagattacgaggattatggatgaacgtaacagacaggtgacatttacaaagaggaaatttgggttgatgaagaaggcttatgagctgagcgtgctgtgtgactgtgagattgcgctgatcatcttcaacagcaccaacaagctgttccagtatgccagcaccgacatggacaaagtgcttctcaagtacacggagtacaacgagccgcatgagagccggacaaactcagacatcgtggagacgttgagaaagaagggccttaatggctgtgacagcccagaccccgatgcggacgattccgtaggtcacagccctgagtctgaggacaagtacaggaaaattaacgaagatattgatcta

SEQ ID NO: 340241 - DNA, 297 bp, Artificial Sequence
  derived and/or modified sequence
atgggccggaagaagatccagatcacccggatcatggacgagcggaataggcaggtgacgttcacaaagaggaaatttggattgatgaagaaagcttatgagctgtctgtgctgtgtgactgcgaaattgcgctgatcatcttcaattccacgaataagctctttcagtatgcttctaccgacatggacaaggtcctactgaagtacactgagtataacgagccccatgagtctaggaccaactctgatatagtggaaacactgcggaaaaaggggctgaacggctgtgattcctag

SEQ ID NO: 340242 - DNA, 390 bp, Artificial Sequence
  derived and/or modified sequence
atgggccggaagaagatccagatcacccggatcatggacgagcggaatcggcaagtgacctttacaaagaggaagtttggcctgatgaagaaggcttatgaactgagtgtcctgtgcgattgcgagatagcattgattatctttaattcaacaaataaactttttcagtatgcatctactgatatggacaaggtactactgaaatacactgaatacaacgagccacacgagtccagaacaaactcagatattgtcgagacattaaggaagaagggccttaatggctgcgacagccccgaccccgatgccgatgattctgttggccattcccccgagagtgaagacaaataccggaaaatcaacgaggatatcgatttgatgatttcatag

SEQ ID NO: 340243 - DNA, 381 bp, Artificial Sequence
  derived and/or modified sequence
atgggccggaagaagatccagatcacccggatcatggacgagcggaatcggcaagtaacctttacaaagcggaagttcggactaatgaagaaagcatacgagttaagcgtgctgtgcgattgtgaaatcgctctcatcatcttcaactccaccaataaactctttcagtatgcctctacagatatggataaggtgctgttaaaatacaccgagtacaacgaaccccacgagagccggaccaattccgacatcgtggaaaccctccggaagaaagggctcaatgggtgtgacagccccgatccagacgctgatgattccgttggccactcaccagaatcagaagacaaatacagaaaaatcaacgaggatatcgatttgtag

SEQ ID NO: 340244 - DNA, 297 bp, Artificial Sequence
  derived and/or modified sequence
atgggccgaaaaaaaattcaaattaccagaatcatggatgaacggaacagacaggtaactttcacaaaacgcaaattcggcttgatgaagaaggcctacgagctatcagtcctctgcgattgtgagattgcgctcattatcttcaattctacaaataagctgtttcaatatgcgagtactgatatggacaaggttcttctcaagtatactgaatacaatgaaccccacgagtctagaactaattccgatatcgtcgagacactgagaaagaagggattgaatggttgtgactcttag

SEQ ID NO: 340245 - DNA, 390 bp, Artificial Sequence
  derived and/or modified sequence
atggggaggaagaagatccaaatcacaaggatcatggatgaaaggaatcgccaggtgaccttcactaaaaggaagtttgggctaatgaagaaggcctatgaactgtcagttctgtgtgattgcgagatcgctctgatcattttcaactctaccaataagttgtttcagtacgccagcacagacatggacaaagtcttgctcaagtacaccgaatacaacgaaccacacgagagtagaaccaatagcgatatagtggagacacttagaaaaaaagggctcaatgggtgtgattcccctgaccccgatgctgatgacagcgtgggacactctcccgagtcagaggacaagtacaggaagatcaacgaagacattgatcttatgatcagttag

SEQ ID NO: 340246 - DNA, 381 bp, Artificial Sequence
  derived and/or modified sequence
atgggtagaaagaaaattcaaattacaaggataatggacgagcgcaaccgccaagtcactttcactaaaaggaagtttgggttgatgaagaaggcgtacgagctgtccgttctgtgtgactgcgagatcgctctgattatcttcaactctacaaacaaattgttccagtacgcgtcaaccgacatggacaaggtactccttaagtacacagagtataacgaaccccacgagtcccggaccaattccgacattgtggagactttgaggaagaaaggtctcaatggctgtgattccccggacccagatgcagacgactctgtcggccactcccctgagagcgaggacaagtacagaaaaatcaatgaggatatagacttatag

SEQ ID NO: 340247 - DNA, 297 bp, Artificial Sequence
  derived and/or modified sequence
atgggcagaaagaagatccagatcaccagaatcatggacgagagaaacagacaggtgaccttcaccaagagaaagttcggcctgatgaagaaggcctacgagctgagcgtgctgtgcgactgcgagatcgccctgatcatcttcaacagcaccaacaagctgttccagtacgccagcaccgacatggacaaggtgctgctgaagtacaccgagtacaacgagccccacgagagcagaaccaacagcgacatcgtggagaccctgagaaagaagggcctgaacggctgcgacagctag

SEQ ID NO: 340248 - DNA, 390 bp, Artificial Sequence
  derived and/or modified sequence
atgggcagaaagaagatccagatcaccagaatcatggacgagagaaacagacaggtgaccttcaccaagagaaagttcggcctgatgaagaaggcctacgagctgagcgtgctgtgcgactgcgagatcgccctgatcatcttcaacagcaccaacaagctgttccagtacgccagcaccgacatggacaaggtgctgctgaagtacaccgagtacaacgagccccacgagagcagaaccaacagcgacatcgtggagaccctgagaaagaagggcctgaacggctgcgacagccccgaccccgacgccgacgacagcgtgggccacagccccgagagcgaggacaagtacagaaagatcaacgaggacatcgacctgatgatcagctag

SEQ ID NO: 340249 - DNA, 381 bp, Artificial Sequence
  derived and/or modified sequence
atgggcagaaagaagatccagatcaccagaatcatggacgagagaaacagacaggtgaccttcaccaagagaaagttcggcctgatgaagaaggcctacgagctgagcgtgctgtgcgactgcgagatcgccctgatcatcttcaacagcaccaacaagctgttccagtacgccagcaccgacatggacaaggtgctgctgaagtacaccgagtacaacgagccccacgagagcagaaccaacagcgacatcgtggagaccctgagaaagaagggcctgaacggctgcgacagccccgaccccgacgccgacgacagcgtgggccacagccccgagagcgaggacaagtacagaaagatcaacgaggacatcgacctgtag

SEQ ID NO: 340250 - protein, 120 aa, Artificial Sequence
  derived and/or modified sequence
MGRKKIQITRIMDERNRQVTFTKRKFGLMKKAYELSVLCDCEIALIIFNSTNKLFQYASTDMDKVLLKYTEYNEPHESRTNSDIVEALNKKENKGCESPDPDSSYALTPRTEEKYKKINE

SEQ ID NO: 340251 - DNA, 684 bp, Artificial Sequence
  derived and/or modified sequence
atggggaggaaaaaaattcagattacacggattatggatgaacgtaatagacaggtcaccttcactaagcgcaagttcggtttgatgaagaaagcctatgagctttccgtgctgtgcgattgcgagattgcactgataatttttaacagtactaacaagcttttccagtatgcatccactgatatggacaaggtactattaaaatacaccgaatacaatgaacctcacgaatcccggacaaattcagatatcgttgaggcccttaataaaaaggagaataaaggttgcgaaagtcccgacccagatagcagctatgcattgactcccagaaccgaggaaaagtataaaaaaattaacgaagaattcgacaacatgataaagagccacaaaataccagctgtcccacctcccaacttcgaaatgcccgtgagcatccccgtttcctctcataacagcttggtgtattctaaccccgttagcagcctcgggaatcctaatctgctacctttggcccaccccagtctgcagcgcaactctatgtctcccggcgtgacacatagacccccaagcgccggtaacaccggggggctgatgggcggtgacttaactagtggagccgggacgagtgccggcaatggctatggcaacccccgaaacagcccaggcctgctggtcagcccatag

SEQ ID NO: 340252 - DNA, 363 bp, Artificial Sequence
  derived and/or modified sequence
atgggccgaaagaaaatccagattactcgtataatggacgagcggaaccgacaagtgacattcactaaacgcaaattcggactaatgaaaaaggcttacgaattgagtgttctgtgcgattgcgagatagccttgatcattttcaacagcacaaataagctattccagtatgcgagcaccgacatggacaaggtgctgctaaagtatacggagtacaacgaaccacacgagtctaggaccaactcagacatcgtcgaagcacttaataaaaaggaaaataaggggtgcgagtcacccgaccccgactcttcctacgcgctgacccctcgaaccgaggaaaagtacaagaaaattaatgagtag

SEQ ID NO: 340253 - DNA, 729 bp, Artificial Sequence
  derived and/or modified sequence
atggggagaaagaagattcagattactaggattatggacgagcgaaaccgccaggtgactttcacaaaacggaagtttggccttatgaagaaggcgtatgagctgagcgtactatgtgactgcgagatcgctctgatcatctttaattctaccaataagcttttccaatatgcaagtaccgacatggacaaggtgctactcaagtatacagaatataatgaaccccacgaatctaggactaacagtgatattgtggaggcgttgaataaaaaagaaaataagggctgtgaatcgcccgaccctgacagtagctacgcgctcaccccccgtacggaggagaaatacaaaaaaatcaatgaagaatttgacaatatgatcaagagccataagataccagctgtgcccccacccaacttcgaaatgccagtctctattccggtgtccagtcataattcactggtgtacagtaaccctgtctccagcttgggcaatcccaatctgctacctttggctcatcccagcctccagcgtaactccatgtctcctggcgtgacgcacaggccccccagtgccggcaataccggcgggctaatgggcggagatctgacctcaggcgcaggtacgtctgcggggaacggatatggcaaccctagaaactctcccggactgctggtgagtccaggaaacctgaacaaaaacatgcaggcaaaaagccctccccctatgtag

SEQ ID NO: 340254 - DNA, 684 bp, Artificial Sequence
  derived and/or modified sequence
atgggcaggaagaagatccagatcacccgcatcatggatgaaagaaaccggcaggtgaccttcaccaagaggaagtttggcctgatgaagaaggcctatgagctgtctgtgctgtgtgactgtgaaattgccctgatcatcttcaacagcaccaacaagctgttccagtatgccagcacagacatggacaaggtgctgctgaagtacacagagtacaatgagccccatgagagcaggaccaacagcgacatcgtggaggccctgaacaagaaggagaacaagggctgtgagagcccagaccctgacagcagctatgccctgacccccaggacagaggagaagtacaagaagatcaatgaggagtttgacaacatgatcaagagccacaagatcccagctgtgcccccacccaactttgagatgcctgtgtccatccctgtgagcagccacaacagcctggtgtacagcaaccctgtgagcagcctgggcaaccccaacctgctgcccctggcccaccccagcctgcagagaaattccatgagccctggggtgacccaccggccccccagcgctggcaacacaggaggcctgatgggcggggacctgaccagcggggccggcaccagcgctggaaatggctacggcaaccccaggaacagccctggcctgctggtgagcccctag

SEQ ID NO: 340255 - DNA, 363 bp, Artificial Sequence
  derived and/or modified sequence
atgggcaggaagaagatccagatcacccgcatcatggatgaaagaaaccggcaggtgaccttcaccaagaggaagtttggcctgatgaagaaggcctatgagctgtctgtgctgtgtgactgtgaaattgccctgatcatcttcaacagcaccaacaagctgttccagtatgccagcacagacatggacaaggtgctgctgaagtacacagagtacaatgagccccatgagagcaggaccaacagcgacatcgtggaggccctgaacaagaaggagaacaagggctgtgagagcccagaccctgacagcagctatgccctgacccccaggacagaggagaagtacaagaagatcaatgaatag

SEQ ID NO: 340256 - DNA, 729 bp, Artificial Sequence
  derived and/or modified sequence
atgggcaggaagaagatccagatcacccgcatcatggatgaaagaaaccggcaggtgaccttcaccaagaggaagtttggcctgatgaagaaggcctatgagctgtctgtgctgtgtgactgtgaaattgccctgatcatcttcaacagcaccaacaagctgttccagtatgccagcacagacatggacaaggtgctgctgaagtacacagagtacaatgagccccatgagagcaggaccaacagcgacatcgtggaggccctgaacaagaaggagaacaagggctgtgagagcccagaccctgacagcagctatgccctgacccccaggacagaggagaagtacaagaagatcaatgaggagtttgacaacatgatcaagagccacaagatcccagctgtgcccccacccaactttgagatgcctgtgtccatccctgtgagcagccacaacagcctggtgtacagcaaccctgtgagcagcctgggcaaccccaacctgctgcccctggcccaccccagcctgcagagaaattccatgagccctggggtgacccaccggccccccagcgctggcaacacaggaggcctgatgggcggggacctgaccagcggggccggcaccagcgctggaaatggctacggcaaccccaggaacagccctggcctgctggtgtccccaggcaacctgaacaagaacatgcaggccaagagccccccacccatgtag

SEQ ID NO: 340257 - DNA, 854 bp, Artificial Sequence
  derived and/or modified sequence
atgaattagctgccctacttagcatacacagcaggaacgaatgcaggaatttgggaactgagctgtgcaagtgctgaagaaggagatttgtttggaggaaacaggaaagagaaagaaaaggaaggaaaaaatacataatttcagggacgagagagagaagaaaaacggggactatggggagaaaaaagattcagattacgaggattatggatgaacgtaacagacaggtgacatttacaaagaggaaatttgggttgatgaagaaggcttatgagctgagcgtgctgtgtgactgtgagattgcgctgatcatcttcaacagcaccaacaagctgttccagtatgccagcaccgacatggacaaagtgcttctcaagtacacggagtacaacgagccgcatgagagccggacaaactcagacatcgtggaggcattgaacaagaaagaaaacaaaggctgtgaaagccccgatcccgactcctcttatgcactcaccccacgcactgaagaaaaatacaaaaaaattaatgaagaatttgataatatgatcaagagtcataaaattcctgctgttccacctcccaacttcgagatgccagtctccatcccagtgtccagccacaacagtttggtgtacagcaaccctgtcagctcactgggaaaccccaacctattgccactggctcacccttctctgcagaggaatagtatgtctcctggtgtaacacatcgacctccaagtgcaggtaacacaggtggtctgatgggtggagacctcacgtctggtgcaggcaccagtgcagggaacgggtatggcaatccccgaaactcaccaggtctgctggtctcacct

SEQ ID NO: 340258 - DNA, 623 bp, Artificial Sequence
  derived and/or modified sequence
ctttagcatctgtccagaagaaattcttctcgacttgggtctcaaaccactttgccttcatctgcctgcttatgccaaactcaaaatgagcagaagcctgccataatgaagttcccctttttagaacgaatgcaggaatttgggaactgagctgtgcaagtgctgaagaaggagatttgtttggaggaaacaggaaagagaaagaaaaggaaggaaaaaatacataatttcagggacgagagagagaagaaaaacggggactatggggagaaaaaagattcagattacgaggattatggatgaacgtaacagacaggtgacatttacaaagaggaaatttgggttgatgaagaaggcttatgagctgagcgtgctgtgtgactgtgagattgcgctgatcatcttcaacagcaccaacaagctgttccagtatgccagcaccgacatggacaaagtgcttctcaagtacacggagtacaacgagccgcatgagagccggacaaactcagacatcgtggaggcattgaacaagaaagaaaacaaaggctgtgaaagccccgatcccgactcctcttatgcactcaccccacgcactgaagaaaaatacaaaaaaattaatgaag

SEQ ID NO: 340259 - DNA, 1061 bp, Artificial Sequence
  derived and/or modified sequence
catcttcgggctgctattggattgactttgaaggttctgtgtgggtcgccgtggctgcatgtttgaatcaggtggagaagcacttcaacgctggacgaagtaaagattattgttgttattttttttttctctctctctctctcttaagaaaggaaaatatcccaaggactaatctgatcgggtcttccttcatcaggaacgaatgcaggaatttgggaactgagctgtgcaagtgctgaagaaggagatttgtttggaggaaacaggaaagagaaagaaaaggaaggaaaaaatacataatttcagggacgagagagagaagaaaaacggggactatggggagaaaaaagattcagattacgaggattatggatgaacgtaacagacaggtgacatttacaaagaggaaatttgggttgatgaagaaggcttatgagctgagcgtgctgtgtgactgtgagattgcgctgatcatcttcaacagcaccaacaagctgttccagtatgccagcaccgacatggacaaagtgcttctcaagtacacggagtacaacgagccgcatgagagccggacaaactcagacatcgtggaggcattgaacaagaaagaaaacaaaggctgtgaaagccccgatcccgactcctcttatgcactcaccccacgcactgaagaaaaatacaaaaaaattaatgaagaatttgataatatgatcaagagtcataaaattcctgctgttccacctcccaacttcgagatgccagtctccatcccagtgtccagccacaacagtttggtgtacagcaaccctgtcagctcactgggaaaccccaacctattgccactggctcacccttctctgcagaggaatagtatgtctcctggtgtaacacatcgacctccaagtgcaggtaacacaggtggtctgatgggtggagacctcacgtctggtgcaggcaccagtgcagggaacgggtatggcaatccccgaaactcaccaggtctgctggtctcacctggtaacttgaacaagaatatgcaagcaaaatctcctcccccaatg

SEQ ID NO: 340260 - DNA, 684 bp, Artificial Sequence
  derived and/or modified sequence
atgggccggaagaagatccagatcacccggatcatggacgagcggaaccgccaggtaacatttacaaaacgcaagttcggcctgatgaagaaggcatatgagctcagcgtcctgtgcgactgtgaaatcgccttaataatctttaactccacaaacaaattgtttcaatatgcttccaccgacatggacaaagttctgctcaaatacaccgaatacaacgagccccacgaatccagaacaaactccgatatcgttgaggctctaaataaaaaagaaaataagggatgtgagtctcccgatcctgatagttcatatgctctcaccccgcgcactgaagagaaatataagaaaatcaacgaagagttcgataatatgataaagagtcacaaaatcccggctgtcccccctcctaactttgagatgcctgtcagcattcctgtgagctcccacaactctctggtttacagtaaccccgtgagctcattggggaatccaaacctcctgcctctggcacacccctccctccagcgaaattcaatgtctcctggcgtcacccacagacccccatctgcgggcaacactggtgggctcatgggtggcgacctgacctccggcgccgggacatcagcgggaaatggctatggcaaccccaggaattcccccggactcttggtgtccccatag

SEQ ID NO: 340261 - DNA, 363 bp, Artificial Sequence
  derived and/or modified sequence
atgggccggaagaagatccagatcacccggatcatggacgagcggaaccgccaggttacattcaccaagcgcaagttcggacttatgaagaaagcttatgagcttagcgtgctgtgcgattgtgagattgctcttattatctttaattcaacgaacaagcttttccagtacgcatccactgatatggataaggtacttttgaagtatactgaatacaatgaaccccacgagagcaggactaacagcgacatcgtggaagccctgaataaaaaggagaacaagggatgcgagagtccggaccctgattctagctacgctctgacacccagaacagaggagaagtacaagaaaattaatgaatag

SEQ ID NO: 340262 - DNA, 729 bp, Artificial Sequence
  derived and/or modified sequence
atgggccggaagaagatccagatcacccggatcatggacgagcggaatcggcaggtgacctttactaaacggaagtttggtctcatgaaaaaggcctacgaactcagcgtcctgtgcgactgtgagatcgccctgatcatctttaactctacgaataagttattccagtacgcatctactgatatggacaaagtgttactgaaatacacggaatataacgagccacatgagtcgcgcactaattctgacatcgtggaggctctgaataaaaaggagaataaggggtgcgagagcccggatcctgacagttcctatgcgctcacgccgcgcaccgaagaaaaatacaagaagattaacgaggagttcgataatatgatcaaaagccacaaaatcccagcggtaccaccacccaattttgaaatgcccgtgtccatcccagttagttcccacaacagcctggtgtacagcaacccagtgtccagtcttggcaatcccaacctgttgccgcttgcgcatccttccttgcagcggaactctatgtccccaggtgtgacccataggccgccctccgccggaaatacgggcggcctgatggggggtgacctcacatcaggtgcggggacttccgcgggtaacggctatggaaatcccagaaactcacccggtctgctggtgtccccagggaatctgaacaaaaatatgcaagctaagtctcccccacccatgtag

SEQ ID NO: 340263 - DNA, 684 bp, Artificial Sequence
  derived and/or modified sequence
atgggacggaaaaagatccagataacccgtatcatggacgaacgaaacagacaggtgacattcaccaaaagaaagttcgggctgatgaaaaaggcttatgagctgagtgtgctatgcgactgcgagatcgctctgatcattttcaactctactaataagttattccagtatgcgtccacggatatggacaaagttctcctgaagtataccgaatataatgaaccacacgagtctcgtacaaatagcgatatcgtggaagctctcaataaaaaggaaaataaggggtgcgaaagccccgatccagattcaagttatgccttgacgccacggactgaggaaaaatataaaaaaataaatgaggagtttgataacatgatcaaatcacacaaaattccagccgtgcctccgcctaattttgagatgccggtcagcatccccgttagcagccacaattctctggtatactccaacccggtgtcctcactcggtaacccaaacctgctccccctggcacacccctccctgcagcgcaactccatgtccccaggggtcactcatcggccaccttctgcaggaaacaccggcggactaatggggggagacttgactagcggagcgggtactagcgctggtaatggatatgggaatcccaggaattcacccggactgctcgtttctccttag

SEQ ID NO: 340264 - DNA, 363 bp, Artificial Sequence
  derived and/or modified sequence
atgggcaggaaaaagatccagatcacacgaattatggatgagagaaataggcaagtaacttttaccaagagaaaatttgggctcatgaaaaaggcttatgagctgtccgtgctgtgtgattgtgagatcgcccttatcatctttaattcgaccaataaattgttccaatatgctagcacagacatggataaggtgctgctgaaatataccgaatacaatgagccccatgaatccagaaccaactcggatattgtggaagccctgaataagaaagaaaataaaggatgtgagagcccggaccctgactcaagctatgccctcacccccagaaccgaggagaaatacaaaaagattaatgaatag

SEQ ID NO: 340265 - DNA, 729 bp, Artificial Sequence
  derived and/or modified sequence
atgggtaggaaaaaaatacagatcacaaggattatggatgagcgtaaccggcaggtgaccttcactaagaggaagttcggccttatgaagaaggcgtatgaacttagtgtgctgtgcgattgtgaaatcgcactgatcatattcaattcaacgaacaaactcttccagtatgcaagtacagacatggacaaggtactgctgaaatacaccgaatacaatgaacctcatgagtcaaggacaaacagtgacatcgtggaggctcttaataaaaaggaaaataaagggtgtgaaagtcctgatccagactcctcttatgcgctcacgcctcgcaccgaagaaaagtataagaaaatcaatgaggaattcgataacatgatcaagtcacacaagatccccgcagtaccaccccctaatttcgagatgcctgtctctatccccgtgtctagccacaacagcttagtgtactccaacccagtttctagcttaggtaaccccaatctgctcccgctcgcacacccaagcctccaacgcaatagcatgagcccaggcgtcacccataggccacctagcgctggtaacacaggaggactgatgggaggcgatttgacttcaggagctggtacaagcgcaggaaatggatatggcaacccacgcaactcacctggtctgcttgtgtctcctggaaatctcaacaaaaatatgcaggccaagagccctcccccaatgtag

SEQ ID NO: 340266 - DNA, 684 bp, Artificial Sequence
  derived and/or modified sequence
atgggcagaaagaagatccagatcaccagaatcatggacgagagaaacagacaggtgaccttcaccaagagaaagttcggcctgatgaagaaggcctacgagctgagcgtgctgtgcgactgcgagatcgccctgatcatcttcaacagcaccaacaagctgttccagtacgccagcaccgacatggacaaggtgctgctgaagtacaccgagtacaacgagccccacgagagcagaaccaacagcgacatcgtggaggccctgaacaagaaggagaacaagggctgcgagagccccgaccccgacagcagctacgccctgacccccagaaccgaggagaagtacaagaagatcaacgaggagttcgacaacatgatcaagagccacaagatccccgccgtgcccccccccaacttcgagatgcccgtgagcatccccgtgagcagccacaacagcctggtgtacagcaaccccgtgagcagcctgggcaaccccaacctgctgcccctggcccaccccagcctgcagagaaacagcatgagccccggcgtgacccacagaccccccagcgccggcaacaccggcggcctgatgggcggcgacctgaccagcggcgccggcaccagcgccggcaacggctacggcaaccccagaaacagccccggcctgctggtgagcccctag

SEQ ID NO: 340267 - DNA, 363 bp, Artificial Sequence
  derived and/or modified sequence
atgggcagaaagaagatccagatcaccagaatcatggacgagagaaacagacaggtgaccttcaccaagagaaagttcggcctgatgaagaaggcctacgagctgagcgtgctgtgcgactgcgagatcgccctgatcatcttcaacagcaccaacaagctgttccagtacgccagcaccgacatggacaaggtgctgctgaagtacaccgagtacaacgagccccacgagagcagaaccaacagcgacatcgtggaggccctgaacaagaaggagaacaagggctgcgagagccccgaccccgacagcagctacgccctgacccccagaaccgaggagaagtacaagaagatcaacgagtag

SEQ ID NO: 340268 - DNA, 729 bp, Artificial Sequence
  derived and/or modified sequence
atgggcagaaagaagatccagatcaccagaatcatggacgagagaaacagacaggtgaccttcaccaagagaaagttcggcctgatgaagaaggcctacgagctgagcgtgctgtgcgactgcgagatcgccctgatcatcttcaacagcaccaacaagctgttccagtacgccagcaccgacatggacaaggtgctgctgaagtacaccgagtacaacgagccccacgagagcagaaccaacagcgacatcgtggaggccctgaacaagaaggagaacaagggctgcgagagccccgaccccgacagcagctacgccctgacccccagaaccgaggagaagtacaagaagatcaacgaggagttcgacaacatgatcaagagccacaagatccccgccgtgcccccccccaacttcgagatgcccgtgagcatccccgtgagcagccacaacagcctggtgtacagcaaccccgtgagcagcctgggcaaccccaacctgctgcccctggcccaccccagcctgcagagaaacagcatgagccccggcgtgacccacagaccccccagcgccggcaacaccggcggcctgatgggcggcgacctgaccagcggcgccggcaccagcgccggcaacggctacggcaaccccagaaacagccccggcctgctggtgagccccggcaacctgaacaagaacatgcaggccaagagccccccccccatgtag

SEQ ID NO: 340269 - DNA, 537 bp, Artificial Sequence
  derived and/or modified sequence
gaccagaccgggcgtcgggtgagcccagaagtgagagcagttggctgtgccccagtgctgtgtgacccagaggcgccgctcaccctctctgagctggtggacatcatagcgggtgcagcccagaactgtcttctgaggaagaggtgctctcctgggcccccactgtccccaggcctcagcaaggcaagtgaggtgctgccgtcatccaggctggacagttcagtgatttgcctgaggccccacagcaggagaacgagaaggctgcctgatcagagagtccctgaagaagattctgtggctacaggcttcagcagagtgtgagggagaccccggttatttcctcagctatttccaccaaatcctcctgtctttcgtggccaacaccccaggcaaggcttggggcccccgtctgctgctggacgagccatgaagaagaagttagtggtgctgggcctgctggccgtggtcctggtgctggtcattgtcggcctctgtctctggctgccctcagcctccaaggaacctgacaaccatgtg

SEQ ID NO: 340270 - DNA, 597 bp, Artificial Sequence
  derived and/or modified sequence
cccggtcagagctttaagctgcagctctgatgccccagggacctctcagacccccctgcccagagcaggcagcccgcgggtgcagcccagaactgtcttctgaggaagaggtgctctcctgggcccccactgtccccaggcctcagcagcaaggcaagtgaggtgctgccgtcatccaggctggacagttcagtgatttgcctgaggccccacagcagagttcaactggagacagagaaaccagctagaggcagagggaggtaacacggagtcccccagaaaggtctgggctgcgcgtgcttcaggtaacctcccttgaccttcaggagaacgagaaggctgcctgatcagagagtccctgaagaagattctgtggctacaggcttcagcagagtgtgagggagaccccggttatttcctcagctatttccaccaaatcctcctgtctttcgtggccaacaccccaggcaaggcttggggcccccgtctgctgctggacgcagagccatgaagaagaagttagtggtgctgggcctgctggccgtggtcctggtgctggtcattgtcggcctctgtctctggctgccctcagcctcc

SEQ ID NO: 340271 - protein, 347 aa, Artificial Sequence
  derived and/or modified sequence
MWRLPRALCVHAAKTSKLSGPWSRPAAFMSTSLISVAVTKIIAKVLEDNKLPGAICSLTCGGADIGTAMAKDERVNLLSFTGSTQVGKQVGLMVQERFGRSLLELGGNNAIIAFEDADLSLVVPSALFAAVGTAGQRCTTARRLFIHESIHDEVVNRLKKAYAQIRVGNPWDPNVLYGPLHTKQAVSMFLGAVEEAKKEGGTVVYGGKVMDRPGNYVEPTIVTGLGHDASIAHTETFAPILYVFKFKNEEEVFAWNNEVKQGLSSSIFTKDLGRIFRWLGPKGSDCGIVNVNIPTSGAEIGGAFGGEKHTGGGRESGSDAWKQYMRRSTCTINYSKDLPLAQGIKFQ

SEQ ID NO: 340272 - DNA, 1044 bp, Artificial Sequence
  derived and/or modified sequence
atgtggagactgccccgcgcattatgtgtacatgccgccaaaacatctaagctctctggcccttggagccggcctgctgcattcatgagtacctctctgatatctgttgcggtgactaagataattgctaaagtgctagaagacaataagctccccggagccatctgctccctcacatgcggcggtgctgatattggcaccgctatggccaaagacgagcgcgtgaatctgctgagcttcacaggctcgactcaggtgggcaagcaggttgggctcatggtccaggagcgtttcggtagatctttgttagagctgggcggcaataacgctattattgcatttgaggatgctgacttgtccctagtggtcccgtcagcactcttcgccgccgtgggcacagcaggccagagatgcacaacagctcggcggctatttattcacgaatccattcatgatgaagtcgtaaatcgcttgaagaaagcctatgctcagattcgggtgggaaacccatgggacccaaatgttctctatggccctctccacaccaagcaagccgtctcgatgttcctcggggccgtggaagaggctaaaaaagagggtggtacggtcgtctacggcggtaaagtcatggaccgcccaggtaactacgtggagcccactattgttactggtctggggcacgatgccagcatcgcgcatacagagacattcgccccaattctgtacgtcttcaagtttaagaacgaagaagaggtcttcgcttggaacaacgaggtcaagcagggccttagctcgtcgatttttacaaaagacctaggccgaatttttcgatggctcggcccaaaggggagcgactgcggaatcgtgaatgttaacattccaactagcggcgctgagataggcggggcgtttggcggtgaaaagcataccggaggcggtcgggagtccggctctgatgcctggaagcaatatatgagacggtctacttgtaccattaattattccaaagacctgccgttggctcaggggattaaattccagtag

SEQ ID NO: 340273 - DNA, 1044 bp, Artificial Sequence
  derived and/or modified sequence
atgtggaggctgccccgggccctgtgtgtgcacgccgccaagaccagcaagctgagcggcccctggagcaggcctgctgccttcatgagcaccagcctcatctctgtggccgtgaccaagatcatcgccaaggtgctggaggacaacaagctgcccggggccatctgcagcctgacctgtggcggcgctgacattggaacagccatggccaaggatgagcgggtgaacctgctgtccttcaccggcagcacccaggtgggcaagcaggtgggcctgatggtgcaggagcgcttcggccgcagcctgctggagctgggcggcaacaatgccatcatcgcctttgaagatgctgacctgagcctggtggtgcccagcgccctgtttgctgctgtgggcacagctggccagcgctgcaccacagcccggcggctcttcatccacgagagcatccatgatgaggtggtgaaccggctgaagaaggcctatgcccagatccgggtgggcaacccctgggaccccaacgtgctgtatggccccctgcacaccaagcaggccgtgtccatgttcctgggcgctgtggaggaggccaagaaggagggcggcaccgtggtgtatggaggcaaggtgatggacaggcctggcaactacgtggagcccaccatcgtgacaggcctgggccatgatgccagcatcgcccacacagagacctttgcccccatcctgtatgtgttcaagttcaagaatgaggaggaggtgtttgcctggaacaatgaggtgaagcagggcctgagcagcagcatcttcaccaaggacctgggccgcatcttccgctggctgggccccaagggcagtgactgtggcatcgtgaatgtgaacatccccaccagcggggctgagatcggcggggccttcggcggggagaagcacactggaggcggccgggagagcggcagtgatgcctggaagcagtacatgaggaggagcacctgcaccatcaactacagcaaggacctgcccctggcccagggcatcaagttccagtag

SEQ ID NO: 340274 - DNA, 1252 bp, Artificial Sequence
  derived and/or modified sequence
atgtggcgccttcctcgcgcgctgtgtgtgcacgctgcaaagaccagcaagctctctggaccttggagcaggcctgccgccttcatgtccacttccctcattagtgtggctgtcacaaagataatagccaaggttctggaggacaacaagctgcctggtgcaatttgttccttgacttgtggtggagcagatattggcacagcaatggccaaagatgaacgagtgaacctgctgtccttcactgggagcactcaggtgggaaaacaggtgggcctgatggtgcaggagaggtttgggagaagtctgttggaacttggaggaaacaatgccattattgcctttgaagatgcagacctcagcttagttgttccatcagctctcttcgctgctgtgggaacagctggccagaggtgtaccactgcgaggcgactgtttatacatgaaagcatccatgatgaggttgtaaacagacttaaaaaggcctatgcacagatccgagttgggaacccatgggaccctaatgttctctatgggccactccacaccaagcaggcagtgagcatgtttcttggagcagtggaagaagcaaagaaagaaggtggcacagtggtctatgggggcaaggttatggatcgccctggaaattatgtagaaccgacaattgtgacaggtcttggccacgatgcgtccattgcacacacagagacttttgctccgattctctatgtctttaaattcaagaatgaagaagaggtctttgcatggaataatgaagtaaaacagggactttcaagtagcatctttaccaaagatctgggcagaatctttcgctggcttggacctaaaggatcagactgtggcattgtaaatgtcaacattccaacaagtggggctgagattggaggtgcctttggaggagaaaagcacactggtggtggcagggagtctggcagtgatgcctggaaacagtacatgagaaggtctacttgtactatcaactacagtaaagaccttcctctggcccaaggaatcaagtttcagtaaaggtgttttagatgaacatcccttaatttgaggtgttccagcagctgtttttggagaagacaaagaaaattaaagttttccctgaataaatgcattattatgactgtgacagtgactaatccccctatgaccccaaagccctgattaaatcaagagattccttttttaaaaatcaaaataaaattgttacaacatagccatagttact

SEQ ID NO: 340275 - DNA, 1044 bp, Artificial Sequence
  derived and/or modified sequence
atgtggcggctgccccgggccctgtgcgtgcacgccgccaagacctctaaattgagtggaccttggtcaaggcccgctgcctttatgtcaactagtctgatctctgtggcggtgacaaagataatcgccaaggtcctggaagacaacaaattaccgggcgcgatttgctccctcacgtgtgggggggcagatatcggcacagctatggccaaggacgaacgagtaaaccttctgtcttttacggggagtacccaggttggtaaacaggtcggcctcatggttcaggagagattcgggaggtcactgctggagttgggcgggaacaacgctatcattgcgttcgaagacgccgacttgtccctcgtggtacccagcgccctgttcgccgccgtgggaacagccggccaacgctgtaccacagctaggcggctttttattcacgagtctattcacgacgaggtggtgaaccgacttaagaaggcttatgctcaaataagagtgggcaacccgtgggatccgaacgtactgtacggcccactacataccaagcaggcagtgagcatgtttttgggggctgtagaggaagccaagaaagaagggggtacagtggtatacggcggaaaagtgatggatcggccagggaattacgtggagccaaccattgtgactggcctcggacatgatgcctccatagcccacactgaaactttcgcaccaattttgtatgtgtttaaattcaagaacgaagaagaggtgttcgcatggaataacgaggttaaacagggactgagttcttccatcttcacgaaagaccttggtcggatctttaggtggctcggacccaaagggagcgattgtgggatcgtgaacgttaatatacccacctccggcgctgaaatcggcggcgctttcggtggagaaaaacataccggcggaggacgagagtccggaagcgatgcgtggaaacagtatatgaggagaagtacgtgcactattaattacagcaaggaccttcccctggcacaaggcattaaattccagtag

SEQ ID NO: 340276 - DNA, 1044 bp, Artificial Sequence
  derived and/or modified sequence
atgtggcgactcccacgggctctatgcgttcacgcagcaaaaacatcaaaattgagtggaccgtggagtcgacctgctgccttcatgtctacttctcttatttccgtggccgtcactaaaattatcgccaaggtgctggaagataataagctgccaggggctatttgttctcttacctgcgggggtgccgacatagggacagctatggccaaggacgaacgggttaatctactttctttcactggtagtacccaggtgggaaagcaggtcggtcttatggttcaggaacggttcggccgatcactcctggagctggggggtaataacgccatcatcgcatttgaggacgcagacctgtccctcgtggtcccctctgccttgtttgcagccgtggggacggcagggcaacgctgcaccacagcgaggagactcttcatccacgaaagcatccacgacgaggtcgtgaaccgccttaagaaagcatatgcacagattcgcgtgggaaatccgtgggatcccaacgtgctctacgggcctctgcatacgaagcaggcggtgagtatgttcctgggcgcagtggaggaggcgaagaaggaggggggaacggttgtgtacggtggcaaggtgatggataggcccggaaattatgtggaacctactatcgtgacgggccttggccacgatgcctcgattgctcacacagagaccttcgcgcctatcctgtacgtgtttaaattcaaaaacgaggaagaagtctttgcttggaataacgaagttaagcagggactgtcttcatctatcttcacgaaagacctggggaggatcttcagatggcttggaccgaagggctctgactgtggcattgtgaacgtcaacatccccacctccggagcggagataggtggagcgtttggaggtgagaaacatactggcggaggccgagagtcagggtcagacgcctggaagcaatacatgcgccgatcaacctgcacaatcaactatagcaaggatttgccactggcccaggggattaagtttcagtag

SEQ ID NO: 340277 - DNA, 1044 bp, Artificial Sequence
  derived and/or modified sequence
atgtggagactgcccagagccctgtgcgtgcacgccgccaagaccagcaagctgagcggcccctggagcagacccgccgccttcatgagcaccagcctgatcagcgtggccgtgaccaagatcatcgccaaggtgctggaggacaacaagctgcccggcgccatctgcagcctgacctgcggcggcgccgacatcggcaccgccatggccaaggacgagagagtgaacctgctgagcttcaccggcagcacccaggtgggcaagcaggtgggcctgatggtgcaggagagattcggcagaagcctgctggagctgggcggcaacaacgccatcatcgccttcgaggacgccgacctgagcctggtggtgcccagcgccctgttcgccgccgtgggcaccgccggccagagatgcaccaccgccagaagactgttcatccacgagagcatccacgacgaggtggtgaacagactgaagaaggcctacgcccagatcagagtgggcaacccctgggaccccaacgtgctgtacggccccctgcacaccaagcaggccgtgagcatgttcctgggcgccgtggaggaggccaagaaggagggcggcaccgtggtgtacggcggcaaggtgatggacagacccggcaactacgtggagcccaccatcgtgaccggcctgggccacgacgccagcatcgcccacaccgagaccttcgcccccatcctgtacgtgttcaagttcaagaacgaggaggaggtgttcgcctggaacaacgaggtgaagcagggcctgagcagcagcatcttcaccaaggacctgggcagaatcttcagatggctgggccccaagggcagcgactgcggcatcgtgaacgtgaacatccccaccagcggcgccgagatcggcggcgccttcggcggcgagaagcacaccggcggcggcagagagagcggcagcgacgcctggaagcagtacatgagaagaagcacctgcaccatcaactacagcaaggacctgcccctggcccagggcatcaagttccagtag

SEQ ID NO: 340278 - DNA, 129 bp, Artificial Sequence
  derived and/or modified sequence
atggccgggcgggtcccttctctcctcgtgctcttggtatttcccagttcctgcctcgccttcagatcacctctcagtgtctttaagcggtttaaggagacaactcgtccattcagcaacgagtgttag

SEQ ID NO: 340279 - DNA, 129 bp, Artificial Sequence
  derived and/or modified sequence
atggccggccgggtgcccagcctgctggtgctgctggtgttccccagcagctgcctggccttccgcagccccctgagcgtcttcaagcgcttcaaggagaccacccggcccttcagcaatgaatgttag

SEQ ID NO: 340280 - DNA, 90 bp, Artificial Sequence
  derived and/or modified sequence
atggccggccgggtgcccagcctgctggtgctgctggtgttccccagcagttgcctcgcctttaggtctcccctgtcagtgtttaagtag

SEQ ID NO: 340281 - DNA, 129 bp, Artificial Sequence
  derived and/or modified sequence
atggccggccgggtgcccagcctgctggtgctgctggtgttcccctctagctgcctcgcctttcgaagtcctttgagcgtatttaagagattcaaggaaaccacgagaccattttccaatgagtgctag

SEQ ID NO: 340282 - DNA, 90 bp, Artificial Sequence
  derived and/or modified sequence
atggctggacgggtcccatccttacttgtgctgctagtcttcccctcatcatgtttagctttccgatccccgcttagcgtatttaaatag

SEQ ID NO: 340283 - DNA, 129 bp, Artificial Sequence
  derived and/or modified sequence
atggccggtcgggtgcctagtttgctggtcctgttggtgttcccatcaagttgtttggcttttcggtctcccctgagcgtattcaagcggtttaaagaaaccacgcggccttttagtaacgagtgttag

SEQ ID NO: 340284 - DNA, 129 bp, Artificial Sequence
  derived and/or modified sequence
atggccggcagagtgcccagcctgctggtgctgctggtgttccccagcagctgcctggccttcagaagccccctgagcgtgttcaagagattcaaggagaccaccagacccttcagcaacgagtgctag

SEQ ID NO: 340285 - protein, 68 aa, Artificial Sequence
  derived and/or modified sequence
MAGRVPSLLVLLVFPSSCLAFRSPLSVFKRFKETTRPFSNECLGTTRPVVPIDSSDFALDIRMPGVTP

SEQ ID NO: 340286 - protein, 335 aa, Artificial Sequence
  derived and/or modified sequence
MQPGSDQNHFCQPTDVAVDPGTGAIYVSDGYCNSRIVQFSPSGKFITQWGEESSGSSPLPGQFTVPHSLALVPLLGQLCVADRENGRIQCFKTDTKEFVREIKHSSFGRNVFAISYIPGLLFAVNGKPHFGDQEPVQGFVMNFSNGEIIDIFKPVRKHFDMPHDIVASEDGTVYIGDAHTNTVWKFTLTEKLEHRSVKKAGIEVQEIKEAEAVVETKMENKPTSSELQKMQEKQKLIKEPGSGVPVVLITTLLVIPVVVLLAIAIFIRWKKSRAFGGKGSGGLNLGNFFASRKGYSRKGFDRLSTEGSDQEKEDDGSESEEEYSAPLPALAPSSS

SEQ ID NO: 340287 - protein, 155 aa, Artificial Sequence
  derived and/or modified sequence
MHEHHKETEYKDKIPLLQQPKREEEEVLDQGDFYSLLSKLLGEREDVVHVHKYNPTEKAESESDLVAEIANVVQKKDLGRSDAREGAEHERGNAILVRDRIHKFHRLVSTLRPPESRVFSLQQPPPGEGTWEPEHTGARREDMKCFQCKEMISVQ

SEQ ID NO: 340288 - DNA, 1008 bp, Artificial Sequence
  derived and/or modified sequence
atgcagccaggatccgaccagaaccacttttgccagcctaccgacgtggcagtggaccccggcactggagcgatctacgtgagcgacggttactgcaacagcagaatagtccagttttccccctctggcaagtttatcactcagtggggagaagaatcgtcaggcagttctccattgcctggccagttcacagtgcctcacagcctggcgctcgtgcccctcctcgggcagctctgtgttgccgatcgcgagaatgggagaatacaatgtttcaagacagatactaaggagttcgtgcgtgagattaagcatagcagctttgggcgcaatgtcttcgccatcagttatattcccggcctgttgtttgcagttaatgggaaaccccacttcggggaccaggaaccggtccaggggtttgttatgaatttcagcaatggagaaattattgacatcttcaagccagtccggaaacactttgacatgccgcacgacatagtggcatcagaagacgggaccgtgtacatcggcgacgcgcataccaatacagtgtggaagttcaccctgactgagaagttggagcaccgttctgttaaaaaggcagggattgaggtacaggaaattaaggaggcagaggcagtggtcgaaacaaagatggagaacaaacctaccagcagcgagcttcagaagatgcaggaaaagcagaagttgatcaaggagccaggttctggagtacctgtggtcctgatcaccaccctgctggtgatccctgtggttgttctcctggcaatcgccatctttatccgatggaaaaaaagtcgcgcctttggtggaaagggttctgggggcctcaacctggggaatttctttgcctctcgtaaagggtattctcgtaaggggtttgaccgactgagcaccgaagggagcgaccaggagaaggaggatgacggaagcgaatcggaggaggagtacagcgcccccctgcccgccctagctcccagcagtagttag

SEQ ID NO: 340289 - DNA, 1008 bp, Artificial Sequence
  derived and/or modified sequence
atgcagcccggcagtgaccagaaccacttctgccagcccacagatgtggccgtggaccccggcaccggggccatctacgtgtctgatggctactgcaacagccgcatcgtgcagttcagccccagcggcaagttcatcacccagtggggcgaggagagcagcggcagcagccccctgcccggccagttcaccgtgccccacagcctggccctggtgcccctgctgggccagctgtgtgtggccgaccgggagaatggccgcatccagtgcttcaagacagacaccaaggagtttgtgcgggagatcaagcacagcagctttggaagaaatgtgtttgccatctcctacatccctggcctgctgtttgctgtgaatggcaagccccactttggagaccaggagcctgtgcagggctttgtgatgaacttcagcaatggagagatcatcgacatcttcaagcctgtgaggaagcactttgacatgcctcatgacatcgtggcctctgaagatggcaccgtgtacatcggagatgcccacaccaacacagtgtggaagttcaccctgacagagaagctggagcacaggtctgtgaagaaggccggcatcgaggtgcaggagatcaaggaggccgaggccgtggtggagaccaagatggagaacaagcccaccagcagcgagctgcagaagatgcaggagaagcagaagctgatcaaggagcccggcagcggcgtgcctgtggtgctgatcaccaccctgctggtgattcctgtggtggtgctgctggccatcgccatcttcatccgctggaagaagagccgggcctttggaggcaagggcagcggcggcctgaacctgggcaacttctttgccagcaggaagggctacagcaggaagggctttgaccggctgagcacagagggcagtgaccaggagaaggaggatgatggcagcgagagcgaggaggagtacagcgcccccctgcctgccctggcccccagcagcagctag

SEQ ID NO: 340290 - DNA, 1008 bp, Artificial Sequence
  derived and/or modified sequence
atgcagcccggcagcgaccagaaccacttctgccagcccaccgacgtggccgtggaccccgggaccggcgcaatctacgtgtctgatggttattgtaatagcaggatcgtccaattctcacccagtgggaagttcattacccagtggggagaagagtcttcgggcagctcgcccctcccagggcagttcacagtgccacactcattagccctggtgccactgcttggccagctgtgcgtggctgatagggagaacggaagaatccagtgctttaagaccgatactaaagagttcgtgcgcgaaataaagcattcaagttttggacgaaacgtttttgcgatctcttatattccaggactcttatttgctgtaaacggcaaaccccatttcggagatcaggagcctgtgcagggctttgttatgaattttagtaatggtgaaataattgacattttcaagccagttcggaaacatttcgacatgcctcatgacatagttgcctctgaggacggcacggtgtacattggggatgcgcatacgaacactgtgtggaaatttaccctgacggagaaattggagcatcgaagcgtgaaaaaggccgggattgaagtgcaggagatcaaggaagctgaggccgtggtggagacaaagatggaaaataaacccacttcatcagagcttcagaaaatgcaggaaaagcagaagctgatcaaggagcctgggtctggtgtgccagtggtgctgatcacgacactgttggttatccccgttgtcgtgcttctcgctatagctatattcatccggtggaaaaagtcacgggctttcggtgggaaaggatccggggggcttaatctcggcaacttcttcgcgagccgaaagggatattctagaaaggggttcgatcgtctttcgactgagggttcagatcaagagaaagaagacgacggatcagagagcgaggaggagtacagcgcccccctgccagctctcgcgcccagtagctcatag

SEQ ID NO: 340291 - DNA, 3241 bp, Artificial Sequence
  derived and/or modified sequence
gttctgaatgatgactgacgcgggtttgggtgatacccctcacagcccctgtcattccggagtcataaggcacccgcgcgtctagccccagcgccagggcacgcgagcggcgctggagggaggaaagcttccgcctgcgggccggacaaaagtcccgcctgcccacggctttttgcccgccgctcgtgaccgagacgcctcgccgcggccagctcgctgctctcgctggcggatggtgtgtggccgccgcaggacgcccgccgtgcccgggccatgaagtagcggctgctggcggcgccgctgcccaaccgccagccccagccccgcgctgcgctgcccggtcctctcccggcggggtcgtatcggcgtggacatggctggccgcgtccctagcctgctagttctccttgtttttccaagcagctgtttggctttccgaagcccactttctgtctttaagaggtttaaagaaactaccagaccattttccaatgaatgtcttggtaccaccagacccgtagttcctattgattcatcagattttgcattggatattcgcatgcctggggttacacctaaacagtccgatacatacttctgcatgtctatgcgaataccagtggatgaggaagccttcgtgattgacttcaagcctcgagccagcatggatactgtccatcacatgttactttttggatgcaatatgccttcatccactggaagttactggttttgtgatgaaggaacctgtacagataaagccaatattctgtatgcctgggcgagaaatgctccccctacccggctccccaaaggtgttggattcagagttggaggagagactggaagtaaatactttgtactacaggtacactatggggatattagtgcttttagagataataacaaggactgttctggtgtgtccttacacctcacacgtctgccacagcctttaattgctggcatgtaccttatgatgtctgttgacactgttatcccagcaggagaaaaagtggtgaattctgacatttcatgccattataaaaattatccaatgcatgtctttgcctatagagttcacactcaccatttaggtaaggtagtaagtggatacagagtaagaaatggacagtggacactgattggacggcagagccctcagctgccacaggctttctaccctgtggggcatccagttgatgtaagttttggtgacctactggctgcaagatgtgtattcactggtgaaggaaggacagaagccacacacattggtggcacgtctagtgatgaaatgtgcaacttatacattatgtattacatggaagccaagcatgcagtttctttcatgacctgtacccagaatgtagctccagatatgttcagaaccataccaccagaggccaacattccaattcccgtgaagtctgatatggttatgatgcatgaacatcataaagaaacagaatataaagataagattcctttactacagcagccaaaacgagaagaagaagaagtgttagaccagggtgatttctattcactactttccaagctgctaggagaaagggaagatgttgttcatgtgcacaaatataatcctacagaaaaggcagaatcagagtcagacctggtagctgagattgcaaatgtagtccaaaaaaaggatcttggtcgatctgatgccagagagggtgcagaacatgagaggggtaatgctattcttgtcagagacagaattcacaaattccacagactagtatctaccttgaggccaccagagagcagagttttctcattacagcagcccccacctggtgaaggcacctgggaaccagaacacacaggagatttccacatggaagaggcactggattggcctggagtatacttgttaccaggccaggtttctggggtggctctagaccctaagaataacctggtgattttccacagaggtgaccatgtctgggatggaaactcgtttgacagcaagtttgtttaccagcaaataggactcggaccaattgaagaagacactattcttgtcatagatccaaataatgctgcagtactccagtccagtggaaaaaatctgttttacttgccacatggcttgagtatagataaagatgggaattattgggtcacagacgtggctctccatcaggtgttcaaactggatccaaacaataaagaaggccctgtattaatcctgggaaggagcatgcaaccaggcagtgaccagaatcacttctgtcaacccactgatgtggctgtggatccaggcactggagccatttatgtatcagatggttactgcaacagcaggattgtgcagttttcaccaagtggaaagttcatcacacagtggggagaagagtcttcagggagcagtcctctgccaggccagttcactgttcctcacagcttggctcttgtgcctcttttgggccaattatgtgtggcagaccgggaaaatggtcggatccagtgttttaaaactgacaccaaagaatttgtgagagagattaagcattcatcatttggaagaaatgtatttgcaatttcatatataccaggcttgctctttgcagtgaatgggaagcctcattttggggaccaagaacctgtacaaggatttgtgatgaacttttccaatggggaaattatagacatcttcaagccagtgcgcaagcactttgatatgcctcatgatattgttgcatctgaagatgggactgtgtacattggagatgctcataccaacaccgtgtggaagttcaccttgactgagaaattggaacatcgatcagttaaaaaggctggcattgaggtccaggaaatcaaagaagccgaggcagttgttgaaaccaaaatggagaacaaacccacctcctcagaattgcagaagatgcaagagaaacagaaactgatcaaagagccaggctcgggagtgcctgttgttctcattacaacccttctggttattccggtggttgtcctgctggccattgccatatttattcggtggaaaaaatcaagggcctttggaggcaaaggaagtggaggcttaaaccttggtaatttctttgcaagccgtaagggctacagtcgaaaagggtttgaccggcttagcactgagggcagtgaccaagagaaagaggatgatggaagtgaatcagaagaggagtattcagcacctctgcctgcgctcgcaccttcctcctcctga

SEQ ID NO: 340292 - DNA, 1008 bp, Artificial Sequence
  derived and/or modified sequence
atgcagccaggaagtgaccagaatcacttttgccagccgaccgacgtggctgtggatcctggaactggagctatctacgtctcagatggttactgcaactctcgtattgttcagttcagcccatctggaaagttcattacccagtggggtgaagagtcatcggggtcgtcccctcttcctggtcagtttacagtgcctcatagtctggctttggtgcccttgctaggtcaattgtgtgtggcagatcgagagaacggtcgtatccaatgtttcaaaactgacactaaagagtttgttcgcgaaatcaaacattcatcctttggccgaaatgtgtttgccatttcgtacattccgggattgctttttgctgtgaacgggaagccccactttggcgatcaggagccagtgcagggtttcgtgatgaactttagcaatggtgagatcatcgacatcttcaaacccgtcaggaaacacttcgacatgcctcacgacattgtggcgtctgaagatggcaccgtgtatatcggcgatgctcacaccaataccgtgtggaaattcacactcacagagaaactagaacaccgctccgtgaaaaaggccggaatcgaggtacaggagattaaggaagcagaagctgtggttgagaccaagatggaaaataaaccaaccagtagcgagttgcaaaaaatgcaggagaaacaaaaactcatcaaagagcccggatctggggttcccgtggtacttattacaaccctgttagtgattccagtggtggttctcttagcaatcgctatttttatacggtggaagaagtcgcgagcgtttggcggtaaaggcagtggaggactgaacttggggaatttctttgcctctcgcaagggatactctaggaaggggtttgaccggttgagcaccgaggggagcgaccaagagaaggaggacgacggttcagaaagcgaagaggaatactccgcccctctcccagccctcgccccttccagcagctag

SEQ ID NO: 340293 - DNA, 1008 bp, Artificial Sequence
  derived and/or modified sequence
atgcagcccggcagcgaccagaaccacttctgccagcccaccgacgtggccgtggaccccggcaccggcgccatctacgtgagcgacggctactgcaacagcagaatcgtgcagttcagccccagcggcaagttcatcacccagtggggcgaggagagcagcggcagcagccccctgcccggccagttcaccgtgccccacagcctggccctggtgcccctgctgggccagctgtgcgtggccgacagagagaacggcagaatccagtgcttcaagaccgacaccaaggagttcgtgagagagatcaagcacagcagcttcggcagaaacgtgttcgccatcagctacatccccggcctgctgttcgccgtgaacggcaagccccacttcggcgaccaggagcccgtgcagggcttcgtgatgaacttcagcaacggcgagatcatcgacatcttcaagcccgtgagaaagcacttcgacatgccccacgacatcgtggccagcgaggacggcaccgtgtacatcggcgacgcccacaccaacaccgtgtggaagttcaccctgaccgagaagctggagcacagaagcgtgaagaaggccggcatcgaggtgcaggagatcaaggaggccgaggccgtggtggagaccaagatggagaacaagcccaccagcagcgagctgcagaagatgcaggagaagcagaagctgatcaaggagcccggcagcggcgtgcccgtggtgctgatcaccaccctgctggtgatccccgtggtggtgctgctggccatcgccatcttcatcagatggaagaagagcagagccttcggcggcaagggcagcggcggcctgaacctgggcaacttcttcgccagcagaaagggctacagcagaaagggcttcgacagactgagcaccgagggcagcgaccaggagaaggaggacgacggcagcgagagcgaggaggagtacagcgcccccctgcccgccctggcccccagcagcagctag

SEQ ID NO: 340294 - protein, 29 aa, Artificial Sequence
  derived and/or modified sequence
MAGRVPSLLVLLVFPSSCLAFRSPLSVFK

SEQ ID NO: 340295 - protein, 28 aa, Artificial Sequence
  derived and/or modified sequence
MAGRVPSLLVLLVFPSSCLAFRSPLSVF

SEQ ID NO: 340296 - protein, 53 aa, Artificial Sequence
  derived and/or modified sequence
MAGRVPSLLVLLVFPSSCLAFRSPLSVFKRFKETTRPFSNECLGTTRPVVPID

SEQ ID NO: 340297 - protein, 25 aa, Artificial Sequence
  derived and/or modified sequence
MAGRVPSLLVLLVFPSSCLAFRSPL

SEQ ID NO: 340298 - DNA, 468 bp, Artificial Sequence
  derived and/or modified sequence
atgcacgagcatcacaaggagaccgaatacaaagataagattcccctgttacagcaacccaaacgagaggaagaggaggtactcgaccagggagatttctatagcctgttgagcaagcttctgggtgagcgggaggacgtcgtccatgtccacaaatacaatcctaccgaaaaggccgagtcagagtccgatctcgtggccgagattgcgaacgtggtgcagaagaaggacctgggccggtcagacgccagagaaggagcagaacacgagcggggcaatgctatactcgttcgtgatcgcattcacaagttccatagactggtgagcaccctgaggccgcccgaaagccgtgtgtttagccttcagcagccaccgcctggcgagggtacttgggagcctgaacacacaggcgctcgacgcgaggacatgaagtgcttccagtgtaaagagatgatttctgtccagtag

SEQ ID NO: 340299 - DNA, 162 bp, Artificial Sequence
  derived and/or modified sequence
atggcagggagagtaccgagcctcctcgtcctgctggtgttcccatcttcctgtctagcattccggtctcccttgtcagtgttcaagaggtttaaggagactactcgaccattctctaatgagtgccttgggacaactagacccgtagtccctattgattag

SEQ ID NO: 340300 - DNA, 207 bp, Artificial Sequence
  derived and/or modified sequence
atggccggtagagtcccctctctgctcgtgctgcttgtttttccatcatcttgtctcgccttccgatcgcctctgagtgtgtttaagaggttcaaggaaacgacacgtccgttctccaacgagtgtctggggacaactagaccagtagtgccaattgacagctctgattttgccctcgacatacggatgccaggggtgaccccgtag

SEQ ID NO: 340301 - DNA, 468 bp, Artificial Sequence
  derived and/or modified sequence
atgcatgagcaccacaaggagacagagtacaaggacaagatccccctgctgcagcagcccaagcgggaggaggaggaggtgctggaccagggcgacttctacagcctgctgagcaagctgctgggggagagagaagatgtggtgcacgtgcacaagtacaaccccacagagaaggccgagagcgagagtgacctggtggccgagatcgccaacgtggtgcagaagaaggacctgggccgcagtgatgcccgggagggcgctgagcacgagagaggaaatgccatcctggtgcgggaccgcatccacaagttccaccggctggtgtccaccctgcggcccccagagagcagggtcttcagcctgcagcagcccccacctggagagggcacctgggagcctgagcacactggagcccggcgggaggacatgaagtgcttccagtgcaaggagatgatctctgtgcagtag

SEQ ID NO: 340302 - DNA, 162 bp, Artificial Sequence
  derived and/or modified sequence
atggccggccgggtgcccagcctgctggtgctgctggtgttccccagcagctgcctggccttccgcagccccctgagcgtcttcaagcgcttcaaggagaccacccggcccttcagcaatgaatgtctgggcaccaccaggcctgtggtgcccatcgactag

SEQ ID NO: 340303 - DNA, 207 bp, Artificial Sequence
  derived and/or modified sequence
atggccggccgggtgcccagcctgctggtgctgctggtgttccccagcagctgcctggccttccgcagccccctgagcgtcttcaagcgcttcaaggagaccacccggcccttcagcaatgaatgtctgggcaccaccaggcctgtggtgcccatcgacagcagtgactttgccctggacatccgcatgcctggggtgaccccctag

SEQ ID NO: 340304 - DNA, 468 bp, Artificial Sequence
  derived and/or modified sequence
atgcacgagcaccacaaggagaccgagtacaaggacaagatccccttacttcaacagcctaagagagaagaagaagaagtgctggatcaaggtgatttttattcactcttgagcaaattgctgggagaaagagaggatgtggtccacgtacataaatataacccaaccgagaaagctgagtccgagtctgatctggtggcagagattgcaaatgtcgtgcagaagaaggatttaggaagaagtgatgcacgcgaaggggctgagcacgagcgggggaatgcgattctggttagggaccgaatacataaattccacaggttggtatcaacccttcgcccccccgagtcaagagtgttctctctacagcagcctccgccgggcgagggaacgtgggaacccgaacataccggcgctcgccgtgaggatatgaagtgcttccagtgcaaggaaatgatctccgtgcagtag

SEQ ID NO: 340305 - DNA, 162 bp, Artificial Sequence
  derived and/or modified sequence
atggccggccgggtgcccagcctgctggtgctgctggtgttcccctcctcatgtctggcttttcggagccccttatccgtcttcaaaagatttaaagagaccacccgcccattttcaaatgagtgtctaggtacaaccagaccagtcgtcccaattgactag

SEQ ID NO: 340306 - DNA, 207 bp, Artificial Sequence
  derived and/or modified sequence
atggccggccgggtgcccagcctgctggtgctgctggtgttcccctcctcctgtctggctttccgctctcctttgagcgttttcaaaagatttaaagaaacaacgcggcctttcagcaacgagtgtctgggtacaactaggccggttgtgcctatagattctagcgatttcgctctggacatacgaatgcccggtgtaacaccatag

SEQ ID NO: 340307 - DNA, 1449 bp, Artificial Sequence
  derived and/or modified sequence
aggtttaaagaaactaccagaccattttccaatgaatgtcttggtaccaccagacccgtagttcctattgattcatcagattttgcattggatattcgcatgcctggggttacacctaaacagtccgatacatacttctgcatgtctatgcgaataccagtggatgaggaagccttcgtgattgacttcaagcctcgagccagcatggatactgtccatcacatgttactttttggatgcaatatgccttcatccactggaagttactggttttgtgatgaaggaacctgtacagataaagccaatattctgtatgcctgggcgagaaatgctccccctacccggctccccaaaggtgttggattcagagttggaggagagactggaagtaaatactttgtactacaggtacactatggggatattagtgcttttagagataataacaaggactgttctggtgtgtccttacacctcacacgtctgccacagcctttaattgctggcatgtaccttatgatgtctgttgacactgttatcccagcaggagaaaaagtggtgaattctgacatttcatgccattataaaaattatccaatgcatgtctttgcctatagagttcacactcaccatttaggtaaggtagtaagtggatacagagtaagaaatggacagtggacactgattggacggcagagccctcagctgccacaggctttctaccctgtggggcatccagttgatgtaagttttggtgacctactggctgcaagatgtgtattcactggtgaaggaaggacagaagccacacacattggtggcacgtctagtgatgaaatgtgcaacttatacattatgtattacatggaagccaagcatgcagtttctttcatgacctgtacccagaatgtagctccagatatgttcagaaccataccaccagaggccaacattccaattcccgtgaagtctgatatggttatgatgcatgaacatcataaagaaacagaatataaagataagattcctttactacagcagccaaaacgagaagaagaagaagtgttagaccagggtgatttctattcactactttccaagctgctaggagaaagggaagatgttgttcatgtgcacaaatataatcctacagaaaaggcagaatcagagtcagacctggtagctgagattgcaaatgtagtccaaaaaaaggatcttggtcgatctgatgccagagagggtgcagaacatgagaggggtaatgctattcttgtcagagacagaattcacaaattccacagactagtatctaccttgaggccaccagagagcagagttttctcattacagcagcccccacctggtgaaggcacctgggaaccagaacacacaggagctagaagagaagatatgaaatgtttccagtgcaaagaaatgataagtgttcaa

SEQ ID NO: 340308 - DNA, 609 bp, Artificial Sequence
  derived and/or modified sequence
acttatcatgaagaatctcacttcatttaaggttctgaatgatgactgacgcgggtttgggtgatacccctcacagcccctgtcattccggagtcataaggcacccgcgcgtctagccccagcgccagggcacgcgagcggcgctggagggaggaaagcttccgcctgcgggccggacaaaagtcccgcctgcccacggctttttgcccgccgctcgtgaccgagacgcctcgccgcggccagctcgctgctctcgctggcggatggtgtgtggccgccgcaggacgcccgccgtgcccgggccatgaagtagcggctgctggcggcgccgctgcccaaccgccagccccagccccgcgctgcgctgcccggtcctctcccggcggggtcgtatcggcgtggacatggctggccgcgtccctagcctgctagttctccttgtttttccaagcagctgtttggctttccgaagcccactttctgtctttaagaggtttaaagaaactaccagaccattttccaatgaatgtcttggtaccaccagacccgtagttcctattgattcatcagattttgcattggatattcgcatgcctggggttacaccta

SEQ ID NO: 340309 - DNA, 468 bp, Artificial Sequence
  derived and/or modified sequence
atgcacgagcatcataaggagactgagtataaggataaaatcccactcctccagcagcccaaacgggaggaggaggaagtccttgaccaaggagacttctactccctgcttagcaagctcctgggagaacgagaggatgtggtgcacgtgcacaagtataaccctactgagaaagcagagagcgaatctgacctggtagccgaaatagcaaatgtggtgcaaaagaaggacttggggagatccgacgccagagagggcgcagagcatgagcgcggaaatgccatcctggtgagagatcgaatccacaaatttcatcggctcgtcagtactctgagaccgcctgaatcccgggttttcagcctgcagcagccaccacccggtgaggggacctgggagcccgagcataccggcgcaaggagagaagatatgaagtgttttcagtgtaaggaaatgatttcggttcaatag

SEQ ID NO: 340310 - DNA, 162 bp, Artificial Sequence
  derived and/or modified sequence
atggccggacgcgttcccagtttgttggtgctgctggtatttcccagctcttgcctggcattcagatctccgttatccgtcttcaagcgctttaaggagactaccaggcccttctccaacgaatgtctaggaaccacaaggcccgtggtgcccatcgactag

SEQ ID NO: 340311 - DNA, 207 bp, Artificial Sequence
  derived and/or modified sequence
atggccggacgggtgccctccctgctcgtactgttggtcttccccagcagctgcctggcgttcagatcccccctgtctgtgtttaagaggttcaaagagacgacacgccctttcagtaacgagtgtctgggcacgactcggccagtggtgcccattgactcctcggattttgccctcgatatccgcatgcccggagtgacaccttag

SEQ ID NO: 340312 - DNA, 468 bp, Artificial Sequence
  derived and/or modified sequence
atgcacgagcaccacaaggagaccgagtacaaggacaagatccccctgctgcagcagcccaagagagaggaggaggaggtgctggaccagggcgacttctacagcctgctgagcaagctgctgggcgagagagaggacgtggtgcacgtgcacaagtacaaccccaccgagaaggccgagagcgagagcgacctggtggccgagatcgccaacgtggtgcagaagaaggacctgggcagaagcgacgccagagagggcgccgagcacgagagaggcaacgccatcctggtgagagacagaatccacaagttccacagactggtgagcaccctgagaccccccgagagcagagtgttcagcctgcagcagcccccccccggcgagggcacctgggagcccgagcacaccggcgccagaagagaggacatgaagtgcttccagtgcaaggagatgatcagcgtgcagtag

SEQ ID NO: 340313 - DNA, 162 bp, Artificial Sequence
  derived and/or modified sequence
atggccggcagagtgcccagcctgctggtgctgctggtgttccccagcagctgcctggccttcagaagccccctgagcgtgttcaagagattcaaggagaccaccagacccttcagcaacgagtgcctgggcaccaccagacccgtggtgcccatcgactag

SEQ ID NO: 340314 - DNA, 207 bp, Artificial Sequence
  derived and/or modified sequence
atggccggcagagtgcccagcctgctggtgctgctggtgttccccagcagctgcctggccttcagaagccccctgagcgtgttcaagagattcaaggagaccaccagacccttcagcaacgagtgcctgggcaccaccagacccgtggtgcccatcgacagcagcgacttcgccctggacatcagaatgcccggcgtgaccccctag

SEQ ID NO: 340315 - protein, 127 aa, Artificial Sequence
  derived and/or modified sequence
MKDPSRSSTSPSIINEDVIINGHSHEDDNPFAEYMWMENEEEFNRQIEEELWEEEFIERCFQEMLEEEEEHEWFIPARDLPQTMDQIQDQFNDLVISDGSSLEDLVVKSNLNPNAKEFVPGVKYGNI

SEQ ID NO: 340316 - protein, 93 aa, Artificial Sequence
  derived and/or modified sequence
MKDPSRSSTSPSIINEDVIINGHSHEDDNPFAEYMWMENEEEFNRQIEEELWEEEFIERCFQEMLEEEEEHEWFIPARDLPQTMDQIQDQFND

SEQ ID NO: 340317 - DNA, 384 bp, Artificial Sequence
  derived and/or modified sequence
atgaaagacccctcaaggtcgtccacttccccaagcattattaatgaggatgttataatcaatggccactctcatgaagacgataatcccttcgcagaatatatgtggatggaaaacgaagaagagttcaatcggcaaatcgaggaagagctgtgggaggaagagttcattgagaggtgtttccaggagatgctcgaggaggaggaggagcatgaatggttcattcccgctcgggacctgcctcagacaatggaccagatccaagatcaatttaacgacctcgtgatcagcgacggctccagtctggaagatctggtggtcaagtccaatctcaacccaaatgcgaaggaatttgtgccaggggtaaagtacgggaatatttag

SEQ ID NO: 340318 - DNA, 384 bp, Artificial Sequence
  derived and/or modified sequence
atgaaggatccttcccgaagtagtactagcccttctatcatcaacgaggacgtgatcatcaatggccactctcatgaggacgataatccatttgcggagtacatgtggatggagaacgaagaggaatttaatcggcagatcgaggaagagctgtgggaggaagaatttattgagaggtgttttcaagagatgctggaagaggaagaggaacacgagtggttcatccccgcgcgtgacctgccccagaccatggaccagatccaggaccaattcaatgatctggtgatctcagacggctcttcactggaggacctcgtggtgaaatccaatttgaacccaaacgccaaggaatttgtgcccggcgtgaaatacggcaatatctag

SEQ ID NO: 340319 - DNA, 282 bp, Artificial Sequence
  derived and/or modified sequence
atgaaagatccttcccgctcatctaccagccctagcataattaatgaggatgtcataatcaacggccacagtcatgaagacgataacccctttgctgaatacatgtggatggaaaatgaagaagagttcaaccgccagatagaggaggagctgtgggaggaagagtttatagaaagatgctttcaggaaatgcttgaggaggaggaagagcatgagtggttcattccagccagggacctgccccagacgatggaccagatacaggaccagtttaacgactag

SEQ ID NO: 340320 - DNA, 384 bp, Artificial Sequence
  derived and/or modified sequence
atgaaggaccctagtaggtcatccacctctccctccatcatcaatgaggatgtcataatcaatggccattcacacgaagatgacaatccttttgctgagtacatgtggatggaaaatgaagaggaattcaaccgtcaaatcgaggaggaactttgggaggaagagtttatcgaacggtgtttccaggagatgctggaagaggaagaggagcacgaatggtttatacctgcccgggacctgccccaaactatggaccagatccaagatcagtttaatgatctggtgatttccgatgggtccagtctggaagatctggtggttaagtccaatctgaatcctaacgccaaggagtttgttccgggcgttaagtacggaaacatctag

SEQ ID NO: 340321 - DNA, 384 bp, Artificial Sequence
  derived and/or modified sequence
atgaaggaccccagccgcagcagcaccagccccagcatcatcaatgaagatgtgatcatcaatggccacagccatgaagatgacaacccctttgctgagtacatgtggatggagaatgaggaggagttcaaccggcagatcgaggaggagctgtgggaggaggagttcatcgagcgctgcttccaggagatgctggaggaggaggaggagcacgagtggttcatcccagcccgggacctgccccagaccatggaccagatccaggaccagttcaatgacctggtgatcagtgatggcagcagcctggaggacctggtggtgaagagcaacctgaaccccaatgccaaggagtttgtgcctggggtgaagtatggcaacatctag

SEQ ID NO: 340322 - DNA, 282 bp, Artificial Sequence
  derived and/or modified sequence
atgaaggaccccagccgcagcagcaccagccccagcatcatcaatgaagatgtgatcatcaatggccacagccatgaagatgacaacccctttgctgagtacatgtggatggagaatgaggaggagttcaaccggcagatcgaggaggagctgtgggaggaggagttcatcgagcgctgcttccaggagatgctggaggaggaggaggagcacgagtggttcatcccagcccgggacctgccccagaccatggaccagatccaggaccagttcaatgactag

SEQ ID NO: 340323 - DNA, 384 bp, Artificial Sequence
  derived and/or modified sequence
atgaaggaccccagccggagcagcaccagccccagcatcatcaacgaagatgtgattattaacggtcacagtcacgaggatgataaccccttcgctgagtacatgtggatggagaacgaggaggagtttaataggcaaatagaggaagagctctgggaggaggagttcattgaacggtgttttcaagagatgctagaggaagaagaggagcacgagtggttcataccagctagggacttgccgcaaacaatggatcaaattcaggaccaattcaacgatctagtcataagtgatggttcatcactagaagacctggtggtgaagtcaaacctaaacccaaacgctaaagagtttgtgcccggggttaagtacggcaatatctag

SEQ ID NO: 340324 - DNA, 384 bp, Artificial Sequence
  derived and/or modified sequence
atgaaggaccccagccggagcagcaccagccccagcatcatcaacgaggatgtgattatcaatggacactctcatgaggatgataatccgttcgccgaatatatgtggatggagaacgaggaggaatttaaccggcagattgaggaggaattgtgggaggaagaattcatagaacgctgctttcaggagatgttggaggaggaggaggaacacgagtggtttatccccgcacgggatctcccccagactatggaccagatacaggaccaattcaatgacttagtgattagcgacggatcaagtctagaggatcttgttgtaaagagcaacctgaacccgaacgcaaaagagttcgtcccaggggtgaaatacggaaatatctag

SEQ ID NO: 340325 - DNA, 282 bp, Artificial Sequence
  derived and/or modified sequence
atgaaggaccccagccggagcagcaccagccccagcatcatcaacgaggacgtgatcatcaacggccactcacacgaggatgataatcctttcgccgagtatatgtggatggaaaacgaagaggagttcaacaggcaaattgaggaagagctgtgggaagaggagtttattgaacgatgctttcaagagatgctggaggaagaagaagagcacgagtggttcataccagcccgagatctgccccagacaatggatcagattcaggatcagtttaatgattag

SEQ ID NO: 340326 - DNA, 384 bp, Artificial Sequence
  derived and/or modified sequence
atgaaggaccccagccggagcagcaccagccccagcatcatcaacgaggatgtgatcattaatggtcactctcatgaggacgataacccttttgccgagtatatgtggatggagaacgaggaggaattcaatcgccagatagaagaggaactgtgggaagaagaattcatagaacgatgttttcaggaaatgctggaagaggaagaggagcatgagtggttcattcctgctcgggatctcccacagaccatggaccaaatacaagaccagtttaacgatctcgtgattagcgatggcagcagcttggaggacctagttgtgaaatcaaatttgaatcctaatgcaaaggaatttgtcccgggtgtgaagtacgggaatatctag

SEQ ID NO: 340327 - DNA, 1459 bp, Artificial Sequence
  derived and/or modified sequence
gaagtcacttccgggctggggtgtttgtttggactggagaagggaggcggcgggcgaagcgcacgtcgagcgggggagcggcgctgcctgtggagatccgcggaggccgacaggattcgttggctgccgtccccgctgctgtgcattgggttaaaaacgacaaccaacatcagccatgaaagatccaagtcgcagcagtactagcccaagcatcatcaatgaagatgtgattattaacggtcattctcatgaagatgacaatccatttgcagagtacatgtggatggaaaatgaagaagaattcaacagacaaatagaagaggagttatgggaagaagaatttattgaacgctgtttccaagaaatgctggaagaggaagaagagcatgaatggtttattccagctcgagatctcccacaaactatggaccaaatccaagaccagtttaatgaccttgttatcagtgatggctcttctctggaagatcttgtggtcaagagcaatctgaatccaaatgcaaaggagtttgttcctggggtgaagtacggaaatatttgagtagacggggccctcttttggtggatgtagcacaatttccacactgtgaaggcagtattagaagacttaattgtaaaagctctcttgtcactgtgttacacttatgcattgccaaagtttttgttagtcttgcatgcttaataaaagtgctgagactgttactaagtaaaaagctgtcaaacatttactgaaaatagaattggccccatggcttgatgtgaagacagcaaggaaagaagcaccagtcaagttgtgaacaagcaccaaattaaaagacctaaaccttaccaaattgtctttttttgaggctaatctatcacttgttaatgtctaaactttaaaatcagtacatttaatttgagttccaactgttaagcatatttctcagacttaaatttgattatgtccccatcaaaaagaatctccattttctgaaggtctgttagttaatttgagataatttgttaaaggcaagtatgtcatattactgaggctacaagttagtcagcagatgagtgccagtccagccttttctggtatgttattgttagaaatattgagttctaatgttacatctgaggaagtatgtaatttgagaattgtaacttctaagggattcactgcatcatagctatgcctgtatggagtctaacatatgaccaataccaacccataatccagctgaacaaagatactgtaacatgatttgagtggtgcttttccttgctttgttaaccatcacgagagtctgcagcacaacttttaacaaagctagaacagttttggcttcttaaacttcatatttgggtaggttaagctgccatacgtgttcagtgtgaatagtgtttaagttgaaaatattgtaaaaaaattatattttttcaaaaatatttaaaaaaa

SEQ ID NO: 340328 - DNA, 2294 bp, Artificial Sequence
  derived and/or modified sequence
ctggggtttggggagagaggggcggagggactggcgggctcttggcgtcttgggggaacgctgcaaccgtcgacgggcctgatcagaagatcgtctttctcccgtttcttcgccatcgctaccccttatttttggttgtattgcagctcatgccctggaaaaaagaacctttggggtactgggaacccttaccctaggagggcgttgagttagatgaactttaaggtcctcttaccttttaataattttctgtgcttactctcctccttccccaccatcgccaccagaaataaataaggcttgtggtgaacttaggtcttcaaaacatttgttgcagcagccagcagtgatattttttagggactcctaaaaggggtcttacctgcttccttttgtttcttttttccctgatttggcacccgtatcaactcataaaaaccccaaactctagaaagaatttggcttccaatttgccttggaaggtgtagcagctgacagcctttgacgtttatttcaacggaaagtagatgttcatgttgggtgtgctggctaatgttgaaacgtggtggcattgttttttcacagatttcattagcacagttagatcaggtgttggtttatattttcattaagtcgcttttgaaatttcttctggcgtaggttgtgtttgcaataagtaaaagttctctacaataatttttaatgagactccactatttgcttttgtgattctgtttccagttagtgaaagacaggatatttggggaaaattagtctgtttatactacttgtcagttgtgaacttgaataaaactttttcacacacacacaaaatcacaggataggtaacttgacaagaactatagaacccacttgtgtttctttaagggatggaggttagggaatggagatttcctctaatgattcaaggctgtgcacgttgctccttaggaactcaaattgaggttaaaaacgacaaccaacatcagccatgaaagatccaagtcgcagcagtactagcccaagcatcatcaatgaagatgtgattattaacggtcattctcatgaagatgacaatccatttgcagagtacatgtggatggaaaatgaagaagaattcaacagacaaatagaagaggagttatgggaagaagaatttattgaacgctgtttccaagaaatgctggaagaggaagaagagcatgaatggtttattccagctcgagatctcccacaaactatggaccaaatccaagaccagtttaatgaccttgttatcagtgatggctcttctctggaagatcttgtggtcaagagcaatctgaatccaaatgcaaaggagtttgttcctggggtgaagtacggaaatatttgagtagacggggccctcttttggtggatgtagcacaatttccacactgtgaaggcagtattagaagacttaattgtaaaagctctcttgtcactgtgttacacttatgcattgccaaagtttttgttagtcttgcatgcttaataaaagtgctgagactgttactaagtaaaaagctgtcaaacatttactgaaaatagaattggccccatggcttgatgtgaagacagcaaggaaagaagcaccagtcaagttgtgaacaagcaccaaattaaaagacctaaaccttaccaaattgtctttttttgaggctaatctatcacttgttaatgtctaaactttaaaatcagtacatttaatttgagttccaactgttaagcatatttctcagacttaaatttgattatgtccccatcaaaaagaatctccattttctgaaggtctgttagttaatttgagataatttgttaaaggcaagtatgtcatattactgaggctacaagttagtcagcagatgagtgccagtccagccttttctggtatgttattgttagaaatattgagttctaatgttacatctgaggaagtatgtaatttgagaattgtaacttctaagggattcactgcatcatagctatgcctgtatggagtctaacatatgaccaataccaacccataatccagctgaacaaagatactgtaacatgatttgagtggtgcttttccttgctttgttaaccatcacgagagtctgcagcacaacttttaacaaagctagaacagttttggcttcttaaacttcatatttgggtaggttaagctgccatacgtgttcagtgtgaatagtgtttaagttgaaaatattgtaaaaaaattatattttttcaaaaatatttaaaaaaataaataatagtagaactga

SEQ ID NO: 340329 - DNA, 776 bp, Artificial Sequence
  derived and/or modified sequence
ggaagatgggcgggtgtgggaacagtggtacgcccccattcctgccttccagagagaacgtgcgacagcgttcctgctacacccggcagccggccgtaggggcgcgctggaaaggctgctgcgcgtgcacacgtgtgcagccttggagacagacttcggggtcgcgcgttctcgcgcgcgctctctagtggcttcggagggcagagctgacagaacaagagggcggggttggcggcgacggaagtgaagtcacttccgggctggggtgtttgtttggactggagaagggaggcggcgggcgaagcgcacgtcgagcgggggagcggcgctgcctgtggagatccgcggaggccgacaggattcgttggctgccgtccccgctgctgtgcattggggatggaggttagggaatggagatttcctctaatgattcaaggctgtgcacgttgctccttaggaactcaaattgaggttaaaaacgacaaccaacatcagccatgaaagatccaagtcgcagcagtactagcccaagcatcatcaatgaagatgtgattattaacggtcattctcatgaagatgacaatccatttgcagagtacatgtggatggaaaatgaagaagaattcaacagacaaatagaagaggagttatgggaagaagaatttattgaacgctgtttccaagaaatgctggaagaggaagaagagcatgaatggtttattccagctcgagatctcccacaaactatggaccaaatccaagaccagtttaatgac

SEQ ID NO: 340330 - DNA, 858 bp, Artificial Sequence
  derived and/or modified sequence
ggggagagaggggcggagggactggcgggctcttggcgtcttgggggaacgctgcaaccgtcgacgggcctgatcagaagatcgtctttctcccgtttcttcgccatcgctaccccttatttttggttgtattgcagctcatgccctggaaaaaagaacctttggggttaaaaacgacaaccaacatcagccatgaaagatccaagtcgcagcagtactagcccaagcatcatcaatgaagatgtgattattaacggtcattctcatgaagatgacaatccatttgcagagtacatgtggatggaaaatgaagaagaattcaacagacaaatagaagaggagttatgggaagaagaatttattgaacgctgtttccaagaaatgctggaagaggaagaagagcatgaatggtttattccagctcgagatctcccacaaactatggaccaaatccaagaccagtttaatgaccttgttatcagtgatggctcttctctggaagatcttgtggtcaagagcaatctgaatccaaatgcaaaggagtttgttcctggggtgaagtacggaaatatttgagtagacggggccctcttttggtggatgtagcacaatttccacactgtgaaggcagtattagaagacttaattgtaaaagctctcttgtcactgtgttacacttatgcattgccaaagtttttgttagtcttgcatgcttaataaaagtgctgagactgttactaagtaaaaagctgtcaaacatttactgaaaatagaattggccccatggcttgatgtgaagacagcaaggaaagaagcaccagtcaagttgtgaacaagcaccaaattaaaagacctaaa

SEQ ID NO: 340331 - DNA, 384 bp, Artificial Sequence
  derived and/or modified sequence
atgaaagatccatcccgatctagcactagtccaagcataatcaatgaagacgtgatcattaatggacacagccatgaggatgacaatccattcgctgaatacatgtggatggagaacgaagaagagttcaatcggcagatcgaggaggaattatgggaggaggaatttattgagcgatgttttcaagagatgttggaagaggaggaagaacatgagtggttcataccagcccgagaccttccccagactatggatcagatccaagaccagtttaacgacttggtgatttccgacggctctagcctggaagatctggtcgtaaaatcaaacctaaacccgaatgcgaaggaatttgtccctggagttaagtatggaaacatatag

SEQ ID NO: 340332 - DNA, 384 bp, Artificial Sequence
  derived and/or modified sequence
atgaaggatccgtcccgctcttccacgtcacccagtatcatcaatgaggacgttatcatcaacggtcacagccacgaggatgataaccctttcgcagagtatatgtggatggagaacgaggaggaatttaacaggcagatagaggaggaactgtgggaggaggaattcatcgagaggtgcttccaagaaatgcttgaagaggaggaggagcacgagtggttcatacctgcgagggacctcccccagaccatggaccagatccaggatcagtttaacgacctcgtcatcagtgacgggtcatccctcgaggacctggtggttaaatccaaccttaacccaaacgcaaaggagttcgtgccaggggtaaaatacgggaacatttag

SEQ ID NO: 340333 - DNA, 282 bp, Artificial Sequence
  derived and/or modified sequence
atgaaggacccaagcaggtcttctacttcacccagtataataaatgaggatgtcatcataaatggccattcccatgaagacgacaacccattcgcggagtatatgtggatggagaacgaggaggagttcaataggcagattgaagaggaactgtgggaggaggagtttattgaacgctgctttcaggaaatgctcgaggaagaggaagagcatgagtggttcatcccagctcgtgatctcccacagactatggaccagattcaggatcagtttaacgattag

SEQ ID NO: 340334 - DNA, 384 bp, Artificial Sequence
  derived and/or modified sequence
atgaaagatccctccaggagttccacctcccccagtattattaacgaggacgtgataataaatggccactcccacgaggacgacaacccttttgctgaatacatgtggatggagaatgaagaagagttcaaccgtcagatcgaagaggaattatgggaggaggagttcattgagcgatgtttccaggaaatgcttgaggaggaagaggagcatgagtggttcattcccgctcgtgacctgccacagaccatggatcagattcaggaccagtttaatgacctcgtaatctcggacggcagtagcctcgaggacctcgtagttaaaagcaatctgaaccccaacgctaaggagtttgtccctggcgtaaagtatggaaatatctag

SEQ ID NO: 340335 - DNA, 384 bp, Artificial Sequence
  derived and/or modified sequence
atgaaggaccccagcagaagcagcaccagccccagcatcatcaacgaggacgtgatcatcaacggccacagccacgaggacgacaaccccttcgccgagtacatgtggatggagaacgaggaggagttcaacagacagatcgaggaggagctgtgggaggaggagttcatcgagagatgcttccaggagatgctggaggaggaggaggagcacgagtggttcatccccgccagagacctgccccagaccatggaccagatccaggaccagttcaacgacctggtgatcagcgacggcagcagcctggaggacctggtggtgaagagcaacctgaaccccaacgccaaggagttcgtgcccggcgtgaagtacggcaacatctag

SEQ ID NO: 340336 - DNA, 282 bp, Artificial Sequence
  derived and/or modified sequence
atgaaggaccccagcagaagcagcaccagccccagcatcatcaacgaggacgtgatcatcaacggccacagccacgaggacgacaaccccttcgccgagtacatgtggatggagaacgaggaggagttcaacagacagatcgaggaggagctgtgggaggaggagttcatcgagagatgcttccaggagatgctggaggaggaggaggagcacgagtggttcatccccgccagagacctgccccagaccatggaccagatccaggaccagttcaacgactag

SEQ ID NO: 340337 - DNA, 1417 bp, Artificial Sequence
  derived and/or modified sequence
gaacgggtcacgtgagcgcctcgcctggatgtgagtttcagccagacctgtggatatctgggctttgggctgtatgatcattgagatggccactggaaatccctatcttcctagtagttctgatttggatttactccataaaattgttttgaaagtgggcaatttgtcacctcacttgcagaatatcttttccaagagccccatttttgctggggtagttcttcctcaagttcaacaccccaaaaatgcaagaaaaaaatatccaaagcttaatggattgttggcagatatagttcatattcatgccagaactgaaagctaaattactgcaggaagcaaaagtcaattcattaataaagccaaaagagagttctaaagaaaatgaactcaggaaagatgaaagaaaaacagtttataccaatacactgctaagtagttcagttttgggaaaggaaatagaaaaagagaaaaagcccaaggagatcaaagtcagagttattaaagtcaaaggaggaagaggagatatctcagaaccaaaaaagaaagagtatgaaggtggacttggtcaacaggatgcaaatgaaaatgttcatcctatgtctccagatacaaaacttgtaaccattgaaccaccaaaccctatcaatcccagcactaactgtaatggcttgaaagaaaatccacattgcggaggttctgtgacaatgccacccatcaatctaactaacagtaatttgatggctgcaaatctcagttcaaatctctttcaccccagtgtgaggttaactgaaagagcaaaaaagagacgcacttcttcacaatctattggacaagttatgcctaatagcaggcaagaggatccaggtcctattcaaagccaaatggagaagggtatatttaatgagcgaacaggtcacagtgaccaaatggcaaatgagaacaaaaggaagctgaatttttccagatctgacaggaaagaattccattttccagaattgcctgtcacaatacagtcaaaagatacaaaaggaatggaagttaaacagataaaaatgctgaagagggagtcaaagaaaacagagtcatctaagataccaactttacttaacgtggatcaaaatcaagaaaaacaagagtttattcccttatctctgctgtctgcctgctgtcctattttcacaaatatttgctctcagctaactatcaggtacgtctttatcagcggcatgaagacagaccaatacagtgaattggtaccagtagagtggggcattgctgaaaagatacccaaaaatgtggaagcaactttggaactgggtaacaggcagaggtttgaacagtttggagagctcagaagaagacaggaaaatgtgggaaagtttggaactttctagagacttgttgaatggctttgacc

SEQ ID NO: 340338 - protein, 455 aa, Artificial Sequence
  derived and/or modified sequence
MEMYETLGKVGEGSYGTVMKCKHKNTGQIVAIKIFYERPEQSVNKIAMREIKFLKQFHHENLVNLIEVFRQKKKIHLVFEFIDHTVLDELQHYCHGLESKRLRKYLFQILRAIDYLHSNNIIHRDIKPENILVSQSGITKLCDFGFARTLAAPGDIYTDYVATRWYRAPELVLKDTSYGKPVDIWALGCMIIEMATGNPYLPSSSDLDLLHKIVLKVGNLSPHLQNIFSKSPIFAGVVLPQVQHPKNARKKYPKLNGLLADIVHACLQIDPADRISSSDLLHHEYFTRDGFIEKFMPELKAKLLQEAKVNSLIKPKESSKENELRKDERKTVYTNTLLSSSVLGKEIEKEKKPKEIKVRVIKVKGGRGDISEPKKKEYEGGLGQQDANENVHPMSPDTKLVTIEPPNPINPSTNCNGLKENPHCGGSVTMPPINLTNSNLMAANLSSNLFHPSVR

SEQ ID NO: 340339 - protein, 590 aa, Artificial Sequence
  derived and/or modified sequence
MEMYETLGKVGEGSYGTVMKCKHKNTGQIVAIKIFYERPEQSVNKIAMREIKFLKQFHHENLVNLIEVFRQKKKIHLVFEFIDHTVLDELQHYCHGLESKRLRKYLFQILRAIDYLHSNNIIHRDIKPENILVSQSGITKLCDFGFARTLAAPGDIYTDYVATRWYRAPELVLKDTSYGKPVDIWALGCMIIEMATGNPYLPSSSDLDLLHKIVLKVGNLSPHLQNIFSKSPIFAGVVLPQVQHPKNARKKYPKLNGLLADIVHACLQIDPADRISSSDLLHHEYFTRDGFIEKFMPELKAKLLQEAKVNSLIKPKESSKENELRKDERKTVYTNTLLSSSVLGKEIEKEKKPKEIKVRVIKVKGGRGDISEPKKKEYEGGLGQQDANENVHPMSPDTKLVTIEPPNPINPSTNCNGLKENPHCGGSVTMPPINLTNSNLMAANLSSNLFHPSVRLTERAKKRRTSSQSIGQVMPNSRQEDPGPIQSQMEKGIFNERTGHSDQMANENKRKLNFSRSDRKEFHFPELPVTIQSKDTKGMEVKQIKMLKRESKKTESSKIPTLLNVDQNQEKQENTGNAQTERKKNLPDVE

SEQ ID NO: 340340 - protein, 291 aa, Artificial Sequence
  derived and/or modified sequence
MPELKAKLLQEAKVNSLIKPKESSKENELRKDERKTVYTNTLLSSSVLGKEIEKEKKPKEIKVRVIKVKGGRGDISEPKKKEYEGGLGQQDANENVHPMSPDTKLVTIEPPNPINPSTNCNGLKENPHCGGSVTMPPINLTNSNLMAANLSSNLFHPSVRLTERAKKRRTSSQSIGQVMPNSRQEDPGPIQSQMEKGIFNERTGHSDQMANENKRKLNFSRSDRKEFHFPELPVTIQSKDTKGMEVKQIKMLKRESKKTESSKIPTLLNVDQNQEKQEVRLYQRHEDRPIQ

SEQ ID NO: 340341 - DNA, 876 bp, Artificial Sequence
  derived and/or modified sequence
atgccagagcttaaagccaagcttctccaggaagcaaaagtaaacagtttgataaaacctaaggagtcctctaaggaaaacgagctgcggaaggatgaacgcaaaacagtgtataccaataccctgctgtcctcttcagtcctgggaaaagaaattgagaaagagaaaaagcccaaggaaataaaggtacgggtgattaaagtcaaggggggccgcggcgacatatccgaacctaagaagaaagagtatgagggaggtttaggccagcaggacgccaatgagaatgtgcaccctatgtctcccgatactaaattggttacaatcgaacctcccaaccctatcaacccaagcaccaactgcaacggtctgaaggaaaatccacactgcggcgggagcgtgactatgcctcccatcaacttaacgaattctaatctgatggccgctaatcttagttctaatctgttccacccgtccgtgaggctaactgagagagcaaagaaacgcagaaccagttcacagagtatcggccaggtgatgcctaacagcagacaggaggaccctggacccatacagagccagatggaaaaagggatcttcaacgaacgcaccggccactctgaccaaatggccaatgagaataagagaaaattgaatttttcacgcagcgatagaaaggagttccatttccctgaactgcctgtgaccattcagtccaaagacaccaaggggatggaggttaagcagataaaaatgctgaagcgggagagcaagaaaactgaatcctctaaaatcccaaccctgctgaatgttgatcagaatcaggagaagcaagaagtgagactgtaccaaaggcatgaagaccgccccatacaatag

SEQ ID NO: 340342 - DNA, 876 bp, Artificial Sequence
  derived and/or modified sequence
atgcctgagctgaaggccaagctgctgcaggaggccaaggtgaacagcctcatcaagcccaaggagagcagcaaagaaaatgagctgaggaaggatgagaggaagacagtgtacaccaacaccctgctgagcagctctgtgctgggcaaggagattgagaaggagaagaagcccaaggagatcaaggtgcgggtcatcaaggtgaagggcggccgcggggacatcagcgagcccaagaagaaggagtatgaaggaggcctgggccagcaggatgccaatgaaaatgtgcaccccatgagcccagacaccaagctggtgaccatcgagccccccaaccccatcaaccccagcaccaactgcaatggcctgaaggagaacccccactgcggcggctctgtgaccatgccacccatcaacctgaccaacagcaacctgatggccgccaacctgagcagcaacctcttccaccccagcgtgcggctgacagagcgggccaagaagaggaggaccagcagccagagcatcggccaggtgatgcccaacagccggcaggaggaccccggccccatccagagccagatggagaagggcatcttcaatgaaagaacaggccacagcgaccagatggccaatgaaaacaagaggaagctgaacttcagcagaagtgacaggaaggagttccacttccctgagctgcctgtgaccatccagagcaaggacaccaagggcatggaggtgaagcagatcaagatgctgaagcgggagagcaagaagacagagagcagcaagatccccaccctgctgaatgtggaccagaaccaggagaagcaggaggtgcggctgtaccagagacatgaggaccggcccatccagtag

SEQ ID NO: 340343 - DNA, 876 bp, Artificial Sequence
  derived and/or modified sequence
atgcccgagctgaaggccaagctgctgcaggaggccaaggtgaactctctgatcaagcctaaagaatccagcaaggaaaacgaactgcggaaggacgagcggaagacagtgtacacaaacacactcttaagttcctctgtgctcggaaaagaaatcgagaaggagaaaaagcctaaggagatcaaagtgcgagtgattaaagtcaaaggaggccggggggacattagtgagcccaagaaaaaggagtacgaggggggcctggggcagcaggacgcgaatgaaaatgtgcaccccatgagtcctgatacaaagctggtgaccatcgagcctcccaaccctattaacccaagcactaactgcaatggattgaaagaaaatccacactgcggcggctctgttacaatgccacccatcaacctgaccaactccaatctcatggccgccaatctcagctcaaatctcttccaccctagcgtgcgcctgaccgagcgagctaagaagcggcgcacctctagtcagtccattggacaggtcatgccaaacagcagacaggaagatcctggccccattcagagtcagatggaaaaaggtattttcaacgaaaggactggccactctgatcagatggccaacgagaacaaaagaaagctaaactttagtcgttcggatcggaaggagttccacttccctgaactgcctgtgacgatccagagcaaagatacaaaggggatggaggtgaagcagattaagatgcttaagagggagagcaagaagacagagtcctctaagattcccactttattaaatgtcgaccagaaccaggaaaagcaggaggtccgattgtaccagcggcatgaggaccggcccatccagtag

SEQ ID NO: 340344 - DNA, 876 bp, Artificial Sequence
  derived and/or modified sequence
atgccggagttgaaagccaagctgctgcaggaagcaaaggtgaatagccttatcaagcctaaggagtcatccaaagagaacgaactgcgtaaagacgagagaaagaccgtctacacgaacaccctcttgtctagctccgtgctgggaaaagagatagaaaaggaaaagaagcctaaggaaattaaggtaagggtcattaaggtcaagggaggtcggggagacatcagtgaacccaaaaaaaaggaatacgaaggtggcctcggccagcaggatgctaatgagaatgttcacccaatgtccccagacacaaagctggtcaccattgaacccccaaatccgatcaaccctagcaccaactgcaacggtctgaaggagaacccgcactgcggaggaagcgttacaatgccccctatcaatcttaccaattctaacctcatggccgcaaatttgtccagcaaccttttccatcctagcgtcagactgaccgagagagcgaagaagagacgcacatcttcccagtcaatcggccaggtgatgccaaattctcgacaggaggatcccggtccgatacaatcccagatggagaaaggtatattcaatgagcgtacagggcattccgaccagatggctaacgaaaataagcgcaagctgaacttttctaggagcgacaggaaagaattccacttcccagaactaccagtaacaatccagtctaaagacaccaaaggcatggaggtgaaacaaattaagatgctgaagcgagagtctaaaaagaccgagagtagcaaaatcccaacactgctaaacgtcgatcaaaaccaggagaagcaggaggtacggctttaccagcggcacgaggatagacctatccaatag

SEQ ID NO: 340345 - DNA, 1405 bp, Artificial Sequence
  derived and/or modified sequence
agaacgggtcacgtgagcgcctcgcctggatgtgagtttcagccagacctgtggatatctgggctttgggctgtatgatcattgagatggccactggaaatccctatcttcctagtagttctgatttggatttactccataaaattgttttgaaagtgggcttgtttacaaattgatcctgctgacaggatatcatctagtgatcttttgcatcatgagtattttactagagatggatttattgaaaaattcatgccagaactgaaagctaaattactgcaggaagcaaaagtcaattcattaataaagccaaaagagagttctaaagaaaatgaactcaggaaagatgaaagaaaaacagtttataccaatacactgctaagtagttcagttttgggaaaggaaatagaaaaagagaaaaagcccaaggagatcaaagtcagagttattaaagtcaaaggaggaagaggagatatctcagaaccaaaaaagaaagagtatgaaggtggacttggtcaacaggatgcaaatgaaaatgttcatcctatgtctccagatacaaaacttgtaaccattgaaccaccaaaccctatcaatcccagcactaactgtaatggcttgaaagaaaatccacattgcggaggttctgtgacaatgccacccatcaatctaactaacagtaatttgatggctgcaaatctcagttcaaatctctttcaccccagtgtgaggttaactgaaagagcaaaaaagagacgcacttcttcacaatctattggacaagttatgcctaatagcaggcaagaggatccaggtcctattcaaagccaaatggagaagggtatatttaatgagcgaacaggtcacagtgaccaaatggcaaatgagaacaaaaggaagctgaatttttccagatctgacaggaaagaattccattttccagaattgcctgtcacaatacagtcaaaagatacaaaaggaatggaagttaaacagataaaaatgctgaagagggagtcaaagaaaacagagtcatctaagataccaactttacttaacgtggatcaaaatcaagaaaaacaagaggtacgtctttatcagcggcatgaagacagaccaatacagtgaattggtaccagtagagtggggcattgctgaaaagatacccaaaaatgtggaagcaactttggaactgggtaacaggcagaggtttgaacagtttggagagctcagaagaagacaggaaaatgtgggaaagtttggaactttctagagacttgttgaatggctttgaccagaagcttgatcatgatatggacaataaaatccaagctgaggtggtctcagatagagatgaggaacttgttgggaactggagcaaaggtgactcttgttatgttttagc

SEQ ID NO: 340346 - DNA, 876 bp, Artificial Sequence
  derived and/or modified sequence
atgcccgagctgaaggccaagctgctgcaggaggccaaggtgaacagcctgatcaagcccaaggagagcagcaaggagaacgagctgagaaaggacgagagaaagaccgtgtacaccaacaccctgctgagcagcagcgtgctgggcaaggagatcgagaaggagaagaagcccaaggagatcaaggtgagagtgatcaaggtgaagggcggcagaggcgacatcagcgagcccaagaagaaggagtacgagggcggcctgggccagcaggacgccaacgagaacgtgcaccccatgagccccgacaccaagctggtgaccatcgagccccccaaccccatcaaccccagcaccaactgcaacggcctgaaggagaacccccactgcggcggcagcgtgaccatgccccccatcaacctgaccaacagcaacctgatggccgccaacctgagcagcaacctgttccaccccagcgtgagactgaccgagagagccaagaagagaagaaccagcagccagagcatcggccaggtgatgcccaacagcagacaggaggaccccggccccatccagagccagatggagaagggcatcttcaacgagagaaccggccacagcgaccagatggccaacgagaacaagagaaagctgaacttcagcagaagcgacagaaaggagttccacttccccgagctgcccgtgaccatccagagcaaggacaccaagggcatggaggtgaagcagatcaagatgctgaagagagagagcaagaagaccgagagcagcaagatccccaccctgctgaacgtggaccagaaccaggagaagcaggaggtgagactgtaccagagacacgaggacagacccatccagtag

SEQ ID NO: 340347 - protein, 363 aa, Artificial Sequence
  derived and/or modified sequence
MPELKAKLLQEAKVNSLIKPKESSKENELRKDERKTVYTNTLLSSSVLGKEIEKEKKPKEIKVRVIKVKGGRGDISEPKKKEYEGGLGQQDANENVHPMSPDTKLVTIEPPNPINPSTNCNGLKENPHCGGSVTMPPINLTNSNLMAANLSSNLFHPSVRLTERAKKRRTSSQSIGQVMPNSRQEDPGPIQSQMEKGIFNERTGHSDQMANENKRKLNFSRSDRKEFHFPELPVTIQSKDTKGMEVKQIKMLKRESKKTESSKIPTLLNVDQNQEKQEFIPLSLLSACCPIFTNICSQLTIRYVFISGMKTDQYSELVPVEWGIAEKIPKNVEATLELGNRQRFEQFGELRRRQENVGKFGTF

SEQ ID NO: 340348 - DNA, 1092 bp, Artificial Sequence
  derived and/or modified sequence
atgccagagctgaaggccaaactgttacaggaagcaaaagtcaatagccttatcaagcctaaggaatcaagtaaggaaaacgaactaagaaaggacgaacgcaagacggtatacaccaatacgttactttcctcgtccgtactaggtaaggagatcgagaaagagaaaaagccgaaggagatcaaagttcgcgttattaaggtaaagggaggaaggggtgacatttctgagccaaagaagaaggagtatgagggaggcctcggtcaacaggacgctaatgagaatgttcaccccatgagccccgatacaaagctggtgaccattgagccaccaaatccgattaacccttctaccaactgcaatggtctgaaagagaatccgcactgcggaggatcggtgactatgccaccaatcaacctgactaactcaaatctgatggcagctaacctgtcatctaatttgttccaccccagcgtgagactgaccgagcgggccaagaagcgccgcacctcttctcagtccattggccaggtgatgccgaattcccggcaggaagatcccgggcctatccagtctcagatggagaagggcatttttaacgagcggactggccatagtgaccaaatggcaaatgaaaacaagagaaagttgaatttttctcgctccgacagaaaggagtttcactttcctgaactgccggtcaccatacaatctaaggacaccaagggcatggaagtgaagcagattaagatgctcaaaagagagtctaaaaagacagaaagcagtaaaatccctaccctgctcaatgtggatcagaatcaggagaaacaagaattcatcccgctttccctgctctctgcatgttgcccaatttttacgaatatatgtagccagctgacaattagatacgtatttatctctggcatgaagacagaccagtacagtgagctggtcccagtagaatggggcatcgcagaaaaaatccccaagaatgtagaagccactctcgagttggggaatcgccagaggttcgaacagtttggcgagcttaggcgacggcaggagaatgtggggaagtttgggacattctag

SEQ ID NO: 340349 - DNA, 1092 bp, Artificial Sequence
  derived and/or modified sequence
atgcctgagctgaaggccaagctgctgcaggaggccaaggtgaacagcctcatcaagcccaaggagagcagcaaagaaaatgagctgaggaaggatgagaggaagacagtgtacaccaacaccctgctgagcagctctgtgctgggcaaggagattgagaaggagaagaagcccaaggagatcaaggtgcgggtcatcaaggtgaagggcggccgcggggacatcagcgagcccaagaagaaggagtatgaaggaggcctgggccagcaggatgccaatgaaaatgtgcaccccatgagcccagacaccaagctggtgaccatcgagccccccaaccccatcaaccccagcaccaactgcaatggcctgaaggagaacccccactgcggcggctctgtgaccatgccacccatcaacctgaccaacagcaacctgatggccgccaacctgagcagcaacctcttccaccccagcgtgcggctgacagagcgggccaagaagaggaggaccagcagccagagcatcggccaggtgatgcccaacagccggcaggaggaccccggccccatccagagccagatggagaagggcatcttcaatgaaagaacaggccacagcgaccagatggccaatgaaaacaagaggaagctgaacttcagcagaagtgacaggaaggagttccacttccctgagctgcctgtgaccatccagagcaaggacaccaagggcatggaggtgaagcagatcaagatgctgaagcgggagagcaagaagacagagagcagcaagatccccaccctgctgaatgtggaccagaaccaggagaagcaggagttcatccccctgagcctgctgagcgcctgctgccccatcttcaccaacatctgcagccagctgaccatccgctacgtgttcatcagcggcatgaagacagaccagtacagcgagctggtgcctgtggagtggggcattgctgagaagatccccaagaatgtggaggccaccctggagctgggcaaccggcagagatttgagcagtttggagagctgcggcggcggcaggagaatgtgggcaagtttggcaccttctag

SEQ ID NO: 340350 - DNA, 1092 bp, Artificial Sequence
  derived and/or modified sequence
atgcccgagctgaaggccaagctgctgcaggaggccaaggtgaactctctaatcaaaccaaaagaaagctccaaggagaatgagttgaggaaggacgaacgtaagaccgtttatacaaataccttgctgagttcgtcagtactgggaaaagagattgaaaaggagaaaaagccaaaagaaataaaagtgagagtgattaaggtgaaagggggccgaggcgatattagtgagcccaagaagaaagaatatgaaggcggcctgggtcagcaggacgccaacgagaacgtgcatcccatgagtccagataccaagctggtgaccatcgaacctcccaatccgatcaatccgtcaaccaactgtaacgggctaaaagaaaacccccactgtggcggctccgtgaccatgccgccgatcaacctcaccaactccaatttaatggccgcgaatctttcatcaaacttgttccacccttcagtgcgactaaccgagcgggccaaaaaaagacggaccagttcacaatcaatcgggcaggtaatgccaaactcacggcaggaagaccctggtcccatccagtctcagatggaaaagggcatttttaatgagaggaccgggcactcagatcagatggcaaatgagaataagcggaaactgaacttttctcggtccgaccgaaaagagtttcattttcccgagctgcctgttaccatccagagtaaggatactaaggggatggaggtaaagcaaatcaagatgcttaagcgggaatcaaaaaagactgaaagcagcaagattcctaccttgctaaatgtggaccaaaatcaagagaaacaagagttcatccctctcagcctcttgtctgcatgttgccccattttcacaaacatatgcagccagctcaccatcagatacgtgtttatttcgggaatgaaaaccgaccagtactcagagctggttccagtagagtggggtattgcagagaaaatccccaagaatgtcgaggctaccctagaactgggcaataggcagcgattcgagcagtttggggagctccggaggcgccaagagaacgtcggaaagtttgggactttctag

SEQ ID NO: 340351 - DNA, 1092 bp, Artificial Sequence
  derived and/or modified sequence
atgccagaattaaaggcgaagctgctgcaggaggctaaggttaactccctgatcaagccgaaggaatcctctaaggagaacgaactccgcaaggacgagaggaaaacagtatatacaaatactctattgtcttccagcgttctgggaaaggagatagagaaagaaaagaagccaaaggaaatcaaggtccgcgtgataaaggtcaagggcggacgcggtgatatatctgagcccaaaaaaaaggagtacgagggtggactgggccagcaggacgccaacgagaatgtacaccccatgagtccagatacgaagctggttacgattgagccacccaatccaattaacccatccaccaactgcaatggattaaaagagaacccacactgcgggggatcggtcacaatgcctcccattaatctgactaatagtaacttaatggctgcaaacctgtcttcaaatttgttccatccctctgtcagactgaccgaacgggcaaagaagcgcaggacttccagccagtcgatcgggcaggtaatgccaaattcacgccaggaggatcctgggccaattcagagccagatggagaagggcatttttaacgagaggactggtcatagcgaccagatggctaacgaaaacaaacgaaaactgaacttttctcgctcggaccgcaaagaatttcactttccggagctgcccgttactattcagtctaaggataccaagggcatggaagtcaaacagattaaaatgctgaagcgagaatccaagaaaaccgagagttctaagattccgacactgctcaacgtggaccagaaccaggagaagcaagagtttattccgctctcgttattgagcgcctgctgtccaatttttacaaatatatgctcacagcttactatcaggtatgtattcattagtggaatgaagaccgaccagtacagtgagctggtgcccgtcgagtggggcatcgctgaaaagatccccaaaaacgtcgaagcgaccctcgagctcgggaataggcagcgctttgagcagtttggtgagctgaggcgccgtcaggaaaatgtgggaaagttcggtaccttctag

SEQ ID NO: 340352 - DNA, 1092 bp, Artificial Sequence
  derived and/or modified sequence
atgcccgagctgaaggccaagctgctgcaggaggccaaggtgaacagcctgatcaagcccaaggagagcagcaaggagaacgagctgagaaaggacgagagaaagaccgtgtacaccaacaccctgctgagcagcagcgtgctgggcaaggagatcgagaaggagaagaagcccaaggagatcaaggtgagagtgatcaaggtgaagggcggcagaggcgacatcagcgagcccaagaagaaggagtacgagggcggcctgggccagcaggacgccaacgagaacgtgcaccccatgagccccgacaccaagctggtgaccatcgagccccccaaccccatcaaccccagcaccaactgcaacggcctgaaggagaacccccactgcggcggcagcgtgaccatgccccccatcaacctgaccaacagcaacctgatggccgccaacctgagcagcaacctgttccaccccagcgtgagactgaccgagagagccaagaagagaagaaccagcagccagagcatcggccaggtgatgcccaacagcagacaggaggaccccggccccatccagagccagatggagaagggcatcttcaacgagagaaccggccacagcgaccagatggccaacgagaacaagagaaagctgaacttcagcagaagcgacagaaaggagttccacttccccgagctgcccgtgaccatccagagcaaggacaccaagggcatggaggtgaagcagatcaagatgctgaagagagagagcaagaagaccgagagcagcaagatccccaccctgctgaacgtggaccagaaccaggagaagcaggagttcatccccctgagcctgctgagcgcctgctgccccatcttcaccaacatctgcagccagctgaccatcagatacgtgttcatcagcggcatgaagaccgaccagtacagcgagctggtgcccgtggagtggggcatcgccgagaagatccccaagaacgtggaggccaccctggagctgggcaacagacagagattcgagcagttcggcgagctgagaagaagacaggagaacgtgggcaagttcggcaccttctag

SEQ ID NO: 340353 - DNA, 559 bp, Artificial Sequence
  derived and/or modified sequence
ggctgccggcggcgtcgcggagctggtagcagagtcccagcgcgccgctcactactgaatggggtcctggtgcggttctcggtggttgaccagattgacaccctgacctctgacctacagctggaggatgagatgactgacagctccaaaacggacacgctgaatagtagctcaagtggcacaacagcctccagcctagagaagatcaaagtgcaggctaatgcaccgcttattaaacccccagcacacccgtctgctatcctcacggtcctgagaaagccaaaccctccaccacctcctccaaggttgacacctgtgaagtgtgaagaccccaaaagggtggttccaactgccaatcctgtaaaaaccaatggcacccttctacgaaatggaggcttaccaggtggacctaacaaaattccaaatggagatatctgctgcatacccaacagtaacttggacaaggctccagtccagcttctgatgcatagacctgaaaaagacagatgtccccaggcagggcctcgagaacgagttcggtttaatgaaaaagtacagt

SEQ ID NO: 340354 - protein, 489 aa, Artificial Sequence
  derived and/or modified sequence
MDSTKEKCDSYKDDLLLRMGLNDNKAGMEGLDKEKINKIIMEATKGSRFYGNELKKEKQVNQRIENMMQQKAQITSQQLRKAQLQVDRFAMELEQSRNLSNTIVHIDMDAFYAAVEMRDNPELKDKPIAVGSMSMLSTSNYHARRFGVRAAMPGFIAKRLCPQLIIVPPNFDKYRAVSKEVKEILADYDPNFMAMSLDEAYLNITKHLEERQNWPEDKRRYFIKMGSSVENDNPGKEVNKLSEHERSISPLLFEESPSDVQPPGDPFQVNFEEQNNPQILQNSVVFGTSAQEVVKEIRFRIEQKTTLTASAGIAPNTMLAKVCSDKNKPNGQYQILPNRQAVMDFIKDLPIRKVSGIGKVTEKMLKALGIITCTELYQQRALLSLLFSETSWHYFLHISLGLGSTHLTRDGERKSMSVERTFSEINKAEEQYSLCQELCSELAQDLQKERLKVFGYLVFPMKRTGNTNKGALLAFYRLETKPCQPLSVH

SEQ ID NO: 340355 - DNA, 1386 bp, Artificial Sequence
  derived and/or modified sequence
atggacagtaccaaggagaagtgtgactcatacaaggatgaccttctgcttcggatgggccttaacgacaacaaagccgggatggagggtcttgataaggagaagattaacaagatcatcatggaagctactaagggctctaggttctacggaaacgagctgaagaaggagaagcaggtgaatcagcgaattgagaatatgatgcagcagaaagcccagatcacttcacagcaattacggaaggcccagctgcaagtggatcgcttcgcaatggagcttgaacagtctcggaacctgtccaacacgatcgtgcatattgacatggatgctttctatgcggctgttgaaatgcgagataatcctgagctaaaagataaacccatcgccgtgggcagcatgtccatgctttctaccagcaactatcacgcaaggcgttttggggtcagggccgcaatgccgggatttatcgctaaaaggctgtgcccccagttgatcatcgttcctcccaacttcgataaatatcgtgcagtgagcaaggaggtgaaagagatccttgccgattatgaccctaatttcatggctatgagtttagatgaagcttacttgaatattactaagcatctagaggagcggcagaattggcccgaggataaacgccgctatttcatcaaaatgggaagctccgttgagaatgataacccaggtaaagaggttaacaaattaagtgagcatgagaggtctatttcgccactgctttttgaggagagcccttctgatgtccagccgcctggggacccatttcaggttaactttgaggagcagaataacccacaaatcctgcagaactccgttgttttcggtaccagcgcacaggaggtggtgaaggaaataaggttccgtatcgagcaaaaaaccacccttaccgccagtgcgggaatcgctcccaataccatgcttgcgaaagtctgtagcgacaaaaacaagcctaatgggcagtaccagatcctgccaaacagacaggcagtcatggacttcataaaggacctccccatcagaaaggtgtccgggattggtaaggtgaccgaaaagatgctgaaggcactcggaataattacctgcacggaactctaccagcagagagccctcttatctctgctgttctccgaaacctcatggcattactttctgcatatctcacttgggctcggctctacacatctgacccgcgacggggagcgcaagtctatgtccgttgagaggaccttctctgagataaataaggccgaagaacagtacagcctgtgccaggaactgtgctccgaactcgcccaagatctgcagaaggagcgcttgaaggttgcccaagttgagtacagacgactctag

SEQ ID NO: 340356 - DNA, 1470 bp, Artificial Sequence
  derived and/or modified sequence
atggattccacgaaagaaaaatgtgatagttataaggacgatctactgctaaggatgggtctcaatgataataaagccggaatggagggcctcgataaggaaaagattaataaaatcatcatggaagccaccaagggatctcgattttacggcaatgagttaaagaaggaaaagcaggttaaccagagaatcgagaatatgatgcaacagaaagcccaaatcacgagtcagcagctgcgcaaggcacagctgcaggttgaccgtttcgcaatggagctcgaacagagtaggaacttgtcaaatactatcgtacacattgacatggatgcgttttacgcagctgttgagatgagagataatcccgagttaaaggacaagcccatcgctgtagggtcgatgtccatgcttagcacatcaaattatcacgcgcggcggttcggggtgagggccgctatgcctgggtttattgcgaagcgtctctgtcctcagttgattattgtgccgcccaattttgataagtatagagcagtaagcaaggaagtgaaggagatactggcggattatgacccaaattttatggccatgtcactggatgaggcatatctgaatatcactaagcatttagaagagaggcagaactggcccgaggataagagaagatacttcatcaaaatgggctcatcagttgagaacgataatcctgggaaagaggtgaacaagctttcagagcacgaacgatccattagtcctcttcttttcgaagagagcccttctgacgtgcaacctccaggcgacccgttccaggtcaattttgaggagcaaaacaatcctcagatcttgcagaactcggttgtttttggtaccagtgcccaagaagttgtcaaagagattcggttccggatcgaacaaaagactacactgactgcctctgcaggtatcgccccaaatacgatgctggccaaggtgtgctccgacaaaaataagcccaacggccagtatcagatcttgcccaacaggcaagccgtgatggacttcataaaagatcttcccataagaaaagtttcagggattggtaaagtgacagaaaagatgctgaaggccttaggaatcattacttgcaccgagttatatcagcaacgcgccctcctatccctgctcttcagcgaaaccagctggcactacttcctccacatctcactgggcctgggatctactcatctgacccgagatggtgagcggaagtccatgagcgtggaacgaacattcagtgagattaacaaggccgaagaacagtattctctgtgtcaggagctctgttcagaactggcgcaagacctgcagaaggagaggttaaaggtgtttggctacctggttttccccatgaagaggaccggaaatacaaataaaggggcgctcttggcgttctacagactggagacaaagccatgtcagcccctaagcgtgcactag

SEQ ID NO: 340357 - DNA, 426 bp, Artificial Sequence
  derived and/or modified sequence
atggacagtaccaaggagaaatgcgactcctacaaagacgatctgctgttacgtatgggacttaatgacaacaaggccggcatggaggggctagataaggaaaagatcaacaagattatcatggaagccaccaagggcagccggttctatgggaacgagctgaaaaaggaaaagcaggtgaaccagcgtattgagaatatgatgcaacagaaagctcagataaccagccagcagttgcgtaaggctcaactgcaggtggaccggtttgctatggaacttgaacaaagccgcaacctgtcaaacacaatcgtgcatatagatatggacgcattctacgccgccgtcgaaatgagggacaacccggaacttaaggacaagccgatagctgtgggatcaatgagtatgctgtcaacttctaactactag

SEQ ID NO: 340358 - DNA, 1419 bp, Artificial Sequence
  derived and/or modified sequence
atggattcgaccaaggagaaatgcgattcatacaaggatgacctcttactgaggatgggtctcaatgacaacaaggctggcatggagggtctagataaggagaaaataaacaaaattattatggaggcaaccaagggaagcaggttctatggtaatgagctgaagaaagagaagcaagtgaatcaacggatagaaaatatgatgcagcagaaggcccaaataacgtcacagcagttgcggaaagctcagctccaagtggataggttcgccatggaactggagcagtctaggaacttgagcaacaccattgtccatatcgacatggatgctttctacgccgccgtggagatgagagataaccctgagctgaaagataaaccaatcgctgtgggatccatgtccatgctgagcacaagtaattatcatgccaggagatttggagtgagagcagccatgccagggtttatcgctaagcgtctctgtcctcaactgattattgtacctcctaacttcgacaagtaccgcgctgtgtccaaagaggtcaaagagatacttgctgattatgatcctaattttatggctatgtcgcttgatgaagcgtacctcaacatcaccaaacacctggaggaacgccagaattggcccgaagataaacggaggtactttattaagatgggctccagtgtcgagaatgataacccaggcaaagaggttaacaagctgagcgagcacgagcggtcaatcagtccacttctatttgaggagtccccttcggacgtccagcctcccggagatcctttccaagtgaatttcgaggaacagaataatcctcagattcttcagaattccgtagtgttcggaacttccgcacaggaggtggtgaaagaaattaggttcaggatagagcagaagactacccttacagcgtctgccgggatcgccccaaatacgatgctagctaaagtgtgtagtgacaaaaacaaaccgaatggccaataccagatcctgcctaacaggcaagcagtcatggacttcataaaagatctgcccataaggaaggtttcggggatcggcaaggtcacagaaaagatgttaaaagcactggggattatcacatgtaccgaactctaccaacagcgtgcactgttaagtcttttattttccgagacaagctggcattactttttacacattagcctggggctcgggagcacacatctgactagagacggggaaaggaagtccatgtcagtcgagaggacatttagcgagattaacaaggcagaggaacaatactccctgtgtcaagagctgtgctctgaactcgctcaagatcttcagaaggaacgcttgaaagtcctgtatttcgacatggtctctcttgttttcaagttcttcaatagcaagatgctgccctag

SEQ ID NO: 340359 - DNA, 1386 bp, Artificial Sequence
  derived and/or modified sequence
atggacagcaccaaggagaagtgtgacagctacaaggatgacctgctgctgaggatgggcctgaatgacaacaaggccggcatggagggcctggacaaggagaagatcaacaagatcatcatggaggccaccaagggcagccgcttctatggaaatgagctgaagaaggagaagcaggtgaaccagagaattgagaacatgatgcagcagaaggcccagatcaccagccagcagctgaggaaggcccagctgcaggtggacagatttgccatggagctggagcagagcaggaacctgagcaacaccatcgtgcacatcgacatggatgccttctatgctgctgtggagatgagggacaaccctgagctgaaggacaagcccatcgctgtgggctccatgtccatgctgagcaccagcaactaccacgcccggcgcttcggcgtgcgggccgccatgcctggcttcatcgccaagaggctgtgcccccagctgatcatcgtgccccccaactttgacaagtacagagctgtgtccaaggaggtgaaggagatcctggccgactatgaccccaacttcatggccatgagcctggatgaggcctacctgaacatcaccaagcacctggaggagcggcagaactggccagaggacaagaggcgctacttcatcaagatgggcagctctgtggagaatgacaaccctgggaaggaggtgaacaagctgtctgagcacgagaggagcatcagccccctgctgtttgaggagagccccagtgatgtgcagcccccaggggaccccttccaggtgaactttgaggagcagaacaacccccagatcctgcagaacagcgtggtgtttggcaccagcgcccaggaggtggtgaaggagatccgcttcagaattgagcagaagaccaccctgacagccagcgctggcatcgcccccaacaccatgctggccaaggtgtgcagcgacaagaacaagcccaacggccagtaccagatcctgcccaaccggcaggccgtgatggacttcatcaaggacctgcccatcaggaaggtgtctggaattggcaaggtgacagagaagatgctgaaggccctgggcatcatcacctgcacagagctgtaccagcagagggccctgctgagcctgctcttcagcgagacctcctggcactacttcctgcacatcagcctgggcctgggcagcacccacctgaccagagatggagagaggaagtccatgtctgtggagaggaccttcagcgagatcaacaaggccgaggagcagtacagcctgtgccaggagctgtgcagcgagctggcccaggacctgcagaaggagcggctgaaggtggcccaggtggagtacagaaggctgtag

SEQ ID NO: 340360 - DNA, 1470 bp, Artificial Sequence
  derived and/or modified sequence
atggacagcaccaaggagaagtgtgacagctacaaggatgacctgctgctgaggatgggcctgaatgacaacaaggccggcatggagggcctggacaaggagaagatcaacaagatcatcatggaggccaccaagggcagccgcttctatggaaatgagctgaagaaggagaagcaggtgaaccagagaattgagaacatgatgcagcagaaggcccagatcaccagccagcagctgaggaaggcccagctgcaggtggacagatttgccatggagctggagcagagcaggaacctgagcaacaccatcgtgcacatcgacatggatgccttctatgctgctgtggagatgagggacaaccctgagctgaaggacaagcccatcgctgtgggctccatgtccatgctgagcaccagcaactaccacgcccggcgcttcggcgtgcgggccgccatgcctggcttcatcgccaagaggctgtgcccccagctgatcatcgtgccccccaactttgacaagtacagagctgtgtccaaggaggtgaaggagatcctggccgactatgaccccaacttcatggccatgagcctggatgaggcctacctgaacatcaccaagcacctggaggagcggcagaactggccagaggacaagaggcgctacttcatcaagatgggcagctctgtggagaatgacaaccctgggaaggaggtgaacaagctgtctgagcacgagaggagcatcagccccctgctgtttgaggagagccccagtgatgtgcagcccccaggggaccccttccaggtgaactttgaggagcagaacaacccccagatcctgcagaacagcgtggtgtttggcaccagcgcccaggaggtggtgaaggagatccgcttcagaattgagcagaagaccaccctgacagccagcgctggcatcgcccccaacaccatgctggccaaggtgtgcagcgacaagaacaagcccaacggccagtaccagatcctgcccaaccggcaggccgtgatggacttcatcaaggacctgcccatcaggaaggtgtctggaattggcaaggtgacagagaagatgctgaaggccctgggcatcatcacctgcacagagctgtaccagcagagggccctgctgagcctgctcttcagcgagacctcctggcactacttcctgcacatcagcctgggcctgggcagcacccacctgaccagagatggagagaggaagtccatgtctgtggagaggaccttcagcgagatcaacaaggccgaggagcagtacagcctgtgccaggagctgtgcagcgagctggcccaggacctgcagaaggagcggctgaaggtgtttggctacctggtgttccccatgaagaggacaggcaacaccaacaagggggccctgctggccttctaccgcctggagaccaagccctgccagcccctgtctgtgcactag

SEQ ID NO: 340361 - DNA, 426 bp, Artificial Sequence
  derived and/or modified sequence
atggacagcaccaaggagaagtgtgacagctacaaggatgacctgctgctgaggatgggcctgaatgacaacaaggccggcatggagggcctggacaaggagaagatcaacaagatcatcatggaggccaccaagggcagccgcttctatggaaatgagctgaagaaggagaagcaggtgaaccagagaattgagaacatgatgcagcagaaggcccagatcaccagccagcagctgaggaaggcccagctgcaggtggacagatttgccatggagctggagcagagcaggaacctgagcaacaccatcgtgcacatcgacatggatgccttctatgctgctgtggagatgagggacaaccctgagctgaaggacaagcccatcgctgtgggctccatgtccatgctgagcaccagcaactactag

SEQ ID NO: 340362 - DNA, 1419 bp, Artificial Sequence
  derived and/or modified sequence
atggacagcaccaaggagaagtgtgacagctacaaggatgacctgctgctgaggatgggcctgaatgacaacaaggccggcatggagggcctggacaaggagaagatcaacaagatcatcatggaggccaccaagggcagccgcttctatggaaatgagctgaagaaggagaagcaggtgaaccagagaattgagaacatgatgcagcagaaggcccagatcaccagccagcagctgaggaaggcccagctgcaggtggacagatttgccatggagctggagcagagcaggaacctgagcaacaccatcgtgcacatcgacatggatgccttctatgctgctgtggagatgagggacaaccctgagctgaaggacaagcccatcgctgtgggctccatgtccatgctgagcaccagcaactaccacgcccggcgcttcggcgtgcgggccgccatgcctggcttcatcgccaagaggctgtgcccccagctgatcatcgtgccccccaactttgacaagtacagagctgtgtccaaggaggtgaaggagatcctggccgactatgaccccaacttcatggccatgagcctggatgaggcctacctgaacatcaccaagcacctggaggagcggcagaactggccagaggacaagaggcgctacttcatcaagatgggcagctctgtggagaatgacaaccctgggaaggaggtgaacaagctgtctgagcacgagaggagcatcagccccctgctgtttgaggagagccccagtgatgtgcagcccccaggggaccccttccaggtgaactttgaggagcagaacaacccccagatcctgcagaacagcgtggtgtttggcaccagcgcccaggaggtggtgaaggagatccgcttcagaattgagcagaagaccaccctgacagccagcgctggcatcgcccccaacaccatgctggccaaggtgtgcagcgacaagaacaagcccaacggccagtaccagatcctgcccaaccggcaggccgtgatggacttcatcaaggacctgcccatcaggaaggtgtctggaattggcaaggtgacagagaagatgctgaaggccctgggcatcatcacctgcacagagctgtaccagcagagggccctgctgagcctgctcttcagcgagacctcctggcactacttcctgcacatcagcctgggcctgggcagcacccacctgaccagagatggagagaggaagtccatgtctgtggagaggaccttcagcgagatcaacaaggccgaggagcagtacagcctgtgccaggagctgtgcagcgagctggcccaggacctgcagaaggagcggctgaaggtgctgtactttgacatggtgtccctggtgttcaagttcttcaacagcaagatgctgccctag

SEQ ID NO: 340363 - DNA, 1386 bp, Artificial Sequence
  derived and/or modified sequence
atggacagcaccaaggagaagtgcgacagctacaaggacgacctgttgcttcgcatgggtctgaatgataacaaggctggcatggagggcttagacaaggaaaagataaataagatcattatggaggccactaaaggctcccgtttctacggcaatgagcttaaaaaggaaaagcaagtaaaccaaagaatcgagaatatgatgcaacagaaggcacagatcacttcacagcagctccgtaaggcccagctacaggtcgatagatttgccatggaactggaacagtctcgcaacttgagtaacacaatcgtgcatatcgatatggacgctttttacgccgctgtggagatgcgcgacaatccagagctgaaggacaagcccattgccgtcggctccatgagtatgctttctacttccaactaccacgctaggaggtttggtgtacgagctgcaatgcctgggtttattgcaaaaagattgtgccctcagctgattatcgtgcctccgaatttcgataagtatagggcagtgtccaaagaagtgaaagaaattctggcagactacgacccaaacttcatggcgatgtctttggatgaggcatatctaaatatcacgaaacacctcgaggaaagacaaaattggcctgaggataagaggcggtattttatcaagatgggatccagcgtggagaatgacaaccctgggaaagaggtcaacaaactttccgaacacgagcgatctataagcccattgctctttgaggagtctccttcagacgtgcagccacctggagatcccttccaggttaacttcgaggaacagaacaacccacagatcctgcaaaacagtgtggtgtttggaacaagcgcccaggaggtcgtgaaagaaataagattccgaatcgaacaaaagacgactctgacagctagcgcagggatcgctccaaatacaatgctagctaaagtatgttcagataaaaacaagcctaatgggcagtatcagattctccctaacagacaggctgtaatggattttatcaaagatttaccaatacgcaaggtttccgggatcggcaaggtgaccgagaagatgcttaaagctttgggtatcatcacgtgcacggagctttaccagcaacgcgccctgctttctctactcttttccgaaacaagttggcactactttcttcatattagcctggggctgggtagtactcacctcactagagacggagagaggaagagtatgagcgtcgagcgtacgttcagcgaaatcaataaggcagaggaacagtactcactatgtcaggaactctgttctgagctcgcacaggaccttcagaaggagcggcttaaagtcgcacaggttgagtataggagattgtag

SEQ ID NO: 340364 - DNA, 1470 bp, Artificial Sequence
  derived and/or modified sequence
atggacagcaccaaggagaagtgcgacagctacaaggacgacctgttgctccgcatggggctaaatgataacaaggcaggcatggaaggattggataaagaaaagataaataagatcataatggaggctaccaaggggtcacggttctatgggaacgaattaaaaaaggagaagcaggtgaaccaaagaattgaaaacatgatgcaacagaaagcacagattacgtcacaacagcttagaaaggcgcagctgcaggttgaccgattcgcgatggagctcgaacaatcccggaatctctcgaacacaatcgtccacatcgatatggatgcattctatgcagctgtcgagatgagggacaaccccgagctgaaggataaacccattgctgtgggatctatgagcatgctgagcacctctaactaccatgcacgccgtttcggcgtgagggccgccatgcctggttttatagccaagcgcctctgtccacaactgatcatcgtacctccaaattttgacaaataccgcgccgtgtccaaagaggtgaaggagattttggctgactacgaccccaattttatggccatgtctctggacgaggcctacttaaacatcactaaacatcttgaggagagacagaattggcctgaagataagagacgctacttcataaaaatgggctcctccgtggaaaatgataatcccggcaaggaagtcaataagctgtccgagcacgaaaggagtattagccctctgctgttcgaggaatccccctcggacgtgcagcccccaggggacccattccaggtgaattttgaagaacagaacaatccgcagatcctccagaactctgtggtgttcggcacttctgcacaggaagtggtgaaggagattcgtttccgcatagaacagaagacgactctgacggcctcagcgggaattgcacccaacacgatgcttgcaaaagtttgttcggataagaacaaaccaaacgggcagtaccagatcctgcctaatcgccaagccgtcatggattttatcaaagacctgcctatcagaaaggtctctggcatcggcaaggtgactgagaaaatgctgaaggcccttggaatcataacatgcacagagctttaccagcagagagccttactctctcttctcttcagcgaaacttcctggcattacttccttcatatatctctaggactgggctccacacacctaacacgcgatggggagaggaaaagcatgtctgttgagaggacatttagcgagatcaacaaggccgaggaacagtattcactatgtcaggagttgtgttcagaactggctcaggatttgcagaaagaacgattgaaagtgttcggctacctggtcttccctatgaagagaaccggcaataccaacaagggcgcattattggccttctatcgcttggagactaaaccttgtcagcccctgtcagtccactag

SEQ ID NO: 340365 - DNA, 426 bp, Artificial Sequence
  derived and/or modified sequence
atggacagcaccaaggagaagtgcgacagctacaaggacgacctgcttttaaggatgggtctgaatgacaacaaggccggaatggagggcctcgataaagaaaagattaataagattatcatggaagccacgaaagggtccagattctacggcaatgagctgaaaaaagagaagcaagtcaatcaacggatagaaaatatgatgcagcagaaggcccagatcacttcccagcaactgaggaaggcacagctgcaagttgacagatttgcaatggagcttgagcagtcccggaacctctcaaatactattgtacatattgacatggacgctttctacgcagcggtggaaatgcgcgacaatcccgaactcaaggacaagccaatcgctgtcggcagtatgtcaatgctgagtacctctaactattag

SEQ ID NO: 340366 - DNA, 1419 bp, Artificial Sequence
  derived and/or modified sequence
atggacagcaccaaggagaagtgcgacagctacaaggacgacctgctgctgaggatgggactgaacgataataaggcaggcatggagggtctagataaagagaaaatcaataagattatcatggaggccaccaaaggttcgcgattctacggcaacgaattaaagaaggaaaagcaggtgaaccaaaggatcgaaaacatgatgcagcaaaaagcacagattacgagtcagcagctgaggaaggctcagcttcaggtggataggttcgctatggaactagagcagtcacgcaacctcagcaataccatagttcacattgatatggatgcattttatgctgcagttgagatgcgggacaatcctgaattgaaggacaagcccatagcagtcggtagcatgtcaatgctcagcacttctaactaccatgctcgcaggttcggggtccgcgcggcgatgcctggattcatagctaaaagactgtgtccccagttgattatcgtccctcccaattttgacaagtacagggcggtgtctaaggaggtgaaagaaatactcgccgactacgatccaaacttcatggctatgtccctagacgaggcctatctgaacatcacaaaacatctagaggagcggcagaactggcccgaggataaacggaggtattttatcaagatgggcagctctgttgaaaatgataaccccggcaaagaggtaaataagctttcggaacacgagcgcagtatcagccccttactattcgaggaaagtcccagcgacgtccagccgcccggtgatccatttcaggtgaattttgaggaacaaaataacccccagatcttacaaaatagcgtcgtgttcggcaccagtgcacaggaagtcgtgaaagagataagatttaggatagaacagaagactacgctcacagcttcggccggcattgcccctaatacgatgcttgcaaaggtgtgctccgacaagaataaaccaaacgggcaataccaaattctcccgaacagacaggccgtcatggattttattaaggatcttcctataaggaaagtgtcaggcatcggtaaggtgaccgagaaaatgctgaaagctctgggcataatcacgtgcacggaactttatcagcagagggcccttctgtcactgttattctccgagacatcatggcactacttcctgcatatcagcctgggcctcggctctactcacctcaccagagacggagaacgcaagtcaatgagtgtggagcgtaccttcagcgagatcaataaagcagaggaacagtattccctgtgccaagagttgtgcagcgaactcgcacaagatttgcagaaagagcggctcaaggtgctctacttcgatatggtgtctttggttttcaaattctttaactcaaaaatgctgccctag

SEQ ID NO: 340367 - DNA, 1484 bp, Artificial Sequence
  derived and/or modified sequence
atggatagcacaaaggagaagtgtgacagttacaaagatgatcttctgcttaggatgggacttaatgataataaagcaggaatggaaggattagataaagagaaaattaacaaaattataatggaagccacgaaggggtccagattttatggaaatgagctcaagaaagaaaagcaagtcaaccaacgaattgaaaatatgatgcaacaaaaagctcaaatcaccagccaacagctaagaaaagcacaattacaggttgacagatttgcaatggaattagaacaaagccgaaatttgagcaataccatagtgcacattgacatggatgctttctatgcagctgtagaaatgagggacaatccagaattgaaggataaacccattgctgtaggatcaatgagtatgctgtctacttcaaattaccatgcaaggagatttggtgttcgtgcagccatgccaggatttattgctaagaggctgtgcccacaacttataatagtgccccccaactttgacaaataccgagctgtgagtaaagaggttaaggaaatacttgctgattatgatcccaattttatggccatgagtcttgatgaagcctacttgaatataacaaagcacttagaagaaagacaaaattggcctgaggataaaagaaggtatttcatcaaaatgggaagctctgtagaaaatgataatccaggaaaggaagttaataaactgagtgagcatgaacgatccatctctccactactttttgaagagagtccttctgatgtgcagcccccaggagatcctttccaagtgaactttgaagaacaaaacaatcctcaaatactccaaaactcagttgtttttggaacatcagcccaggaagtggtaaaggaaattcgtttcagaattgagcagaaaacaacactgacagccagtgcaggcattgccccaaatacaatgttagcaaaagtatgcagtgataagaataaaccaaatggacaataccaaattcttcccaatagacaagctgtgatggacttcatcaaggatttacccattagaaaggtttctggaataggaaaagttacagagaaaatgttaaaggcccttggaattattacatgtacagaactttaccaacagagggcattgctttctctccttttctctgaaacatcttggcattatttccttcatatctccttgggtctaggttcaacacacctgacgagggatggagagaggaaaagtatgagcgttgagaggacattcagtgagataaataaagcggaagagcaatacagcctatgtcaagaactttgcagtgagcttgctcaggatctacagaaagaaagacttaaggtagctcaagtggagtacagaaggctgtaacaagaacaaaaaggccaggattgatgacaaagtactcaacatcaaagaaaataaaaccaaacaatcccaaacatacccttgatatattttttaagtaa

SEQ ID NO: 340368 - DNA, 2441 bp, Artificial Sequence
  derived and/or modified sequence
atggatagcacaaaggagaagtgtgacagttacaaagatgatcttctgcttaggatgggacttaatgataataaagcaggaatggaaggattagataaagagaaaattaacaaaattataatggaagccacgaaggggtccagattttatggaaatgagctcaagaaagaaaagcaagtcaaccaacgaattgaaaatatgatgcaacaaaaagctcaaatcaccagccaacagctaagaaaagcacaattacaggttgacagatttgcaatggaattagaacaaagccgaaatttgagcaataccatagtgcacattgacatggatgctttctatgcagctgtagaaatgagggacaatccagaattgaaggataaacccattgctgtaggatcaatgagtatgctgtctacttcaaattaccatgcaaggagatttggtgttcgtgcagccatgccaggatttattgctaagaggctgtgcccacaacttataatagtgccccccaactttgacaaataccgagctgtgagtaaagaggttaaggaaatacttgctgattatgatcccaattttatggccatgagtcttgatgaagcctacttgaatataacaaagcacttagaagaaagacaaaattggcctgaggataaaagaaggtatttcatcaaaatgggaagctctgtagaaaatgataatccaggaaaggaagttaataaactgagtgagcatgaacgatccatctctccactactttttgaagagagtccttctgatgtgcagcccccaggagatcctttccaagtgaactttgaagaacaaaacaatcctcaaatactccaaaactcagttgtttttggaacatcagcccaggaagtggtaaaggaaattcgtttcagaattgagcagaaaacaacactgacagccagtgcaggcattgccccaaatacaatgttagcaaaagtatgcagtgataagaataaaccaaatggacaataccaaattcttcccaatagacaagctgtgatggacttcatcaaggatttacccattagaaaggtttctggaataggaaaagttacagagaaaatgttaaaggcccttggaattattacatgtacagaactttaccaacagagggcattgctttctctccttttctctgaaacatcttggcattatttccttcatatctccttgggtctaggttcaacacacctgacgagggatggagagaggaaaagtatgagcgttgagaggacattcagtgagataaataaagcggaagagcaatacagcctatgtcaagaactttgcagtgagcttgctcaggatctacagaaagaaagacttaaggtgttcggatatctagttttcccaatgaagaggacaggaaacaccaacaaaggagcattattggctttttacaggctggaaaccaagccctgtcagccactgagtgtacattagagaaaactgacaaagataagtttgtaaaacctctagaaatgtctcataagaagagtttctttgataaaaaacgatcagaaaggaaatggagtcaccaagatacatttaaatgtgaagccgtgaataaacaaagtttccagacatcacaaccattccaagttttaaagaagaagatgaatgagaatttggaaatatcagagaattcagatgactgtcagatacttacctgtcctgtttgctttagggctcaagggtgcatcagtctggaagccttgaataaacatgtagatgaatgtcttgatggaccttcaatcagtgaaaactttaaaatgttctcgtgttcacatgtttctgctaccaaagttaacaagaaagaaaatgttcctgcttcttcactttgtgagaagcaagattatgaagcccatccaaaaattaaagaaatatcttcagtagattgtatagctttagtagatactatagataactcatctaaagcagaaagcatagatgctttaagtaataagcatagcaaggaagaatgttctagtctcccaagcaagtcttttaatattgaacactgtcatcagaattcttcttctactgtttcattggaaaacgaagatgttggatcatttagacaagaataccgccagccttacttatgtgaagtgaaaacaggccaagctctagtttgtcctgtttgtaacgtagaacaaaagacttcagatctaaccctgttcaatgtgcatgtggatgtttgcttaaataaaagttttatccaagaattaagaaaggataaatttaacccagttaatcaacccaaagaaagctccagaagtactggtagctcaagtggagtacagaaggctgtaacaagaacaaaaaggccaggattgatgacaaagtactcaacatcaaagaaaataaaaccaaacaatcccaaacatacccttgatatattttttaagtaa

SEQ ID NO: 340369 - DNA, 1536 bp, Artificial Sequence
  derived and/or modified sequence
tgagagagctttccgctgaagatgacgggcctgctttccagggcggcttgtcgaaagcccgggagcatctggccgcttccgcctcaaccatgggctggggttttgtgagctactagtgccaagggttttctttccaccagaccaccgctgtaaatctcgagggtcttactcattagaagttagaattcacatttgacgtttaaaggaagaatttccttagtaccttctcacaagcacgcacttcgcatttttagatttctagagtttgctttgtagaaagtaattttgaggttgtcagagaataaatgacgttagaaaggtttttaaagtaaaacaagaatgtgagatgatagcctgggattttctcttggttgtaaatgaatatcttactgagaaccacgttaaccatgcctgcccctcaaagataggaaaggttggatatatagaaactttctcgtattagaaataccgaagtgcagtggttttgtgtgtacaagggattaggcaataggaggctatttttgttttaagactagggttgaattagcagaaagaccaatagaagatctaacaactcttgtcagttgtcaaggataactttgattatgagactttgactttgtagcttcagtaatttcctctcgttagctattttaatatagtcgatttccttgtaattgccaagagtaaaatttgttattaaaccttagaaagagtactttcttactacaaggatgggacgataggagcgaaatttcgagtctaagggaaaacgctggccgagtgtggtggctcacgcctgtaatcccagcacttcgggaggccgaggtgggtggatcacctgaggccgggagtttgagaccagcctgggcaacaagatttttcttcatccctttactttgagtctgtggatgtcattgcatgtgatatgggtctcctgaagacagcataccattggattttgcttctttatccaagttatcattctgtcttttaattggggtgtgcattcaagataagtttataccatggatagcacaaaggagaagtgtgacagttacaaagatgatcttctgcttaggatgggacttaatgataataaagcaggaatggaaggattagataaagagaaaattaacaaaattataatggaagccacgaaggggtccagattttatggaaatgagctcaagaaagaaaagcaagtcaaccaacgaattgaaaatatgatgcaacaaaaagctcaaatcaccagccaacagctaagaaaagcacaattacaggttgacagatttgcaatggaattagaacaaagccgaaatttgagcaataccatagtgcacattgacatggatgctttctatgcagctgtagaaatgagggacaatccagaattgaaggataaacccattgctgtaggatcaatgagtatgctgtctacttcaaattaccatgcaaggagatttggtgttcgtgcagccatgccaggatttattgctaagaggctgtgcccacaacttataatagtgcccccca

SEQ ID NO: 340370 - DNA, 1438 bp, Artificial Sequence
  derived and/or modified sequence
ataagtttataccatggatagcacaaaggagaagtgtgacagttacaaagatgatcttctgcttaggatgggacttaatgataataaagcaggaatggaaggattagataaagagaaaattaacaaaattataatggaagccacgaaggggtccagattttatggaaatgagctcaagaaagaaaagcaagtcaaccaacgaattgaaaatatgatgcaacaaaaagctcaaatcaccagccaacagctaagaaaagcacaattacaggttgacagatttgcaatggaattagaacaaagccgaaatttgagcaataccatagtgcacattgacatggatgctttctatgcagctgtagaaatgagggacaatccagaattgaaggataaacccattgctgtaggatcaatgagtatgctgtctacttcaaattaccatgcaaggagatttggtgttcgtgcagccatgccaggatttattgctaagaggctgtgcccacaacttataatagtgccccccaactttgacaaataccgagctgtgagtaaagaggttaaggaaatacttgctgattatgatcccaattttatggccatgagtcttgatgaagcctacttgaatataacaaagcacttagaagaaagacaaaattggcctgaggataaaagaaggtatttcatcaaaatgggaagctctgtagaaaatgataatccaggaaaggaagttaataaactgagtgagcatgaacgatccatctctccactactttttgaagagagtccttctgatgtgcagcccccaggagatcctttccaagtgaactttgaagaacaaaacaatcctcaaatactccaaaactcagttgtttttggaacatcagcccaggaagtggtaaaggaaattcgtttcagaattgagcagaaaacaacactgacagccagtgcaggcattgccccaaatacaatgttagcaaaagtatgcagtgataagaataaaccaaatggacaataccaaattcttcccaatagacaagctgtgatggacttcatcaaggatttacccattagaaaggtttctggaataggaaaagttacagagaaaatgttaaaggcccttggaattattacatgtacagaactttaccaacagagggcattgctttctctccttttctctgaaacatcttggcattatttccttcatatctccttgggtctaggttcaacacacctgacgagggatggagagaggaaaagtatgagcgttgagaggacattcagtgagataaataaagcggaagagcaatacagcctatgtcaagaactttgcagtgagcttgctcaggatctacagaaagaaagacttaaggtgctttattttgatatggtgtccttagtttttaagttttttaatagtaaaatgctaccttaaaagcta

SEQ ID NO: 340371 - DNA, 1386 bp, Artificial Sequence
  derived and/or modified sequence
atggattctacaaaggagaagtgcgactcttacaaggatgacctgctcctgaggatgggcctgaatgacaataaggccggaatggaagggctcgacaaggagaagatcaacaaaataatcatggaggccacaaaggggtctcgattctacggcaacgagctcaagaaagaaaaacaagtgaaccagcggattgagaacatgatgcagcagaaggcccaaatcacctcacaacagcttcggaaggctcagctgcaggtggataggtttgcaatggagctcgaacagtcgaggaatctgtccaacactatcgtgcacattgacatggatgccttctatgcggcagtcgagatgcgcgataatccagaactgaaggataagccaattgctgttggtagcatgtccatgttgtctacctcaaactaccacgcacggaggttcggagttagggccgcaatgccagggtttattgcaaagagattgtgccctcaattgatcatcgtgccccctaactttgacaaatacagggccgttagcaaggaagtcaaagagatacttgccgattatgatcccaactttatggcgatgagtctcgatgaagcatacttgaacatcacaaaacacctggaagaacgccaaaactggccagaagataagaggagatatttcatcaagatgggctccagtgtcgaaaatgacaaccctggcaaggaggtgaacaagctcagcgaacatgaaagatcgatcagccccctgctcttcgaggagagcccctccgatgtccagcctcccggagatccgtttcaggtgaacttcgaggaacagaataatccgcaaatcctgcagaattcagtggtgttcggcacatcggctcaggaagtggttaaagaaatcaggtttcggattgagcagaagacgacacttacagctagcgccggaattgcacccaacacaatgctggcgaaagtttgcagtgataaaaacaagccaaacggccagtaccagatacttccgaataggcaggccgtcatggatttcatcaaggatctccctattcgcaaagtgtctgggatcgggaaggttacagaaaagatgctgaaagccctggggatcataacttgcactgaactgtatcagcagagggccctgctgtcactccttttctctgaaacttcctggcactacttcctccatatatcactcggactcggctctacgcatttaaccagagacggcgagagaaagtccatgtcagtcgagagaacctttagtgagatcaacaaggctgaggagcagtatagtttgtgtcaggaattgtgttctgaacttgcccaggatttgcagaaggaacggttgaaggtcgcccaggtggagtacagacggctgtag

SEQ ID NO: 340372 - DNA, 1470 bp, Artificial Sequence
  derived and/or modified sequence
atggattcaactaaggagaaatgtgactcatataaagacgacctgctcctgcgcatgggtttgaacgataacaaagcgggtatggaaggtctggataaggagaagattaataagattatcatggaagccaccaagggaagtaggttctatggcaatgagctcaagaaagagaaacaggtaaatcagcggatcgaaaatatgatgcagcagaaagcccagattacctcccagcagctcaggaaagcacaacttcaggttgaccgcttcgctatggagttggagcagagtcgcaatttgtcgaacacgatcgtccatatcgacatggatgccttttatgctgcagtggagatgagagacaaccccgagctgaaggacaaacctattgcggttggatcaatgtccatgctgagtacatcaaactaccacgcaaggcgatttggcgttagagcagctatgccaggttttattgccaaacgtctctgccctcagctgattatcgtgcctcctaattttgacaaatatcgtgcagtaagcaaggaagtcaaagagatactggcagactacgatcctaatttcatggccatgtctcttgacgaagcctatctaaacatcacaaagcatcttgaggagaggcagaactggcccgaggataaacgtagatatttcatcaagatgggatcaagtgtggagaacgataaccccggaaaggaggttaataaactgagtgagcacgagcgaagcatatctcctctcctgttcgaggaatctccttctgacgtccagccgcctggggatccattccaggttaacttcgaggagcagaacaacccccagattttgcagaactctgttgttttcgggacatcagcacaggaagttgtaaaagagatcagatttaggattgagcagaaaacaacgctgaccgccagtgccggaattgccccaaatacaatgttagctaaggtctgcagcgataaaaacaagccgaacggacaatatcaaattctgcccaatcgtcaggccgtgatggacttcataaaagatctcccgattaggaaagtgtcagggatcggcaaggtgactgagaagatgctgaaagccttaggcattataacttgcacagagctttaccagcaaagagctctgttaagtctgctgttttctgagacatcctggcactactttctccacatctccttaggcttaggaagcacacacctgacccgcgacggggagagaaaatccatgagcgtggaacgcacgttctccgagatcaataaggccgaagagcaatacagcttgtgtcaggagctatgttctgaattggctcaggacctacagaaggaacgccttaaggtatttgggtacctggtcttccctatgaagaggactggcaacaccaataagggagcccttcttgctttttaccgtttagaaaccaaaccgtgccaaccactcagtgttcattag

SEQ ID NO: 340373 - DNA, 426 bp, Artificial Sequence
  derived and/or modified sequence
atggattccactaaggaaaagtgtgactcctataaggatgatctgctgctgagaatgggattaaacgacaacaaagccggaatggaggggctcgataaggagaaaatcaataagattataatggaggccactaaagggtctaggttctacggtaatgagttgaaaaaagagaaacaagtgaaccagcgtatcgagaacatgatgcaacagaaggcacagattactagccagcagctcaggaaggctcagttgcaagtggataggttcgctatggagctggagcaatctcgcaacctctccaatacgatcgtgcatatagacatggatgccttctatgccgctgtcgaaatgagggataatcctgagctgaaagataagcctattgcggtggggtccatgagcatgctgtcaaccagtaattactag

SEQ ID NO: 340374 - DNA, 1419 bp, Artificial Sequence
  derived and/or modified sequence
atggatagtaccaaggaaaaatgcgactcttataaagacgatctcctgctccgaatgggcctcaacgacaacaaagccggtatggaagggctcgataaagagaagataaacaaaataattatggaagctacaaaggggtccaggttctacgggaatgaactgaagaaggaaaaacaggtcaatcagaggatcgagaacatgatgcagcagaaggctcaaataacttcacagcaactcaggaaggcacagctccaggttgatcggttcgcaatggagctcgagcagtcccgaaatcttagtaatacaattgtgcatattgatatggacgcgttttatgcagctgtcgaaatgcgggataatccggagcttaaagataaaccaatcgccgtgggctccatgtccatgctgtccacgtccaattatcacgccaggcgttttggagtgcgggcagccatgccaggcttcatagcaaagcgcctgtgccctcaactgataatagtgccgccaaatttcgataaataccgagctgtgtctaaggaggttaaggagattctggcagattacgatcctaacttcatggccatgagcctcgatgaagcctacctaaacatcacaaagcacttggaagagaggcagaattggccagaagacaagaggaggtacttcatcaagatgggaagctccgtagagaatgacaatccgggtaaggaggtgaacaagttgagtgaacacgaaaggagtatcagtccactcctcttcgaagagtcgcctagtgacgtccaaccaccaggtgaccccttccaggtgaacttcgaggaacagaacaatccccaaatactccagaatagcgttgtgttcggaacaagcgcccaagaagttgtgaaggagattagattccgaatagaacagaaaactactttaacagcgtctgccggtattgccccaaataccatgctggcgaaggtctgttccgataagaataagccaaatggccagtaccaaatactgcctaataggcaagcggtgatggattttatcaaagacctgcccatacggaaggtctcgggaatagggaaggtcacggagaagatgttgaaagctttagggataataacctgcactgagctttatcagcagcgcgcactactttccctgcttttctccgagacatcctggcactatttcctgcacattagtcttggcctgggctccacccacctgacacgcgacggagaacggaaaagcatgagcgtagaacgcactttttcagagatcaacaaggcggaagaacagtactcactgtgccaggaactgtgcagtgaactggctcaggacctgcaaaaggagcgcctcaaagtgctgtactttgatatggtgtcgctggtgttcaagttctttaacagcaagatgctgccgtag

SEQ ID NO: 340375 - DNA, 1386 bp, Artificial Sequence
  derived and/or modified sequence
atggacagcaccaaggagaagtgcgacagctacaaggacgacctgctgctgagaatgggcctgaacgacaacaaggccggcatggagggcctggacaaggagaagatcaacaagatcatcatggaggccaccaagggcagcagattctacggcaacgagctgaagaaggagaagcaggtgaaccagagaatcgagaacatgatgcagcagaaggcccagatcaccagccagcagctgagaaaggcccagctgcaggtggacagattcgccatggagctggagcagagcagaaacctgagcaacaccatcgtgcacatcgacatggacgccttctacgccgccgtggagatgagagacaaccccgagctgaaggacaagcccatcgccgtgggcagcatgagcatgctgagcaccagcaactaccacgccagaagattcggcgtgagagccgccatgcccggcttcatcgccaagagactgtgcccccagctgatcatcgtgccccccaacttcgacaagtacagagccgtgagcaaggaggtgaaggagatcctggccgactacgaccccaacttcatggccatgagcctggacgaggcctacctgaacatcaccaagcacctggaggagagacagaactggcccgaggacaagagaagatacttcatcaagatgggcagcagcgtggagaacgacaaccccggcaaggaggtgaacaagctgagcgagcacgagagaagcatcagccccctgctgttcgaggagagccccagcgacgtgcagccccccggcgaccccttccaggtgaacttcgaggagcagaacaacccccagatcctgcagaacagcgtggtgttcggcaccagcgcccaggaggtggtgaaggagatcagattcagaatcgagcagaagaccaccctgaccgccagcgccggcatcgcccccaacaccatgctggccaaggtgtgcagcgacaagaacaagcccaacggccagtaccagatcctgcccaacagacaggccgtgatggacttcatcaaggacctgcccatcagaaaggtgagcggcatcggcaaggtgaccgagaagatgctgaaggccctgggcatcatcacctgcaccgagctgtaccagcagagagccctgctgagcctgctgttcagcgagaccagctggcactacttcctgcacatcagcctgggcctgggcagcacccacctgaccagagacggcgagagaaagagcatgagcgtggagagaaccttcagcgagatcaacaaggccgaggagcagtacagcctgtgccaggagctgtgcagcgagctggcccaggacctgcagaaggagagactgaaggtggcccaggtggagtacagaagactgtag

SEQ ID NO: 340376 - DNA, 1470 bp, Artificial Sequence
  derived and/or modified sequence
atggacagcaccaaggagaagtgcgacagctacaaggacgacctgctgctgagaatgggcctgaacgacaacaaggccggcatggagggcctggacaaggagaagatcaacaagatcatcatggaggccaccaagggcagcagattctacggcaacgagctgaagaaggagaagcaggtgaaccagagaatcgagaacatgatgcagcagaaggcccagatcaccagccagcagctgagaaaggcccagctgcaggtggacagattcgccatggagctggagcagagcagaaacctgagcaacaccatcgtgcacatcgacatggacgccttctacgccgccgtggagatgagagacaaccccgagctgaaggacaagcccatcgccgtgggcagcatgagcatgctgagcaccagcaactaccacgccagaagattcggcgtgagagccgccatgcccggcttcatcgccaagagactgtgcccccagctgatcatcgtgccccccaacttcgacaagtacagagccgtgagcaaggaggtgaaggagatcctggccgactacgaccccaacttcatggccatgagcctggacgaggcctacctgaacatcaccaagcacctggaggagagacagaactggcccgaggacaagagaagatacttcatcaagatgggcagcagcgtggagaacgacaaccccggcaaggaggtgaacaagctgagcgagcacgagagaagcatcagccccctgctgttcgaggagagccccagcgacgtgcagccccccggcgaccccttccaggtgaacttcgaggagcagaacaacccccagatcctgcagaacagcgtggtgttcggcaccagcgcccaggaggtggtgaaggagatcagattcagaatcgagcagaagaccaccctgaccgccagcgccggcatcgcccccaacaccatgctggccaaggtgtgcagcgacaagaacaagcccaacggccagtaccagatcctgcccaacagacaggccgtgatggacttcatcaaggacctgcccatcagaaaggtgagcggcatcggcaaggtgaccgagaagatgctgaaggccctgggcatcatcacctgcaccgagctgtaccagcagagagccctgctgagcctgctgttcagcgagaccagctggcactacttcctgcacatcagcctgggcctgggcagcacccacctgaccagagacggcgagagaaagagcatgagcgtggagagaaccttcagcgagatcaacaaggccgaggagcagtacagcctgtgccaggagctgtgcagcgagctggcccaggacctgcagaaggagagactgaaggtgttcggctacctggtgttccccatgaagagaaccggcaacaccaacaagggcgccctgctggccttctacagactggagaccaagccctgccagcccctgagcgtgcactag

SEQ ID NO: 340377 - DNA, 426 bp, Artificial Sequence
  derived and/or modified sequence
atggacagcaccaaggagaagtgcgacagctacaaggacgacctgctgctgagaatgggcctgaacgacaacaaggccggcatggagggcctggacaaggagaagatcaacaagatcatcatggaggccaccaagggcagcagattctacggcaacgagctgaagaaggagaagcaggtgaaccagagaatcgagaacatgatgcagcagaaggcccagatcaccagccagcagctgagaaaggcccagctgcaggtggacagattcgccatggagctggagcagagcagaaacctgagcaacaccatcgtgcacatcgacatggacgccttctacgccgccgtggagatgagagacaaccccgagctgaaggacaagcccatcgccgtgggcagcatgagcatgctgagcaccagcaactactag

SEQ ID NO: 340378 - DNA, 1419 bp, Artificial Sequence
  derived and/or modified sequence
atggacagcaccaaggagaagtgcgacagctacaaggacgacctgctgctgagaatgggcctgaacgacaacaaggccggcatggagggcctggacaaggagaagatcaacaagatcatcatggaggccaccaagggcagcagattctacggcaacgagctgaagaaggagaagcaggtgaaccagagaatcgagaacatgatgcagcagaaggcccagatcaccagccagcagctgagaaaggcccagctgcaggtggacagattcgccatggagctggagcagagcagaaacctgagcaacaccatcgtgcacatcgacatggacgccttctacgccgccgtggagatgagagacaaccccgagctgaaggacaagcccatcgccgtgggcagcatgagcatgctgagcaccagcaactaccacgccagaagattcggcgtgagagccgccatgcccggcttcatcgccaagagactgtgcccccagctgatcatcgtgccccccaacttcgacaagtacagagccgtgagcaaggaggtgaaggagatcctggccgactacgaccccaacttcatggccatgagcctggacgaggcctacctgaacatcaccaagcacctggaggagagacagaactggcccgaggacaagagaagatacttcatcaagatgggcagcagcgtggagaacgacaaccccggcaaggaggtgaacaagctgagcgagcacgagagaagcatcagccccctgctgttcgaggagagccccagcgacgtgcagccccccggcgaccccttccaggtgaacttcgaggagcagaacaacccccagatcctgcagaacagcgtggtgttcggcaccagcgcccaggaggtggtgaaggagatcagattcagaatcgagcagaagaccaccctgaccgccagcgccggcatcgcccccaacaccatgctggccaaggtgtgcagcgacaagaacaagcccaacggccagtaccagatcctgcccaacagacaggccgtgatggacttcatcaaggacctgcccatcagaaaggtgagcggcatcggcaaggtgaccgagaagatgctgaaggccctgggcatcatcacctgcaccgagctgtaccagcagagagccctgctgagcctgctgttcagcgagaccagctggcactacttcctgcacatcagcctgggcctgggcagcacccacctgaccagagacggcgagagaaagagcatgagcgtggagagaaccttcagcgagatcaacaaggccgaggagcagtacagcctgtgccaggagctgtgcagcgagctggcccaggacctgcagaaggagagactgaaggtgctgtacttcgacatggtgagcctggtgttcaagttcttcaacagcaagatgctgccctag

SEQ ID NO: 340379 - protein, 422 aa, Artificial Sequence
  derived and/or modified sequence
MASNKFKRMLNRELTHLSEMSRSGNQVSEFISNTFLDKQHEVEIPSPTQKEKEKKKRPMSQISGVKKLMHSSSLTNSSIPRFGVKTEQEDVLAKELEDVNKWGLHVFRIAELSGNRPLTVIMHTIFQERDLLKTFKIPVDTLITYLMTLEDHYHADVAYHNNIHAADVVQSTHVLLSTPALEAVFTDLEILAAIFASAIHDVDHPGVSNQFLINTNSELALMYNDSSVLENHHLAVGFKLLQEENCDIFQNLTKKQRQSLRKMVIDIVLATDMSKHMNLLADLKTMVETKKVTSSGVLLLDNYSDRIQVLQNMVHCADLSNPTKPLQLYRQWTDRIMEEFFRQGDRERERGMEISPMCDKHNASVEKSQVGFIDYIVHPLWETWADLVHPDAQDILDTLEDNREWYQSTIPQSPSPAPDDPE

SEQ ID NO: 340380 - protein, 678 aa, Artificial Sequence [sequence omitted]

SEQ ID NO: 340381 - protein, 507 aa, Artificial Sequence
  derived and/or modified sequence
MASNKFKRMLNRELTHLSEMSRSGNQVSEFISNTFLDKQHEVEIPSPTQKEKEKKKRPMSQISGVKKLMHSSSLTNSSIPRFGVKTEQEDVLAKELEDVNKWGLHVFRIAELSGNRPLTVIMHTIFQERDLLKTFKIPVDTLITYLMTLEDHYHADVAYHNNIHAADVVQSTHVLLSTPALEAVFTDLEILAAIFASAIHDVDHPGVSNQFLINTNSELALMYNDSSVLENHHLAVGFKLLQEENCDIFQNLTKKQRQSLRKMVIDIVLATDMSKHMNLLADLKTMVETKKVTSSGVLLLDNYSDRIQVLQNMVHCADLSNPTKPLQLYRQWTDRIMEEFFRQGDRERERGMEISPMCDKHNASVEKSQVGFIDYIVHPLWETWADLVHPDAQDILDTLEDNREWYQSTIPQSPSPAPDDPEEGRQGQTEKFQFELTLEEDGESDTEKDSGSQVEEDTSCSDSKTLCTQDSESTEIPLDEQVEEEAVGEEEESQPEACVIDDRSPDT

SEQ ID NO: 340382 - protein, 129 aa, Artificial Sequence
  derived and/or modified sequence
MVFLPLKWSLATMSFLLSSLLALLTVSTPSWCQSTEASPKRSDGTPFPWNKIRLPEYVIPVHYDLLIHANLTTLTFWGTTKVEITASQPTSTIILHSHHLQISRATLRKGAGERLSEEPLQVLEHPRQE

SEQ ID NO: 340383 - DNA, 4656 bp, Artificial Sequence
  derived and/or modified sequence
ggctggaggtggctctacggcgtggtgagccaccaggatagcattaccaggttgatggaggtctccgtgaccgagtccggtgagattaaatctgtagatcctaggttgattcatgtgatgttaatggataactccgctcctcagagtgagggcggtacccttaaagccgttaagtcatctaagggcaagaaaaagcgggagagtatcgagggaaaagacggaagaaggcgcaagtcggccagcgattcagggtgcgatccagcctcaaagaagctgaagggggatagaggcgaggttgattccaacggtagcgatggcggtgaggctagtcggggcccctggaaaggagggaacgcaagcggcgaacctggtctggaccaacgggcgaaacagcctccgtctacctttgtccctcagattaacaggaacatccgtttcgccacatataccaaggagaatggtaggactttggttgtacaagacgagcctgtgggaggcgacactccagcttcatttacaccctattctaccgcaactggacagactcccctggcccccgaggtgggaggagccgaaaacaaggaggcaggcaagaccctcgagcaagtggggcagggtatagtagcaagcgcggcagtggtgactacggcttccagcactccaaataccgtccgcattagtgatacggggttggctgcaggaactgttccagaaaagcagaagggctcacgcagtcaggcaagtggcgagaactcacgcaactccattctcgcgtcctccggcttcggagcccccctcccaagttccagtcaacctctcacattcggctcgggccgctcacaatcaaatggggtccttgctacagagaataagcccttaggcttttcttttggatgtagcagtgctcaggaagcacagaaagatacagacctgtcaaaaaatttatttttccagtgcatgagccagactctcccaactagcaactacttcacaactgtgtctgagagcctcgcagacgatagttcgagcagggacagttttaaacagagtcttgagagcttatcctccggcctctgcaagggcaggagtgtcttgggcactgatacgaagcctgggtctaaagctggttcctcagtggacagaaaggtgccagccgaaagcatgcccacgctgacacccgccttcccccggagcctgttgaatgctcgcacaccagagaatcacgaaaatctctttctccagccaccaaagctgagccgggaggaacctagtaatccctttcttgcctttgtcgagaaggtggaacatagcccattctcatcttttgccagccaggcttccgggagctctagttctgctactacggtcacttctaaagtggccccctcatggcctgagagccactctagcgctgattctgcttctctggcaaagaagaaacccctcttcatcacaaccgactcgagtaagctggtaagtggcgtgctgggaagtgccctgactagcggagggccatccctcagcgcaatggggaacggccgatccagcagtcctacttctagtttgacgcagccaatagagatgccaacgttgagttcttctcctacagaagagcgaccaaccgtcgggccaggccagcaggacaacccccttctgaaaacattctcaaacgtcttcggacgccatagtggaggctttctctcatcccccgctgatttcagtcaagaaaataaggccccatttgaggccgtaaagagattttctctggatgagcggagcctcgcctgtcgtcaggacagcgattctagcactaattcagatctaagcgatctttctgattccgaggagcaactacaggccaagacaggattaaagggcatacccgaacacttgatgggaaagctcggaccaaacggagagcgtagcgcagagcttttactcgggaagtcaaagggaaaacaagctcctaagggccgtccgaggacggctcctttgaaggtagggcagagcgtgttaaaggacgtctcaaaagtgaagaagctgaaacaatcaggcgagccttttctccaagatggttcctgcataaacgtagcgccacacttgcataagtgcagagaatgccgcctggagagatacaggaaattcaaggagcaggagcaggacgacagcacagtcgcgtgtaggttctttcactttcgcaggttgatttttaccagaaaaggcgtgctgcgagtagaaggatttttgtcccctcaacaaagcgatccagatgctatgaacctctggatccccagctctagcctggcggagggcatcgaccttgagacatcaaaatacattttggctaacgtgggagaccagttctgtcaacttgtaatgagcgagaaagaggcaatgatgatggtcgagccccaccaaaaggtggcatggaaacgggccgtcaggggggtcagagaaatgtgtgatgtttgtgagaccacgctattcaacattcattgggtttgtagaaagtgtgggtttggggtatgtcttgactgctataggctgagaaagtcccgcccacggagcgaaacagaggagatgggtgacgaggaggtgttttcttggcttaagtgtgccaaaggacaaagtcacgagcccgaaaatttgatgcccacgcaaattattccgggaaccgcgctgtataacatcggagacatggtccacgcggcaaggggaaagtggggaattaaagccaattgcccctgcatttcccgtcagaacaaaagcgtgctgcgaccagctgttactaatggaatgtcgcagcttccctccatcaatccatcagcgagctctggaaacgagactaccttttcgggtggcggaggcccggcacctgtaaccaccccggagcctgatcacgtgccaaaggccgatagtactgacattcgcagcgaggaacctctgaaaacagattcgtctgcctcaaacagtaattcagagttaaaggcaattcggcctccctgtcccgatactgcccctccctcatcagctttgcattggttggcagacctggccactcagaaagcgaaggaggagaccaaggaggctggctcactgaggtctgtgttgaataaagaatcgcacagccctttcgggctggattccttcaatagcactgctaaggtctctccgctgactcctaagcttttcaactcactactacttggtcctaccgcttccaataacaaaacagaagggagttctctgcgagatctgttacattccggcccagggaaacttccacaaacccctctagacaccggtatcccattcccacccgtgttctcaacttctagcgctggcgtgaagtcaaaggctagtcttccgaacttccttgatcacattatagcatccgtggtcgagaataaaaagacgagcgacgccagtaaaagggcctgtaatctcacggatacacagaaggaggtcaaggaaatggtgatgggactgaacgtcctggatccccatacaagccattcttggctgtgtgatggtaggctcctgtgtctccatgacccgtccaacaagaacaattggaaaatttttagggaatgctggaaacagggacagccagtgttggtgtccggagtccataaaaaactcaagagcgagctgtggaagcctgaagccttcagtcaggaattcggagaccaggatgtggatcttgttaactgccggaactgcgctatcatcagtgatgtgaaggtgcgcgacttctgggatggtttcgagattatttgtaagaggttgcggagcgaggacggacagcccatggtattgaaactcaaagactggccacctggagaggattttagggatatgatgccaacacgcttcgaggacctcatggaaaatttgccactgccagaatacacgaaaagggacgggaggctcaacttggctagtaggctgccctcatactttgtaagacctgatctgggtcccaaaatgtacaacgcctatggccttatcacagcggaggaccgccgagtgggcacaactaacctccaccttgatgtgtctgacgcagtcaacgttatggtgtatgtcgggattcccatcggagaaggcgcccacgacgaagaggtgcttaagactatagacgagggcgacgcagatgaggtcactaaacagcgcatacacgacggtaaggagaaaccaggtgcactgtggcatatctatgcagccaaggatgctgaaaagattagagaattgttaagaaaagtgggcgaagaacagggtcaagagaatccgcctgatcacgacccgatacatgaccagtcttggtacctggaccagacattgagaaagcgcctctacgaggaatacggcgtgcaaggttgggctatcgtgcagttcctcggggacgccgtcttcattcctgcaggggctccccatcaggtccacaacctatactcctgcatcaaggttgccgaagacttcgtcagcccagaacatgtgaaacactgctttaggttgacgcaagagttcagacacctgtcaaatacccacaccaatcacgaggacaaattacaggtgaaaaacatcatatatcatgctgttaaggacgcggtgggcaccctgaaagctcacgaatctaaactagcaaggtcctag

SEQ ID NO: 340384 - DNA, 4656 bp, Artificial Sequence
  derived and/or modified sequence
ggctggcgctggctgtatggagtggtgagccaccaggacagcatcacccggctgatggaggtgtctgtgacagagagcggggagatcaagtctgtggaccccaggctcatccacgtgatgctgatggacaacagcgccccccagagcgagggcggcaccctgaaggctgtgaagagcagcaagggcaagaagaagcgggagagcattgagggcaaggatggaagaagaaggaagagcgccagtgacagcggctgtgaccctgccagcaagaagctgaagggggacagaggagaggtggacagcaatggaagtgatggaggagaggccagccggggcccctggaagggcggcaatgccagcggggagcccggcctggaccagagggccaagcagccccccagcacctttgtgccccagatcaacagaaacatccgctttgccacctacaccaaggaaaatggaagaaccctggtggtgcaggatgagcctgtgggcggggacaccccagccagcttcaccccctacagcacagccaccggccagacccccctggcccctgaggtgggcggcgctgagaacaaggaggccggcaagaccctggagcaggtgggccagggcatcgtggccagcgctgctgtggtgaccacagccagcagcacccccaacacagtgcgcatcagtgacaccggcctggccgccggcaccgtgcctgagaagcagaagggcagccgcagccaggccagcggggagaacagcagaaattccatcctggccagcagcggctttggagcccccctgcccagcagcagccagcccctgacctttggaagtggccgcagccagagcaatggagtgctggccacagagaacaagcccctgggcttctcctttggctgcagcagcgcccaggaggcccagaaggacacagacctgagcaagaacctcttcttccagtgcatgagccagaccctgcccaccagcaactacttcaccaccgtgtctgagagcctggctgatgacagcagcagccgggacagcttcaagcagagcctggagagcctgagcagcggcctgtgcaagggccgctctgtgctgggcacagacaccaagccaggcagcaaggccggcagctctgtggacaggaaggtgcctgctgagagcatgcccaccctgaccccagccttccccaggagcctgctgaatgcccggaccccagagaaccatgaaaatctcttcctgcagccccccaagctgagccgggaggagcccagcaaccccttcctggcctttgtggagaaggtggagcacagccccttcagcagctttgccagccaggccagcggcagcagcagcagcgccaccaccgtgaccagcaaggtggcccccagctggccagagagccacagcagcgctgacagcgccagcctggccaagaagaagcccctcttcatcaccacagacagcagcaagctggtgtctggagtgctgggcagcgccctgaccagcggcggccccagcctgagcgccatgggaaatggccgcagcagcagccccaccagcagcctgacccagcccatcgagatgcccaccctgagcagcagccccacagaggagcggcccaccgtgggccctggccagcaggacaaccccctgctgaagaccttcagcaatgtgtttggccgccacagcggcggcttcctgagcagccctgctgacttcagccaggagaacaaggccccctttgaagctgtgaagcgcttcagcctggatgagaggagcctggcctgccggcaggacagcgacagcagcaccaacagcgacctgagtgacctgagtgacagcgaggagcagctgcaggccaagacaggcctgaagggcatccctgagcacctgatgggcaagctgggccccaacggggagaggtctgctgagctgctgctgggcaagagcaagggcaagcaggcccccaagggccggcccaggacagcccccctgaaggtgggccagagcgtgctgaaggatgtgtccaaggtgaagaagctgaagcagagcggggagcccttcctgcaggacggcagctgcatcaacgtggccccccacctgcacaagtgccgggagtgccgcctggagcgctacaggaagttcaaggagcaggagcaggatgacagcacagtggcctgccgcttcttccacttcagaagactcatcttcaccaggaagggcgtgctgcgggtggagggcttcctgagcccccagcagagcgaccctgatgccatgaacctgtggatccccagcagcagcctggccgagggcatcgacctggagaccagcaagtacatcctggccaacgtgggggaccagttctgccagctggtgatgtctgagaaggaggccatgatgatggtggagccccaccagaaggtggcctggaagagagctgtgcggggcgtgcgggagatgtgtgatgtgtgtgagaccaccctcttcaacatccactgggtgtgcaggaaatgtggcttcggcgtgtgcctggactgctaccgcctgaggaagagccggcccaggagtgaaacagaggagatgggagatgaggaggtgttctcctggctgaagtgtgccaagggccagagccatgagcctgagaacctgatgcccacccagatcatccctggaacagccctgtacaacattggagacatggtgcatgctgcccggggcaagtggggcatcaaggccaactgcccctgcatcagccggcagaacaagtctgtgctgcggcctgctgtgaccaacggcatgagccagctgcccagcatcaaccccagcgccagcagtggaaatgagaccaccttcagcggcggcggcggccctgcccctgtgaccaccccagagccagaccacgtgcccaaggctgacagcacagacatccgctctgaggagcccctgaagacagacagcagcgccagcaacagcaacagcgagctgaaggccatccggcccccctgcccagacacagccccacccagcagcgccctgcactggctggccgacctggccacccagaaggccaaggaggagaccaaggaggccggcagcctgcggtctgtgctgaacaaggagagccacagccccttcggcctggacagcttcaacagcacagccaaggtgagccccctgacccccaagctgttcaacagcctgctgctgggccccacagccagcaacaacaagacagagggcagcagcctgcgggacctgctgcacagcggccctgggaagctgccccagacccccctggacaccggcatccccttcccccctgtgttcagcaccagcagcgctggggtgaagagcaaggccagcctgcccaacttcctggaccacatcatcgcctctgtggtggagaacaagaagaccagtgatgccagcaagagggcctgcaacctgacagacacccagaaggaggtgaaggagatggtgatgggcctgaatgtgctggacccccacaccagccacagctggctgtgtgatggccgcctgctgtgcctgcatgaccccagcaacaagaacaactggaagatcttccgggagtgctggaagcagggccagcctgtgctggtgtctggagtgcacaagaagctgaagtctgagctgtggaagccagaggccttcagccaggagtttggagaccaggatgtggacctggtgaactgcaggaactgtgccatcatcagtgatgtgaaggtgcgggacttctgggatggctttgagatcatctgcaagaggctgcggagtgaagatggccagcccatggtgctgaagctgaaggactggcccccaggagaggacttccgggacatgatgcccaccaggtttgaggacctgatggagaacctgcccctgcctgagtacaccaagagagatggccgcctgaacctggccagccggctgcccagctactttgtgcggccagacctgggccccaagatgtacaatgcctacggcctcatcacagctgaggaccggcgggtgggcaccaccaacctgcacctggatgtgtctgatgctgtgaatgtgatggtgtatgtgggcatccccatcggggagggcgcccatgatgaggaggtgctgaagaccattgatgaaggagatgctgatgaggtgaccaagcagagaattcatgatggcaaggagaagccaggggccctgtggcacatctatgctgccaaggatgctgagaagatccgggagctgctgaggaaggtgggggaggagcagggccaggagaaccccccagaccatgaccccatccatgaccagagctggtacctggaccagaccctgaggaagaggctgtatgaggagtatggagtgcagggctgggccatcgtgcagttcctgggagatgctgtgttcatcccagctggggccccccaccaggtgcacaacctgtacagctgcatcaaggtggccgaggactttgtgtccccagagcacgtgaagcactgcttccggctgacccaggagttccgccacctgagcaacacccacaccaaccacgaggacaagctgcaggtgaagaacatcatctaccacgctgtgaaggatgctgtgggcaccctgaaggcccacgagagcaagctggcccggagctag

SEQ ID NO: 340385 - DNA, 5983 bp, Artificial Sequence
  derived and/or modified sequence
ggctggaggtggctctatggtgttgtgagccatcaggactccatcactcgtcttatggaggtgtctgtaactgagagtggtgagatcaagtcggtagatcccagactaatccatgtgatgctgatggataattcagcgcctcaaagcgaggggggtacgttaaaagcagtaaaatcttccaaaggaaagaagaagagagaaagcatagaggggaaagatggccggaggaggaaaagtgcttcggactctgggtgtgaccctgcatcaaagaaattaaaaggagacaggggtgaagtagacagtaatgggagcgatggaggtgaggcaagccgagggccctggaaaggagggaatgccagtggagagccagggctggatcagagagccaagcagccaccgtctacatttgtcccccagataaaccgcaacattcgctttgccacttacaccaaagaaaacggcaggactctggtggtgcaggatgagcctgtaggtggggacacacctgcatctttcactccatattctacagccacaggtcagacacctttggccccagaggtgggtggagccgaaaacaaagaggcaggaaaaacactggaacaagttggccagggcatagtggcttccgcagctgtggtcactaccgccagctccaccccaaacacagtgaggatctcagacactggccttgcagcagggactgtgccagaaaaacagaaaggcagccggtcgcaggcctcgggagagaattcaagaaattctattctggcctcttctggatttggagcacctctccctagttcatcgcaacctttgacttttggaagtggaaggagccagtccaatggtgttctagccacagagaacaaacctttgggcttctcttttggctgtagctctgcacaagaggcacagaaagacactgatctctccaaaaacttgttttttcaatgcatgtcccaaactttacctaccagtaactacttcactactgtttcagagagtttggctgatgattcttctagtcgggactcattcaaacaaagccttgagagcctgagctcaggcctgtgtaaaggcagatccgttcttggaacagacactaagccaggctctaaggctggcagctctgtggaccggaaagtgcctgcagagtccatgcccaccctcactccagccttcccacggagcctcctaaatgcccgtaccccagagaatcatgaaaatctatttttacagccccccaaattgtcccgagaagagccttctaatcctttcctggcatttgtggagaaagttgaacacagccctttcagtagttttgcatctcaggcatcaggtagctcctcttctgctaccactgtcacctccaaggtggcacccagctggcccgagtctcactcctctgcagattcggcatctttagcaaagaagaaacccctcttcattacaactgactcctccaagctagtatctggtgttctgggctcagctcttaccagtgggggcccaagcctctctgccatggggaatggccgctccagctcgcccaccagcagcctcactcagcccattgagatgccaactctctcctctagccccacagaggagaggccaactgtggggcctgggcagcaggacaatcccctcctcaaaacctttagtaacgtctttggcaggcactcaggcggctttctgtcctccccggcagatttttcacaggagaacaaagctccttttgaagctgtgaaaaggttctcactggatgaacgaagcttggcttgcagacaagactcggactccagcaccaacagtgacctgtcagatttgagtgactctgaggagcagctgcaggctaagacaggcctgaagggaattccagagcacctgatggggaagctgggccccaatggggagcgcagtgctgagctgttgctgggcaaaagcaaagggaagcaggcccccaagggccggcctcggactgcccccctgaaagttggccagtcagtgctgaaagatgtaagcaaagtgaagaagctgaagcaatctggagagcccttcctgcaggatgggtcatgcatcaatgtggcacctcatctgcacaagtgtcgtgaatgccgcctggagcggtaccggaagtttaaggaacaggagcaagatgattctactgtagcctgccgtttctttcacttccggaggttgatcttcactcgaaaaggggtactccgtgtggaggggtttttaagcccccagcaaagtgaccctgatgccatgaacctgtggattccctcttcctccctagcagaagggatagatctagagacctcaaaatacatcctggccaatgttggggaccagttctgccagctcgtaatgtctgagaaggaggccatgatgatggtggagccacaccagaaagtggcatggaagcgagctgtgcgtggtgtacgggagatgtgtgatgtgtgtgaaacaactctcttcaacatccactgggtttgtcgcaaatgtggatttggggtctgccttgactgttaccggctcaggaaaagccggccacgcagtgagacagaagagatgggtgatgaagaagttttctcctggttgaagtgtgcaaagggacagtcccacgaaccagagaatctcatgcccacacaaattattcctggcacagctctttacaatattggagacatggtacatgctgcccggggcaagtggggaattaaagcaaactgcccttgtatcagtcgacagaacaaatctgtattgagacctgccgtcaccaatgggatgtcacagcttcctagcataaaccctagtgcctcttctggaaacgaaactaccttctctggtggaggaggaccggcaccagtaacaactccagagccggaccatgttcccaaagccgacagcactgacatcagatctgaagagcctctgaaaacagacagttcggcatcaaatagcaatagtgaactgaaagccatcaggcctccttgccctgacacggccccaccctcctccgccctgcactggttggcagatttagcaactcagaaggctaaagaagaaacaaaagaagcagggtccctgaggtcggtgctcaataaagagtctcattcaccctttgggctggactcgttcaactccactgcaaaggtctctccgctgactccaaagctttttaacagtctgttgctgggtcccactgcctccaacaacaaaaccgaagggtctagccttcgagacctccttcactccgggccgggaaaacttcctcaaacccccttggacacaggcataccctttcccccggtcttctctacatcctcagcaggagtgaagagcaaggccagcctacccaactttcttgaccacatcattgcctcagtggtagaaaataagaaaacctcagatgcttcaaagcgggcctgcaacttgactgatacccagaaggaagtgaaggagatggtgatggggttaaatgtgctagatccccatacttctcactcctggctttgtgatgggaggcttctgtgtctccatgaccccagcaacaaaaacaattggaagatcttccgggagtgttggaagcaaggtcagccagtgctggtttcgggggtacataaaaagctcaagtctgagctctggaagccagaagcctttagccaggaatttggagaccaggatgtagacttggtgaactgcaggaactgtgctataatttccgatgtgaaagttcgggatttctgggatggtttcgagatcatatgcaaacgactacggtcagaagatgggcagccaatggtgctcaaactcaaggactggcctcctggggaagattttcgagacatgatgccaaccaggtttgaagatctgatggagaaccttcctctgccagaatataccaaacgagatggcaggctcaatctggcctctaggctacctagctactttgtaaggcctgatctgggccccaagatgtacaacgcctatgggttgataacagcagaagatagaagagttggtacaacaaatcttcacttagatgtgtctgatgctgttaatgtgatggtgtatgttgggattcccatcggggagggtgctcatgatgaagaggtactcaagacaattgacgagggagatgccgatgaggtgacgaagcagaggattcatgatggaaaagagaagccaggtgctttatggcacatctatgcagccaaggatgcagagaagatccgggagctgctccgaaaggttggagaagaacaaggccaagagaacccccctgatcatgacccaattcatgaccaaagttggtacctggaccagaccctccgtaagcgactctatgaggagtatggcgtgcaaggctgggctattgtgcagttcctaggtgatgctgttttcatacctgctggagccccacaccaggttcacaatctatacagttgcataaaagtagcagaagactttgtatctccagaacatgtaaagcactgtttccgcctgactcaggaattcaggcatctctctaacactcatacaaatcatgaggataaactgcaggtgaagaacatcatttaccatgcagtgaaagatgcggttggcaccctcaaggctcatgaatccaaactggcaaggtcctaggcatggagaaactccaagctcctctgtgaagcaggtctttcactcacaacacttaacagggaacggcagggctctttgctggagcagaggcccttcacccagagccagtgtggtcagtattccaaactctccagccactctcttctacgctgcctcaacactgaaggttgacacaggaaagtcgtactgttcacacacacagtttgagactccaagccaagagtgccacatccctatcctgtggccttttggaaatccaaattgcctgaacatggcggggctttcctgcacattctcctgatttgagattcacgggcacacctttcttttcttttcctcttgtgcctagttaagtggaaatgtgtttggagataggggaaatcacataactggtacaagtatggggtaattgcttaaacatgcctggtggaagtctgatagcgtctctgcacgtgacctctgacaaagcccatcccaggagacggggtgaagctattccccacactctcctgtgaacactggagtcttgcaagacccagggagaacccactgcttttcccaggaggctccaggattaggaaatgtgtgtatttagtgaaaaataggtttgtagtgaaatagttactatttcatgaaagtagatatttttagaatttttgaaataccacagttgttttcctggattataaggaaaggcacattacatttagtcttcctttcgatataaaactctttgaagaaatatgatttttagaaatcagctacccattatagcacaaaatcagccaaagcagaatttttaaaaattggcttttttaggattctttttctccccctcccatcttagtcttaccttgagggaacagtcatatgagaaggaactttgtcacatctaagctgtggtgtgttccccatgtgtgtgtacaacactggtgactccaggaaccattttcacctattaccagtgttccctggggactcctcttaatgtttccaaatgggaaggacagttgatttccaacatgaggttttttgttttttatccagaaatattttcagcaaaactttccaactgagtggagtctgattaaggatttatttgaaaatggtgggattcattggcccataggtacattggaaaatgtatatctctccagctgtactgtagtgccctgcaggctgtttatatgttcacagttacttttttttttttttttaaataaaagtcatttaatgtagaatacttttaatttcactttctgtattttaattttgttgaagggctgattgggatttccatgttcttattaaaaatctaacaaatctg

SEQ ID NO: 340386 - DNA, 4656 bp, Artificial Sequence
  derived and/or modified sequence
ggctggcggtggctgtacggcgtggtgagccaccaggacagcatcacaaggttgatggaagtgtctgttacagagagcggtgaaattaagagcgtcgacccgcgactcatccatgtgatgcttatggataactcggcgccacagagtgagggcggcaccctgaaagctgtcaagagtagtaaaggcaagaagaagcgtgagagcattgaggggaaggatggaaggcgacggaagtccgcaagtgactcaggctgtgaccctgcctccaagaagctgaaaggggatcgaggcgaagtggacagcaacggttccgacggcggtgaggcctcacgcgggccatggaaaggaggaaacgcttctggcgaaccaggcttagaccagagagccaagcagcctccaagtacattcgttccccaaatcaaccgaaatataaggttcgcaacgtacactaaggagaacgggagaacactggtggtgcaggatgaacccgtcggaggcgatacacctgccagtttcacaccttattccacagcaactgggcagaccccgctggccccggaagtgggaggtgccgaaaataaggaggcagggaaaactttggagcaggtggggcagggcatcgtagctagtgccgccgtggtaaccacagcgtcctccacccccaataccgttcgcatttccgatactgggttggctgcaggaaccgtgcccgagaagcaaaaggggtcacgttcccaggctagcggcgaaaactctagaaacagcatcctggcgagcagcggttttggcgcacccctgccgtccagctcgcagccactaacgtttggctccggccgcagtcagagcaatggggtgctcgccaccgagaataagcctttaggttttagcttcgggtgcagtagcgcccaggaggcccaaaaagatacggacctgagtaagaaccttttcttccagtgcatgagccagactcttccaacatctaattactttacaactgtatcggagagcctggcagatgatagcagtagtcgcgactcctttaagcaaagtctggagtcactgtccagtggcctatgcaaggggcgcagcgttctggggactgacacaaaaccgggcagcaaggctggaagcagtgtcgaccgtaaggttccggccgaatccatgcccaccctgacaccagccttccctcgctcccttttgaacgcccggacacccgagaatcacgagaacctcttcctgcagccaccaaagctgagccgcgaagagccttctaacccatttctagccttcgttgagaaagttgaacattccccctttagctccttcgcaagccaggcttccggttccagctctagcgccacaacggtgaccagcaaggttgccccctcctggcccgagagccactcctccgccgatagtgcatcactggctaaaaagaagcccctattcattactacggacagcagcaagctcgtgagtggggtcctggggtcagcgttgactagcggcgggcctagtcttagtgcaatgggtaacggcaggtcctcttctcccacctcatctctgacccagcctatagagatgcccactctcagcagctccccaaccgaagagcggcccacagtggggcctgggcaacaggacaatccacttctcaagaccttttctaatgtctttggccggcactctggcggatttctatcctccccggccgacttctcccaagagaataaggccccttttgaagctgtaaaacgtttttctttagacgagcgatccctcgcgtgcagacaagacagtgattcttctaccaatagcgacctgtcagatctgtcagatagtgaggagcaactgcaggcaaaaacaggcctaaaggggatcccagagcacctgatggggaaactgggcccaaatggggaaaggtccgccgagctgttgttgggaaagagtaaaggcaagcaggcgccaaagggaagacctcggactgcgccgcttaaagtgggacagtcggtgctgaaggatgtgtcaaaagtcaagaagctcaagcagtcaggagaaccttttcttcaagatggcagttgtatcaatgttgctcctcacctgcacaaatgccgcgaatgtcggctagagaggtaccgcaaattcaaagagcaggagcaagacgactccaccgtggcctgtcggttttttcactttcgcaggctgatattcactaggaaaggggtcctccgggtagagggctttctgagcccccaacagtctgatccggatgctatgaatctttggataccgagcagctccctggcggaaggtattgaccttgagacgtctaagtatatcctagcaaatgtaggcgatcagttttgtcagctggttatgagtgaaaaagaagccatgatgatggtggagccgcaccagaaagtggcctggaagagagcagttcggggggtgcgggaaatgtgcgacgtctgcgaaaccacccttttcaacatccactgggtgtgccgcaaatgtgggtttggtgtttgtcttgattgttatcggctcaggaagtcccgaccacgtagcgagaccgaggagatgggcgacgaggaggtgttttcctggttgaaatgtgccaaaggccagtcacacgaacccgaaaatctcatgcccactcagatcattccgggcactgcattgtacaatattggcgatatggtccatgcggcccgtgggaaatgggggataaaggccaactgcccctgcatttccaggcagaacaaatccgtccttagacctgctgtcaccaacgggatgtcacagctgcctagcatcaacccctctgccagtagcggaaacgaaacaacgttctctggagggggcggtccagcccctgttacgacacctgagcctgaccacgtgccaaaggctgattctacagatatccggtcggaagaaccattgaagactgactcatctgcttcaaatagcaacagtgagctaaaggccatccgacctccttgtccggatactgccccgccaagtagcgcactgcactggctggccgaccttgccacccagaaagccaaagaagagacgaaggaagccggctcccttagaagcgtgctcaataaagaaagccacagtccattcggtttggatagcttcaattctacggcaaaggtaagtccactcacccctaaactttttaatagcctgctcctcggccctacggcctcaaataacaaaactgaagggtcatcgctccgcgacctattgcacagtggtccaggcaagctgccccaaacacctttggatacagggattcctttccctccggtgttttccactagcagtgccggagtgaaaagcaaggcttcacttcccaattttcttgaccatataatcgcttccgtcgtggagaataaaaagacttctgatgcttccaagcgcgcctgcaacctcactgacacccagaaggaggtgaaggaaatggtgatgggactgaacgtcttagatccacacacatcccactcatggctatgcgatggtcgcttgttatgcctgcacgacccgagcaacaaaaataattggaagatctttagggagtgctggaaacaaggtcaacctgttctggtttctggagtgcacaagaaactcaagtccgaactttggaagccagaagcgttctctcaagaattcggcgaccaagatgtggacctggtgaattgtcgtaactgcgcgatcattagcgatgtcaaggttagagacttctgggacggatttgagatcatctgcaagcgcctccgcagcgaagacggacagccaatggttctaaagctaaaggattggcccccaggggaagatttcagagatatgatgccaaccaggtttgaggatctcatggagaacctgcccctgcctgagtatactaaaagagatggacgtctcaatttggcgagccgccttccgagttactttgtgagacctgacctgggaccgaaaatgtataacgcttatggattaatcactgcagaagatcgaagagtgggcaccactaacctgcaccttgacgtatccgacgctgttaatgtcatggtgtacgtgggcataccaatcggggaaggcgcgcacgacgaagaggtgctgaaaaccatcgatgagggggacgcggacgaagtcacaaagcagcggatacatgacgggaaggagaaaccaggtgcgttatggcatatctatgccgccaaggatgccgagaaaattcgggagctgctgcgcaaagtcggagaagaacaaggacaggagaatccaccagatcacgatcccatccacgatcagagctggtatttagaccagactttgcggaaacgactctacgaggagtatggagtgcagggatgggcaatcgtccagtttctgggagatgccgtgttcattcctgcaggcgcaccccaccaggttcataacctgtactcctgtattaaggtggccgaggacttcgtgtcccctgaacatgtcaagcattgcttcagattgactcaggagttcaggcacctgtccaatactcacaccaaccatgaggacaagcttcaggtgaaaaatatcatttaccacgcggtgaaggacgcagtcggaactctgaaagctcacgaaagtaaactggctagatcttag

SEQ ID NO: 340387 - DNA, 4656 bp, Artificial Sequence
  derived and/or modified sequence
ggctggcggtggctgtatggcgtcgtcagtcaccaggactctattacccggctgatggaggtgtctgtgactgagtcaggtgagatcaaaagcgtggacccacgactaattcacgttatgcttatggataatagcgcccctcagagcgaagggggaactctgaaggccgtgaagtcatcaaaaggcaagaagaaacgagaaagcatcgaaggcaaggacgggcgtcggagaaaatccgccagtgacagcgggtgcgaccccgcttctaagaagttgaagggagatcgcggagaagtggactctaacgggagcgacggcggagaagcatctcgcggtccttggaagggcggtaacgcctccggagaaccgggtctggatcagagagccaagcaacccccaagcacttttgttcctcagataaatcgcaacattcgctttgccacttacaccaaggagaatggtagaaccctggtggtgcaagacgagccggtgggtggtgataccccagcttcttttacgccatacagtacagccacaggccaaactcctctcgctcccgaggtcggtggtgccgagaataaggaggccggtaagactttggagcaagtgggtcaggggatcgtggcatcagccgcagtcgtcaccaccgcaagctctactcccaacacagtgagaatcagcgatacagggctggccgcagggaccgtgccagagaaacagaaaggaagccgaagtcaggcttctggcgagaacagtcgcaattccatcctggccagtagtgggtttggcgctcccctgccgtctagtagccaacctttgacatttggtagcggtagatcacagagcaacggcgtcttggctactgagaacaagcccctcggtttctcctttgggtgtagctctgctcaggaggcccagaaagacacagacctgagcaagaacctcttcttccaatgtatgtcccagacattgcctacatccaattactttacaacagtatccgaatcacttgcagacgattcctcttcccgggattcttttaaacagtccctggaatctctgtcttcaggcctgtgcaagggtcgcagcgtcttaggtactgatacgaagccagggtcaaaggctggctcctctgtggatcggaaggtgcccgctgagagtatgcccaccctcaccccagcttttcccaggtcactgcttaacgccagaacacctgagaaccacgaaaatctgttcctgcagccacctaagctgtctagggaagaacctagcaatccttttcttgctttcgtggaaaaggtggagcactctccattttcgagcttcgcatcacaggccagcggatccagcagctctgcaacgactgtgacgtccaaagtggctccttcctggcctgagagccattctagtgctgacagtgccagcctggccaaaaaaaagccgctctttatcactaccgacagtagcaagctggtatctggcgtgcttggaagcgcacttacctccggtggacctagtctttctgctatgggaaatggcagatcttcctcccccaccagcagcctgacacagcccattgaaatgcccacattaagctcgtctccgacagaggaaaggcctacagtgggccctggccagcaggataatcctttgttgaaaactttttctaatgtgtttggaagacactctggaggattcttaagctccccggcagacttctcacaggaaaacaaggccccattcgaggctgtcaaaaggttcagcttggatgagaggtccctcgcttgtagacaggactctgatagtagcaccaattcagatctcagcgatttgtctgattctgaagagcaactccaggcaaagaccgggctgaaaggaatccctgaacacctaatgggaaaactgggacccaatggcgaacggtccgccgagctactcctcggcaaatcaaaggggaagcaggcaccaaagggacggcctcgcactgccccactgaaagttggccagagcgtcctgaaggatgtttcaaaggtcaagaagctgaaacagtccggagagccatttctccaggatggcagctgcattaatgtcgctccacacttgcacaagtgccgcgagtgcagacttgagagatatcggaaattcaaagaacaggagcaggatgattccacagtggcatgccgcttctttcactttcggaggctgatctttacacgaaagggggtcttgagggttgagggatttctcagccctcagcagagtgaccccgatgccatgaatctgtggataccctcttccagtctagcagagggaatcgatttggagacctcaaagtacatcctggctaacgttggggaccagttctgtcagttagtgatgtcagagaaggaagcaatgatgatggtagagccccatcagaaggtggcgtggaaacgtgccgtgaggggggtacgggagatgtgcgacgtttgcgaaacaaccctgttcaacattcactgggtgtgtcgtaagtgtgggtttggtgtgtgcctggactgttatagattgcgcaagagtaggcctaggagcgagaccgaagagatgggggatgaggaggtgttttcttggctgaaatgtgctaaagggcagtctcacgaacccgaaaacttgatgcctacccaaattatcccagggaccgccctgtacaatattggggatatggtgcatgcagctcgcggtaagtggggtatcaaggccaactgtccatgcatttctcgccagaacaagtcggtattaagacccgctgtcaccaacggaatgagccagttaccttccatcaacccgtccgccagcagcggcaatgagaccacctttagtggtggcggtggccctgcccctgtgaccactcccgaacccgatcacgtaccaaaggccgattctacagatatcagatctgaggagcctctgaaaacagactcctccgccagcaattcaaactccgaacttaaggctatcagacctccatgtcctgataccgccccaccttcctccgctctgcactggttagctgatctggctactcagaaggccaaggaagagacgaaggaggctggaagtctgcggagtgttttaaacaaagaatcccattccccgttcggcttggactcattcaacagcaccgctaaagtgtctcccctgacaccaaaattatttaattctttgctgcttggccctacggccagcaacaacaagacagagggaagtagcctgagggaccttctgcattcgggaccgggaaaactaccgcagactcccctggacaccggtatcccatttccgccagttttcagtacgtcgtcagccggtgtgaagtccaaagcatcccttcctaacttcctcgatcatatcatagcctccgtggtggagaacaagaaaacttcggatgccagtaagagagcatgtaacctcacagatacccagaaagaggttaaggaaatggtaatgggactgaacgtgttggatccccacaccagccactcctggctctgtgacggacgtttgttgtgcttgcacgatccttcaaataagaacaactggaaaatttttagagaatgctggaaacaggggcagccagtgctggtgtcaggcgtgcacaagaaattaaagtccgagctttggaaacccgaggccttctcacaagaatttggagaccaggacgtggatctggtgaactgtaggaactgcgcaattataagcgacgtaaaggtccgagatttctgggatgggtttgagatcatatgtaaaagactgcgctccgaggacggacagcccatggtgttgaaactgaaagattggcccccaggggaagatttccgtgatatgatgccaactcggttcgaggatctcatggagaatctgcctctccccgagtatacgaagagggacggcaggctgaaccttgcatctagactccctagttacttcgtgcggccagacttaggtccaaagatgtataatgcctatggcctgattaccgccgaggataggagggtgggaacgaccaatctgcacttggacgtgtcagacgccgtgaacgttatggtttatgtgggaatcccgattggagaaggagcccatgatgaggaagttctgaaaactatagacgagggcgatgcagatgaagttaccaaacagcgcatacacgacggtaaggaaaagcctggagccctgtggcacatctacgcagccaaggacgcagaaaagatacgcgagttgttaaggaaagtgggtgaagaacaaggccaagagaatcctcctgaccacgatcccatccatgaccaatcctggtacctggatcagactttgagaaaaagactctatgaggaatacggcgtacaaggatgggcaatcgttcagtttctaggagatgctgtgttcatccccgcaggagctccccaccaggttcataacctatacagctgtattaaagtggcagaggatttcgtttctccagaacatgtgaagcactgtttcagactgacccaagaatttcgccacctttccaatactcataccaatcacgaggataagctgcaggtgaagaatatcatctaccacgccgtgaaagatgccgtcggaacactgaaagcacatgaatccaaactggcacggtcttag

SEQ ID NO: 340388 - DNA, 4656 bp, Artificial Sequence
  derived and/or modified sequence
ggctggagatggctgtacggcgtggtgagccaccaggacagcatcaccagactgatggaggtgagcgtgaccgagagcggcgagatcaagagcgtggaccccagactgatccacgtgatgctgatggacaacagcgccccccagagcgagggcggcaccctgaaggccgtgaagagcagcaagggcaagaagaagagagagagcatcgagggcaaggacggcagaagaagaaagagcgccagcgacagcggctgcgaccccgccagcaagaagctgaagggcgacagaggcgaggtggacagcaacggcagcgacggcggcgaggccagcagaggcccctggaagggcggcaacgccagcggcgagcccggcctggaccagagagccaagcagccccccagcaccttcgtgccccagatcaacagaaacatcagattcgccacctacaccaaggagaacggcagaaccctggtggtgcaggacgagcccgtgggcggcgacacccccgccagcttcaccccctacagcaccgccaccggccagacccccctggcccccgaggtgggcggcgccgagaacaaggaggccggcaagaccctggagcaggtgggccagggcatcgtggccagcgccgccgtggtgaccaccgccagcagcacccccaacaccgtgagaatcagcgacaccggcctggccgccggcaccgtgcccgagaagcagaagggcagcagaagccaggccagcggcgagaacagcagaaacagcatcctggccagcagcggcttcggcgcccccctgcccagcagcagccagcccctgaccttcggcagcggcagaagccagagcaacggcgtgctggccaccgagaacaagcccctgggcttcagcttcggctgcagcagcgcccaggaggcccagaaggacaccgacctgagcaagaacctgttcttccagtgcatgagccagaccctgcccaccagcaactacttcaccaccgtgagcgagagcctggccgacgacagcagcagcagagacagcttcaagcagagcctggagagcctgagcagcggcctgtgcaagggcagaagcgtgctgggcaccgacaccaagcccggcagcaaggccggcagcagcgtggacagaaaggtgcccgccgagagcatgcccaccctgacccccgccttccccagaagcctgctgaacgccagaacccccgagaaccacgagaacctgttcctgcagccccccaagctgagcagagaggagcccagcaaccccttcctggccttcgtggagaaggtggagcacagccccttcagcagcttcgccagccaggccagcggcagcagcagcagcgccaccaccgtgaccagcaaggtggcccccagctggcccgagagccacagcagcgccgacagcgccagcctggccaagaagaagcccctgttcatcaccaccgacagcagcaagctggtgagcggcgtgctgggcagcgccctgaccagcggcggccccagcctgagcgccatgggcaacggcagaagcagcagccccaccagcagcctgacccagcccatcgagatgcccaccctgagcagcagccccaccgaggagagacccaccgtgggccccggccagcaggacaaccccctgctgaagaccttcagcaacgtgttcggcagacacagcggcggcttcctgagcagccccgccgacttcagccaggagaacaaggcccccttcgaggccgtgaagagattcagcctggacgagagaagcctggcctgcagacaggacagcgacagcagcaccaacagcgacctgagcgacctgagcgacagcgaggagcagctgcaggccaagaccggcctgaagggcatccccgagcacctgatgggcaagctgggccccaacggcgagagaagcgccgagctgctgctgggcaagagcaagggcaagcaggcccccaagggcagacccagaaccgcccccctgaaggtgggccagagcgtgctgaaggacgtgagcaaggtgaagaagctgaagcagagcggcgagcccttcctgcaggacggcagctgcatcaacgtggccccccacctgcacaagtgcagagagtgcagactggagagatacagaaagttcaaggagcaggagcaggacgacagcaccgtggcctgcagattcttccacttcagaagactgatcttcaccagaaagggcgtgctgagagtggagggcttcctgagcccccagcagagcgaccccgacgccatgaacctgtggatccccagcagcagcctggccgagggcatcgacctggagaccagcaagtacatcctggccaacgtgggcgaccagttctgccagctggtgatgagcgagaaggaggccatgatgatggtggagccccaccagaaggtggcctggaagagagccgtgagaggcgtgagagagatgtgcgacgtgtgcgagaccaccctgttcaacatccactgggtgtgcagaaagtgcggcttcggcgtgtgcctggactgctacagactgagaaagagcagacccagaagcgagaccgaggagatgggcgacgaggaggtgttcagctggctgaagtgcgccaagggccagagccacgagcccgagaacctgatgcccacccagatcatccccggcaccgccctgtacaacatcggcgacatggtgcacgccgccagaggcaagtggggcatcaaggccaactgcccctgcatcagcagacagaacaagagcgtgctgagacccgccgtgaccaacggcatgagccagctgcccagcatcaaccccagcgccagcagcggcaacgagaccaccttcagcggcggcggcggccccgcccccgtgaccacccccgagcccgaccacgtgcccaaggccgacagcaccgacatcagaagcgaggagcccctgaagaccgacagcagcgccagcaacagcaacagcgagctgaaggccatcagacccccctgccccgacaccgccccccccagcagcgccctgcactggctggccgacctggccacccagaaggccaaggaggagaccaaggaggccggcagcctgagaagcgtgctgaacaaggagagccacagccccttcggcctggacagcttcaacagcaccgccaaggtgagccccctgacccccaagctgttcaacagcctgctgctgggccccaccgccagcaacaacaagaccgagggcagcagcctgagagacctgctgcacagcggccccggcaagctgccccagacccccctggacaccggcatccccttcccccccgtgttcagcaccagcagcgccggcgtgaagagcaaggccagcctgcccaacttcctggaccacatcatcgccagcgtggtggagaacaagaagaccagcgacgccagcaagagagcctgcaacctgaccgacacccagaaggaggtgaaggagatggtgatgggcctgaacgtgctggacccccacaccagccacagctggctgtgcgacggcagactgctgtgcctgcacgaccccagcaacaagaacaactggaagatcttcagagagtgctggaagcagggccagcccgtgctggtgagcggcgtgcacaagaagctgaagagcgagctgtggaagcccgaggccttcagccaggagttcggcgaccaggacgtggacctggtgaactgcagaaactgcgccatcatcagcgacgtgaaggtgagagacttctgggacggcttcgagatcatctgcaagagactgagaagcgaggacggccagcccatggtgctgaagctgaaggactggccccccggcgaggacttcagagacatgatgcccaccagattcgaggacctgatggagaacctgcccctgcccgagtacaccaagagagacggcagactgaacctggccagcagactgcccagctacttcgtgagacccgacctgggccccaagatgtacaacgcctacggcctgatcaccgccgaggacagaagagtgggcaccaccaacctgcacctggacgtgagcgacgccgtgaacgtgatggtgtacgtgggcatccccatcggcgagggcgcccacgacgaggaggtgctgaagaccatcgacgagggcgacgccgacgaggtgaccaagcagagaatccacgacggcaaggagaagcccggcgccctgtggcacatctacgccgccaaggacgccgagaagatcagagagctgctgagaaaggtgggcgaggagcagggccaggagaacccccccgaccacgaccccatccacgaccagagctggtacctggaccagaccctgagaaagagactgtacgaggagtacggcgtgcagggctgggccatcgtgcagttcctgggcgacgccgtgttcatccccgccggcgccccccaccaggtgcacaacctgtacagctgcatcaaggtggccgaggacttcgtgagccccgagcacgtgaagcactgcttcagactgacccaggagttcagacacctgagcaacacccacaccaaccacgaggacaagctgcaggtgaagaacatcatctaccacgccgtgaaggacgccgtgggcaccctgaaggcccacgagagcaagctggccagaagctag

SEQ ID NO: 340389 - protein, 361 aa, Artificial Sequence
  derived and/or modified sequence
MHGDYTLTLRKGGNNKLIKIFHRDGKYGFSDPLTFSSVVELINHYRNESLAQYNPKLDVKLLYPVSKYQQDQVVKEDNIEAVGKKLHEYNTQFQEKSREYDRLYEEYTRTSQEIQMKRTAIEAFNETIKIFEEQCQTQERYSKEYIEKFKREGNEKEIQRIMHNYDKLKSRISEIIDSRRRLEEDLKKQAAEYREIDKRMNSIKPDLIQLRKTRDQYLMWLTQKGVRQKKLNEWLGNENTEDQYSLVEDDEDLPHHDEKTWNVGSSNRNKAENLLRGKRDGTFLVRESSKQGCYACSVVVDGEVKHCVINKTATGYGFAEPYNLYSSLKELVLHYQHTSLVQHNDSLNVTLAYPVYAQQRR

SEQ ID NO: 340390 - protein, 137 aa, Artificial Sequence
  derived and/or modified sequence
MHGDYTLTLRKGGNNKLIKIFHRDGKYGFSDPLTFSSVVELINHYRNESLAQYNPKLDVKLLYPVSKYQQDQVVKEDNIEAVGKKLHEYNTQFQEKSREYDRLYEEYTRTSQEIQMKRTAIEAFNETIKIFEEQCQT

SEQ ID NO: 340391 - protein, 846 aa, Artificial Sequence
  derived and/or modified sequence
MFRRARLSVKPNVRPGVGARGSTASNPQRGRESPRPPDPATDSASKPAEPTDVPTVDFGGAEPQEKAPRSSTEKTGGDNDVEESSRSSSTVSQRRKRISSTSSLVKSSVSVPSESHPLSTINQEAPQPTATSTKEKQPCSDRYRIYKAQKLREMLKEELRKEKKQWKNKYAINESQRPPDRSKMTMRDFIYYLPDNNPMTSSLEQEKKTEKPSTPVQTREQEGKSTPNAEDNEMEEETDDGPLLVPRVKVAEDGSIILDEESLTVEVLRTKGPCVVEENDPIFERGSTTTYSSFRKNYYSKPWSNKETDMFFLAISMVGTDFSMIGQLFPHRARIEIKNKFKREEKTNGWRIDKAFQEKRPFDFDFFAHLLQKVLAEEEKRKQKSVKNHSLKEKKSTKPRKNVKVKKVACEGVNNDPDESMSSRISDTERSQKDAQTVEEESLTLSREDAEQVALEVDLNQKKRRRKKQDGANELGVNNLLENATVQAGPSKGEKHKNKCQAIRPELKEGECSKEQMLSCTQNIDGIVGFASTEKVEKRTDPILSLSNQQDATSVATESSESSTSDLPSFEVGIRALCEVNNAEGSCIEERNVDLKNNSLEIDQTENVKPMLRGRFQRPKPNLSRAGKKSVLSQGKTESESKNSHSKTSVEKNHVEKDKMNTLDILRMETTERENPEAETVSVLGEKNCLQEGSQLKALRPVQVRGRLQKPKPNAGKAAERKEILISQEEIGANVEKNENESCADRDTPQHMEDQSRKDFEEEDVILQPEKNDSFQNVQPDEPKVLNECLSVQENNKANKLNQVPILRTRFQKPKPNIGRGTGRREISSKEEVLEKILSLGKWRQH

SEQ ID NO: 340392 - protein, 715 aa, Artificial Sequence
  derived and/or modified sequence
MSVNISTAGKGVDPNTVDTYDSGDDWEIGVGNLIIDLDADLEKDRQKFEMNNSTTTTSSSNSKDCGGPASSGAGATAALADGLKFASVQASAPQGNSHKETSKSKVKRSKTSKDANKSLPSAALYGIPEISSTGKRQEVQGRPGEATGMNSALGQSVSSGGSGNPNSNSTSTSTSAATAGAGSCGKSKEEKPGKSQSSRGAKRDKDAGKSRKDKHDLLQGHQNGSGSQAPSGGHLYGFGAKSNGGGASPFHCGGTGSGSVAAAGEVSKSAPDSGLMGNSMLVKKEEEEEESHRRIKKLKTEKVDPLFTVPAPPPPISSSLTPQILPSYFSPSSSNIAAPVEQLLVRTRSVGVNTCEVGVVTEPECLGPCEPGTSVNLEGIVWHETEEGVLVVNVTWRNKTYVGTLLDCTKHDWAPPRFCESPTSDLEMRGGRGRGKRARSAAAAPGSEASFTESRGLQNKNRGGANGKGRRGSLNASGRRTPPNCAAEDIKASPSSTNKRKNKPPMELDLNSSSEDNKPGKRVRTNSRSTPTTPQGKPETTFLDQGCSSPVLIDCPHPNCNKKYKHINGLRYHQAHAHLDPENKLEFEPDSEDKISDCEEGLSNVALECSEPSTSVSAYDQLKAPASPGAGNPPGTPKGKRELMSNGPGSIIGAKAGKNSGKKKGLNNELNNLPVISNMTAALDSCSAADGSLAAEMPKLEAEGLIDKKNLGDKE

SEQ ID NO: 340393 - DNA, 4726 bp, Artificial Sequence
  derived and/or modified sequence
gtgagcagcggcggcagcggcaacccaaacagcaatagtaccagcaccagcacctctgccgccaccgcgggggcaggctcctgtgggaaaagcaaagaggagaagccaggttgaccccctgtttacagtgccagcgccaccaccgccgatttccagcagtctcacgcctcagattctaccctcctacttttccccatcttcatccaatattgcagcaccggttgaacagcttttggttcggactcgttctgtgggtgtcaatacatgtgaagttggagtagtgacagagccagagtgtcttgggccctgtgaacctgggaccagtgtgaatttggaagggatcgtgtggcatgaaacagaagaaggtgtcctagtggtcaatgtcacgtggaggaacaaaacgtacgtgggaaccctactggactgcaccaagcacgactgggcccctcccaggttttgtgagtcaccgacaagtgacctggagatgagagggggccggggcagagggaagagagcgaggtctgctgctgctgccccgggctccgaggccagcttcacagagtccagagggctgcagaataagaacagagggggggccaatgggaaagggaggcggggcagcctcaatgccagcggacgaaggacacccccaaattgtgctgctgaggatatcaaagccagcccttcctccaccaacaaaaggaaaaacaagcctccaatggagctggacctgaactccagctctgaggacaataagcctggaaagcgtgtccgcacaaattccagaagcactcccactacccctcaagggaaaccagagactacttttttggaccaaggctgctcttctccagtgttaatcgactgtccccacccaaactgcaacaaaaagtacaagcacattaacggcctgaggtaccaccaggctcatgcacacttagacccagaaaacaagctggagttcgagcctgacagtgaggacaagatctcggactgtgaggaaggattgagtaatgtggcacttgaatgcagtgagccaagcacaagtgtatctgcttatgaccagttgaaggcaccggcatcccctggtgctggaaacccacctgggaccccaaagggaaagagagagctgatgagcaatggcccaggttccattattggtgctaaagctgggaagaattctggcaaaaagaagggccttaacaatgaactgaacaaccttccagtaatctccaacatgacggctgcgttagacagttgctcggcagcagacggcagtttggctgctgagatgcctaaactggaagcagaaggattaattgacaagaaaaatttaggagataaagaaaagggcaaaaaagctaccaactgcaaaacggacaaaaacctctctaaactgaaaagtgcccggcccattgcccctgccccagcccccactcccccgcagctaatcgctatacccactgcaacctttacaacgaccaccactgggacaatacccggactgccctccctcacaacaactgttgttcaggctacaccaaagagtcctccgttaaaacccattcaaccaaagcccacaattatgggagagcccatcaccgtgaacccagctctggtgtcactcaaagacaaaaagaaaaaggagaagcgaaagctaaaggacaaagaagggaaagagacgggaagcccaaaaatggatgccaagctggggaaactagaggactccaagggggccagcaaagatttacctgggcattttttaaaggatcatctcaacaagaatgaagggctggcaaatggactgtcggagtctcaggagagccgcatggccagtatcaaagctgaggccgataaggtttacactttcacagacaacgctcccagcccttccatagggagcgcctcgaggctggaatgcagcactttggtgaacgggcaggcaccaatggcacctctgcatgtgttgacccagaatggggcagagagttcagctgcaaagacaagcagcccggcctattcagacatatctgatgctgctgacgatggtggttctgacagcaggtcggagggtatgagatcaaaggccagttccccatcagatattatttctagtaaggacagtgttgtaaaagggcattcttcaactacagcacaatcatctcaactgaaagagtcccattctccctattaccacagctatgatccttattattctccaagttacatgcaccctgggcaggtcggtgcccctgcagctggaaatagtgggagcacgcagggaatgaagatcaagaaggagtctgaggaagatgctgaaaagaaagacaaggcagagcagttagattctaagaaagtggaccacaattctgcatccttacagcctcagcaccagtcggtgatcacacaaagacatcctgccctggctcagtcactttattatggccagtatgcatatgggctctatatggaccagaagtctctgatggccaccagccctgcctatagacagcagtatgagaagtactatgaggaccagaggctggcagagcagaaaatggcccagactgggagaggagactgtgaaaggaaaagtgagctccccttgaaagagctgggcaaggaggaaactaaacagaaaaatatgccatcggccacaatctcaaaagctccctctactccggagcctaacaaaaaccattctaaactagggccatcagtgcctaataaaactgaggagacaggtaaatcgcagcttctctccaatcaccagcagcagcttcaggccgacagcttcaaagctaagcagatggaaaaccaccagcttattaaggaggctgtagaaatgaagtctgtcatggactctatgaagcagacaggtgtagacccaacctcgagatttaaacaagacccagattcaagaacatggcatcattatgtataccagcccaaatatctggatcagcaaaagtcagaagaacttgatagagagaagaaattaaaagaggatagtccgaggaaaactcctaataaagagagtggtgtgcccagccttcctgtatcgttaacaagcattaaagaggagcccaaagaggccaagcatcctgattctcaatcaatggaggagagcaagctgaaaaatgatgatcgaaagactcctgtgaactggaaggactctcggggaacaagagtggctgtctcctcacccatgagtcagcatcagtcatacatacagtacttgcatgcttatccttacccacagatgtacgaccccagccatcctgcataccgggctgtttctcccgtcctaatgcacagttatcctggggcatatctctctccaggatttcattatcctgtttatgggaagatgtcagggagagaagagacagagaaagtcaataccagccctagcgtcaacacgaaaacaaccactgaatctaaagcactggatttgctccagcagcatgctaaccaataccgcagcaagtctcctgctcctgtggaaaaggctacagctgagcgggaacgggaggcagaaagggaaagggatcgccactcccccttcggccagcggcacctgcacacgcaccaccacacccacgttggcatgggttacccgctaatcccgggtcaatatgacccttttcaaggcttgacctctgctgcccttgttgcctctcagcaggtggctgcccaggcatctgcatctggaatgtttcctggacaaagaagagaataacaagattggacatgtacattgtcatgtgactggatcacatggggaagcgctttatacagacatcagttccatggtgttaatttgaaatgccttaatggcaggcaaaaaccagtcatttcatttttgtaaattacagattttatcacagagtaacaaatgttgctgtaattaaacttctgttttatatatatatacgtatacatatctgtatatatacatatatatatatataaatataaatatattctttactttttgtatcagtaaccaggctcgcacacacagggtctgctgccacgtcgcaaaccactcagtaaaggaaattaaaaatgtatttgtcatgttaaaaagtgttagccacaaaaggctacttactttcttttccttttcctttaaaattgtaaataaataatgttatgtatcagtgtgcctgaaccttgcatatccttcacatatttcccataagcccctcagaaaggctaactgtgatgatgacactttggtacaatttagatgtctatttggtggctcctgttaaagacgcaccagtgtaaaatgttcctgtagtcactgtttgtacttgtgtattgtggaaaaagtacttttggaaggcatggggttgccagtaccacaaaaactgtgttgtatataatgtaaagattaaaatggggaaataatgagcatctgtgaataatgaggtgtcattttttgataatcttgaatggcaaataacccaatagcctgcgtaccagagacatctgtgattgttctattacttgaatagttctacagtctttttttttttttaatgtttacaattatccagttttagaagagagagactttaacgccattgcctggttacttgttttatgctgtaatctagtttattttatgtaaaatgtatattgaatgctttccttttttatacctgccttaaataatttggcaatcagaattaaaaagtttttttttttttaaata

SEQ ID NO: 340394 - protein, 871 aa, Artificial Sequence
  derived and/or modified sequence
RGDASGWGCSEPGPGGPWGSRAGRVGQSRAGFNMMAAEAGSEEGGPVTAGAGGGGAAAGSSAYPAVCRVKIPAALPVAAAPYPGLVETGVAGTLGGGAALGSEFLGAGSVAGALGGAGLTGGGTAAGVAGAAAGVAGAAVAGPSGDMALTKLPTSLLAETLGPGGGFPPLPPPPYLPPLGAGLGTVDEGDSLDGPEYEEEEVAIPLTAPPTNQWYHGKLDRTIAEERLRQAGKSGSYLIRESDRRPGSFVLSFLSQMNVVNHFRIIAMCGDYYIGGRRFSSLSDLIGYYSHVSCLLKGEKLLYPVAPPEPVEDRRRVRAILPYTKVPDTDEISFLKGDMFIVHNELEDGWMWVTNLRTDEQGLIVEDLVEEVGREEDPHEGKIWFHGKISKQEAYNLLMTVGQVCSFLVRPSDNTPGDYSLYFRTNENIQRFKICPTPNNQFMMGGRYYNSIGDIIDHYRKEQIVEGYYLKEPVPMQDQEQVLNDTVDGKEIYNTIRRKTKDAFYKNIVKKGYLLKKGKGKRWKNLYFILEGSDAQLIYFESEKRATKPKGLIDLSVCSVYVVHDSLFGRPNCFQIVVQHFSEEHYIFYFAGETPEQAEDWMKGLQAFCNLRKSSPGTSNKRLRQVSSLVLHIEEAHKLPVKHFTNPYCNIYLNSVQVAKTHAREGQNPVWSEEFVFDDLPPDINRFEITLSNKTKKSKDPDILFMRCQLSRLQKGHATDEWFLLSSHIPLKGIEPGSLRVRARYSMEKIMPEEEYSEFKELILQKELHVVYALSHVCGQDRTLLASILLRIFLHEKLESLLLCTLNDREISMEDEATTLFRATTLASTLMEQYMKATATQFVHHALKDSILKIMESKQSCELSSSKLQKA

SEQ ID NO: 340395 - DNA, 2616 bp, Artificial Sequence
  derived and/or modified sequence
agaggcgacgccagcggctggggctgcagcgagcccggccccggcggcccctggggcagcagagccggcagagtgggccagagcagagccggcttcaacatgatggccgccgaggccggcagcgaggagggcggccccgtgaccgccggcgccggcggcggcggcgccgccgccggcagcagcgcctaccccgccgtgtgcagagtgaagatccccgccgccctgcccgtggccgccgccccctaccccggcctggtggagaccggcgtggccggcaccctgggcggcggcgccgccctgggcagcgagttcctgggcgccggcagcgtggccggcgccctgggcggcgccggcctgaccggcggcggcaccgccgccggcgtggccggcgccgccgccggcgtggccggcgccgccgtggccggccccagcggcgacatggccctgaccaagctgcccaccagcctgctggccgagaccctgggccccggcggcggcttcccccccctgcccccccccccctacctgccccccctgggcgccggcctgggcaccgtggacgagggcgacagcctggacggccccgagtacgaggaggaggaggtggccatccccctgaccgccccccccaccaaccagtggtaccacggcaagctggacagaaccatcgccgaggagagactgagacaggccggcaagagcggcagctacctgatcagagagagcgacagaagacccggcagcttcgtgctgagcttcctgagccagatgaacgtggtgaaccacttcagaatcatcgccatgtgcggcgactactacatcggcggcagaagattcagcagcctgagcgacctgatcggctactacagccacgtgagctgcctgctgaagggcgagaagctgctgtaccccgtggccccccccgagcccgtggaggacagaagaagagtgagagccatcctgccctacaccaaggtgcccgacaccgacgagatcagcttcctgaagggcgacatgttcatcgtgcacaacgagctggaggacggctggatgtgggtgaccaacctgagaaccgacgagcagggcctgatcgtggaggacctggtggaggaggtgggcagagaggaggacccccacgagggcaagatctggttccacggcaagatcagcaagcaggaggcctacaacctgctgatgaccgtgggccaggtgtgcagcttcctggtgagacccagcgacaacacccccggcgactacagcctgtacttcagaaccaacgagaacatccagagattcaagatctgccccacccccaacaaccagttcatgatgggcggcagatactacaacagcatcggcgacatcatcgaccactacagaaaggagcagatcgtggagggctactacctgaaggagcccgtgcccatgcaggaccaggagcaggtgctgaacgacaccgtggacggcaaggagatctacaacaccatcagaagaaagaccaaggacgccttctacaagaacatcgtgaagaagggctacctgctgaagaagggcaagggcaagagatggaagaacctgtacttcatcctggagggcagcgacgcccagctgatctacttcgagagcgagaagagagccaccaagcccaagggcctgatcgacctgagcgtgtgcagcgtgtacgtggtgcacgacagcctgttcggcagacccaactgcttccagatcgtggtgcagcacttcagcgaggagcactacatcttctacttcgccggcgagacccccgagcaggccgaggactggatgaagggcctgcaggccttctgcaacctgagaaagagcagccccggcaccagcaacaagagactgagacaggtgagcagcctggtgctgcacatcgaggaggcccacaagctgcccgtgaagcacttcaccaacccctactgcaacatctacctgaacagcgtgcaggtggccaagacccacgccagagagggccagaaccccgtgtggagcgaggagttcgtgttcgacgacctgccccccgacatcaacagattcgagatcaccctgagcaacaagaccaagaagagcaaggaccccgacatcctgttcatgagatgccagctgagcagactgcagaagggccacgccaccgacgagtggttcctgctgagcagccacatccccctgaagggcatcgagcccggcagcctgagagtgagagccagatacagcatggagaagatcatgcccgaggaggagtacagcgagttcaaggagctgatcctgcagaaggagctgcacgtggtgtacgccctgagccacgtgtgcggccaggacagaaccctgctggccagcatcctgctgagaatcttcctgcacgagaagctggagagcctgctgctgtgcaccctgaacgacagagagatcagcatggaggacgaggccaccaccctgttcagagccaccaccctggccagcaccctgatggagcagtacatgaaggccaccgccacccagttcgtgcaccacgccctgaaggacagcatcctgaagatcatggagagcaagcagagctgcgagctgagcagcagcaagctgcagaaggcctag

SEQ ID NO: 340396 - DNA, 2616 bp, Artificial Sequence
  derived and/or modified sequence
cgaggggacgcttccggctggggctgtagcgaaccgggccctggtggaccatggggctctcgtgccggacgggttgggcagtctagagctggttttaacatgatggcagcagaggctgggagcgaagagggcggacccgtcactgcaggcgcaggcggcggaggggccgccgcaggatcctctgcttaccctgctgtttgccgcgtgaaaatccccgccgccttaccggtggccgccgccccttacccaggactggtggagactggtgttgcgggaacgttaggcgggggcgccgcactcggctctgaattcctgggcgctgggtccgtggcaggggctttgggaggggctggcctcacgggggggggaacggcagctggtgtggcaggcgctgcagccggtgtggccggcgcggcggtggctggccccagcggggacatggctctgacaaaattacctacttctcttcttgcagagaccttaggacccggaggagggttccctcccctgccacctcccccatacctcccacctttgggggctggcctcggcactgttgacgaaggagactcacttgatggtccagagtacgaagaagaggaagtcgcaataccgctaaccgccccccctactaaccagtggtaccacggcaaactagaccgtaccatagcggaagagcgcctcaggcaggcgggtaagagtggctcctatttaataagagaatcagacaggcgtcctgggagctttgttttaagttttctttcgcaaatgaacgtggtgaaccacttcaggataatagcgatgtgcggagattactatatcggcggacggcgttttagtagcttaagtgacctcatcgggtattattcacacgtgtcctgccttctgaaaggcgaaaaactgctctatcctgtggcccctcccgaacccgtagaggaccgtaggcgagtgagagctatacttccttatactaaggtgcccgacacagatgaaattagtttcttaaaaggagacatgtttatagtgcacaatgagttagaggacggatggatgtgggtcacaaaccttcgtaccgacgagcaggggctcatcgtggaagacctcgttgaagaggttggcagagaagaagacccccacgagggtaaaatttggtttcatggcaaaatctccaaacaggaagcctacaacctgctgatgaccgtcggtcaggtgtgctccttccttgtgcgcccctcggacaacacgcccggggactacagcctgtattttcgaacaaacgagaatatccagagatttaagatctgccctacacctaataatcagttcatgatgggaggaaggtactataatagcataggagacattatcgaccattatagaaaagaacagatcgtagaggggtattacctcaaggagcccgttcccatgcaggaccaggaacaagtgctaaatgacacagtcgatggaaaagagatctataatactataaggagaaagaccaaggacgccttttacaagaacatcgtgaaaaaaggctacctcctaaagaaaggtaaggggaaacgatggaagaacttatacttcatcctcgaagggagcgacgcacagcttatctatttcgaaagtgaaaagcgggctaccaaacctaagggactgatcgatctctccgtgtgcagcgtgtacgtggtccacgactccttgttcggaaggcctaactgttttcagattgttgtgcagcatttctccgaagaacactacattttttattttgccggcgaaacaccagaacaggcggaggactggatgaagggtctacaggctttttgcaacttgcggaaatcaagtcccggtacaagtaacaagcgccttcgccaggtaagctcactggtgctgcatatcgaggaggcgcataagctgcccgttaagcacttcaccaatccctactgcaatatctacctaaatagcgtccaggtggccaagacccatgcaagagagggccagaatcctgtatggagcgaagaattcgtctttgatgacctgccaccagacataaaccggtttgagattacactctccaacaaaactaagaaatccaaggacccagacatattattcatgagatgccaactgtcacgactacagaaaggccatgctacggacgagtggttcttgctgagctctcacattcctctaaagggaatcgagcctggatctctaagagttagagccagatactccatggagaaaattatgcccgaggaggagtactcagaatttaaggagttgattctgcagaaagagctgcatgttgtgtacgcgctcagccatgtgtgtgggcaggatagaacgctgttggcgtccatccttctcagaatttttctccacgaaaagctcgaatctcttcttctttgcacccttaacgacagagagatttctatggaggatgaggccaccaccctgtttcgcgcaacaaccctggcttctactctcatggaacagtacatgaaggccacggcaacacagttcgtccatcatgcgttgaaggacagcattctgaagatcatggagagtaagcagtcatgtgagctcagtagctccaaattgcaaaaagcttag

SEQ ID NO: 340397 - DNA, 2616 bp, Artificial Sequence
  derived and/or modified sequence
cggggagatgccagcggctggggctgcagcgagcccggccctgggggcccctggggcagccgggccggccgggtgggccagagccgggccggcttcaacatgatggctgctgaggccggcagcgaggagggcggccctgtgacagctggagctgggggcggcggcgctgctgctggcagcagcgcctacccagctgtgtgccgggtgaagatcccagctgccctgcctgtggccgccgccccctacccaggcctggtggagaccggggtggccggcaccctgggcggcggggccgccctgggcagcgagttcctgggcgccggctctgtggccggggccctgggcggggccggcctgaccggcggcggcacagctgctggggtggccggggctgctgctggggtggccggggctgctgtggccggccccagcggggacatggccctgaccaagctgcccaccagcctgctggccgagaccctgggccctgggggcggcttcccccccctgcccccaccaccctacctgccccccctgggcgccggcctgggcaccgtggatgaaggagacagcctggatggcccagaatatgaggaggaggaggtggccatccccctgacagccccacccaccaaccagtggtaccacggcaagctggacaggaccatcgccgaggagcggctgcggcaggccggcaagagcggcagctacctgatccgggagagtgaccggcggcccggcagctttgtgctgtccttcctgagccagatgaatgtggtgaaccacttccgcatcatcgccatgtgtggggactactacatcggcggccgccgcttcagcagcctgagtgacctgattggctactacagccacgtgtcctgcctgctgaagggggagaagctgctgtaccctgtggcccctcctgagcctgtggaggacagaagaagagtgcgggccatcctgccctacaccaaggtgcctgacacagatgagatctccttcctgaagggggacatgtttattgtgcacaatgagctggaggatggctggatgtgggtgaccaacctgaggacagatgagcagggcctcatcgtggaggacctggtggaggaggtgggccgggaggaggacccccatgagggcaagatctggttccacggcaagatcagcaagcaggaggcctacaacctgctgatgacagtgggccaggtgtgcagcttcctggtgcggcccagcgacaacacccctggggactacagcctgtacttccgcaccaatgaaaacatccagcgcttcaagatctgccccacccccaacaaccagttcatgatgggcggccgctactacaacagcatcggggacatcatcgaccactacaggaaggagcagatcgtggagggctactacctgaaggagcctgtgcccatgcaggaccaggagcaggtgctgaatgacacagtggatggcaaggagatctacaacaccatccggaggaagaccaaggatgccttctacaagaacatcgtgaagaagggctacctgctgaagaagggcaagggcaagcgctggaagaacctgtacttcatcctggagggcagtgatgcccagctgatctactttgagagcgagaagagggccaccaagcccaagggcctgattgacctgtctgtgtgcagcgtgtatgtggtgcatgacagcctgtttggccggcccaactgcttccagatcgtggtgcagcacttcagcgaggagcactacatcttctactttgctggggagaccccagagcaggccgaggactggatgaagggcctgcaggccttctgcaacctgaggaagagcagccctggcaccagcaacaagaggctgcggcaggtgagcagcctggtgctgcacatcgaggaggcccacaagctgcctgtgaagcacttcaccaacccctactgcaacatctacctgaacagcgtgcaggtggccaagacccacgcccgggagggccagaaccctgtgtggagcgaggagtttgtgtttgatgacctgcccccagacatcaacagatttgagatcaccctgagcaacaagaccaagaagagcaaggaccctgacatcctcttcatgcgctgccagctgagccggctgcagaagggccacgccacagatgagtggttcctgctgagcagccacatccccctgaagggcatcgagcccggcagcctgcgggtgcgggcccgctacagcatggagaagatcatgcctgaggaggagtacagcgagttcaaggagctgatcctgcagaaggagctgcacgtggtgtatgccctgagccacgtgtgtggccaggacaggaccctgctggccagcatcctgctgcgcatcttcctgcacgagaagctggagagcctgctgctgtgcaccctgaatgaccgggagatctccatggaggatgaggccaccaccctcttccgggccaccaccctggccagcaccctgatggagcagtacatgaaggccacagccacccagtttgtgcaccacgccctgaaggacagcatcctgaagatcatggagagcaagcagagctgtgagctgagcagcagcaagctgcagaaggcctag

SEQ ID NO: 340398 - DNA, 2616 bp, Artificial Sequence
  derived and/or modified sequence
cggggcgacgccagcggctggggctgcagcgagcccggccccggcggaccctgggggagccgggcaggtcgcgtaggccagagcagagccggcttcaacatgatggccgcagaggctggcagtgaggaggggggaccagtgactgctggagccggcggaggaggcgccgccgcagggagctctgcttatcctgctgtgtgccgcgtcaagattcctgccgcattgccagtggctgctgctccataccccggcctggtggaaaccggggtggcaggcacattgggaggcggggccgccctcggatccgagtttctgggtgcgggatctgtagccggcgcgcttggaggcgccggattgacaggtggaggaacggctgccggagtagccggtgccgccgcaggggtggcaggcgcagctgtggccggaccaagtggggacatggctctgaccaagctgcctacctctctcctggctgaaacactgggacccggtggcgggttcccaccactgccgccacctccatatctgccgcccctaggcgccgggctggggactgttgacgaaggagattcgctggatggccccgaatacgaggaagaggaggtcgccatccctttgactgcgccccccactaatcaatggtaccacggtaaactggacaggaccatagcggaggaaaggcttagacaggccggtaagagcggaagttacctgatcagggagtcagatagacggcctggatcttttgttttgagcttcctgtctcaaatgaacgtggtgaatcacttccgaattatcgccatgtgcggcgactactacatcggcgggagacgattcagttccctgtccgacttaattggctactactctcacgtgtcctgcctgctgaaaggggaaaagctcctttatcccgtcgcgcccccggaaccggtcgaagaccggagaagggtgagagccattctgccatatacgaaagtgcccgacactgatgagatatcttttttgaagggcgacatgttcattgtgcataatgagttggaagacggatggatgtgggtgaccaatctgaggactgatgagcagggcctgatcgtagaggatctcgtggaggaagtcggtcgggaagaagatcctcacgaaggcaagatatggtttcatggtaagatttcgaaacaggaggcatacaatctcctgatgacggttggacaagtttgtagtttccttgtacgaccctccgacaataccccgggtgactatagcttatacttccgcaccaacgagaacatacagagatttaaaatctgccccacccctaacaatcagttcatgatgggcgggaggtattataatagtatcggtgacatcatcgaccattaccgcaaggaacaaatcgtggaaggctattacctaaaagagcccgtcccaatgcaggaccaggagcaggttctaaacgacacagtagatggaaaggagatctataacactataaggagaaagactaaagatgccttctacaagaatatcgtaaagaaaggatatttgctgaagaagggaaagggaaaacgttggaaaaatctgtactttatcctcgagggatctgatgcccagctgatctatttcgagagtgaaaagagagcgaccaagcccaagggcctgattgacctgagcgtgtgctccgtgtacgtagtacacgattctttatttggcagacctaattgcttccagatcgtcgtgcagcacttcagcgaggaacactatatcttttattttgcgggggagacccccgagcaagccgaagactggatgaaggggttgcaggcattctgtaatcttcggaaatcaagcccgggcaccagtaacaaacgcctcagacaagtgtcctccctggtgttgcacatcgaagaagcacataaactgcctgtgaagcacttcactaatccctactgcaacatttacctgaattccgttcaggtcgccaagacccacgcccgagaaggccaaaatcccgtgtggagcgaagagttcgttttcgacgatcttccaccagatatcaacagattcgaaattaccctttcaaataagactaagaaatctaaagatccagacattctcttcatgagatgccaactgtcccgcctccagaagggtcacgccactgacgagtggttcctgctaagtagtcacattcccctgaagggtatagagccaggatcgctacgcgtccgcgccagatactcaatggagaagattatgcccgaggaggaatactccgagtttaaggagcttatcttacagaaagagctgcatgttgtatacgctctctcccatgtgtgcggtcaggatcgtacattgttggcaagtatcctcctgcgaatcttcttacacgaaaaactggagtccttgctgctgtgtacgctcaatgacagagagatttccatggaggacgaggcaacgactctttttcgagccaccaccctggcttccactttaatggagcaatacatgaaggcgactgctacccagtttgtacaccacgctctgaaggatagcatccttaaaatcatggagagcaagcaatcttgtgagctcagctctagtaaactccagaaggcatag

SEQ ID NO: 340399 - DNA, 2616 bp, Artificial Sequence
  derived and/or modified sequence
agaggagacgccagcggttgggggtgcagcgaacctgggcctggtggcccttgggggtcgcgggctggcagggtagggcaatcaagggctggatttaacatgatggcggcagaggctggctccgaggagggcggacccgtgacagccggagcgggaggagggggtgccgcagcgggaagctccgcttatccagccgtgtgtagagttaagatacctgcggctctacctgtcgccgcagccccttaccctgggctcgtggagactggtgtggctggtactctggggggtggagcggcactggggagtgagttcttaggcgcaggctcagttgccggagctctcggtggtgccggtctgaccggagggggaacggccgcaggtgtcgccggagcggcagcaggagtggctggggctgccgtagctgggccaagcggagatatggctcttactaaactgcccactagcctgttggctgagactctggggccagggggaggatttcccccattaccgcctccgccatatcttccaccactcggggcaggactcggcactgtagatgagggagacagtcttgatggcccagagtatgaggaagaggaagtggccattcccttaactgccccacctaccaatcagtggtaccacggcaagttagatagaaccatcgccgaggagcggcttagacaagctggtaagtccggaagctacctgatccgagagtctgaccggagaccagggtcattcgtgctttcctttctcagccagatgaatgtggtgaatcatttcagaattattgcaatgtgcggggattattatattggagggcgaaggttttcatctctcagcgacctcatcggttactacagccacgtgagctgcctcttgaaaggcgagaagctgctttaccccgtcgcccctcccgagccggtggaggatcgcaggagagtgcgagctatcttgccctatacaaaggtgccggatacagacgaaatttcgttcttgaagggagacatgttcatcgtgcataacgaactggaggatggttggatgtgggtaactaacctgcgtaccgacgagcagggtttgattgtagaagacctggtggaagaggtaggcagggaggaggacccacacgaaggaaagatctggttccacggcaagatatccaaacaagaggcctacaatctgctgatgaccgttgggcaagtctgttccttcctggtgaggccatccgacaatacccctggtgattatagcctgtactttcgcaccaacgagaatatccagcgcttcaaaatatgccccacccctaacaaccagttcatgatgggtggacgctattacaatagtattggagacattatcgaccactaccgaaaggaacagattgtagaaggctattatctcaaggaacccgtccccatgcaggaccaggagcaggttctgaacgacacagtggacggtaaggagatatacaatacaatccgtcggaagactaaggacgcattttacaaaaacatcgtaaaaaagggctatctcctgaagaaagggaaaggcaaaagatggaaaaatctttacttcatcctggaaggttccgatgctcagctcatttacttcgagtccgagaaacgcgctacaaagccaaagggattgatcgatctcagcgtgtgctctgtgtacgtggtgcacgatagcctgtttggtcggcctaactgcttccaaattgtagtgcaacactttagcgaggagcactatattttctactttgccggtgaaacccctgaacaggctgaagactggatgaaaggactccaggctttttgcaacctgcgaaagtcgagccccggtacctccaataagagactccgccaagttagcagtctggtactccacattgaagaagcacacaaactgcctgtaaaacactttacaaacccgtattgcaacatctaccttaactccgtccaagtggccaaaactcacgctagggaaggacagaaccccgtgtggtccgaggaattcgtgttcgatgacctgcccccagatatcaatcgttttgagatcactctgagcaacaaaacaaaaaagagcaaagacccagacatcctgtttatgcggtgccagctgagccgtttgcagaaggggcatgccactgacgagtggtttttgctctcttcacatattccactgaagggcatagagcctggaagtctgcgggtgagagcccgttattccatggagaagattatgccagaagaggaatattcagaattcaaagaattaatcctgcaaaaagaactccacgtggtctacgctctgtcccacgtgtgcggtcaggatagaacactcctcgcgtcaatcctgctcagaatcttcctccacgagaaacttgaaagcctcctcctgtgcaccctgaatgacagagagattagcatggaggatgaggcaaccacactgttccgcgctaccacacttgcaagcacgctcatggagcaatatatgaaagctactgcaacgcagtttgttcatcatgcactgaaggactctatcctgaaaatcatggagtctaagcaatcttgcgagctcagcagcagcaagctgcagaaggcatag

SEQ ID NO: 340400 - DNA, 2701 bp, Artificial Sequence
  derived and/or modified sequence
agctggggagcctgggctgtggccctaggagggggcgcggcggcgggctctctccttttgttgttgtttcctcagcctggggagctgaaggggagacgcgtctgggtggggctgctcggagcccgggcctggtggcccctggggctcccgggcgggcagggtagggcagagtagagcgggcttcaacatgatggcggccgaggccggcagtgaggagggcggcccggtaacagccggagctggaggaggcggcgcggcagcgggctccagtgcctatcccgcagtgtgtcgggtgaagatacccgcggccctgcctgtggcagccgccccctatcctgggctggtggagaccggagtggctggaactctgggtggcggagccgctttggggtcagagttcctaggagccgggtctgtggcaggggcactggggggagctggactgacagggggaggtactgctgctggcgtagctggtgctgctgctggcgtggccggtgctgctgttgctggacctagtggagacatggctctcaccaaactgcccacttcgttgcttgctgagactctcgggccaggcggcggttttccccctctgccccctcccccttacctgccccctttgggggcgggcctcgggacagtggacgaaggtgactctctggatggaccagaatacgaggaggaagaggtggccataccgttgaccgctcctccaactaaccagtggtatcacggaaaacttgacagaacgatagcagaagaacgcctcaggcaggcagggaagtctggcagttatcttataagagagagtgatcggaggccagggtcctttgtactttcatttcttagccagatgaatgttgtcaaccattttaggattattgctatgtgtggagattactacattggtggaagacgtttttcttcactgtcagacctaataggttattacagtcatgtttcttgtttgcttaaaggagaaaaattactttacccagttgcaccaccagagccagtagaagatagaaggcgtgtacgagctattctaccttacacaaaagtaccagacactgatgaaataagtttcttaaaaggagatatgttcattgttcataatgaattagaagatggatggatgtgggttacaaatttaagaacagatgaacaaggccttattgttgaagacctagtagaagaggtgggccgggaagaagatccacatgaaggaaaaatatggttccatgggaagatttccaaacaggaagcttataatttactaatgacagttggtcaagtctgcagttttcttgtgaggccctcagataatactcctggcgattattcactttatttccggaccaatgaaaatattcagcgatttaaaatatgtccaacgccaaacaatcagtttatgatgggaggccggtattataacagcattggggacatcatagatcactatcgaaaagaacagattgttgaaggatattatcttaaggaacctgtaccaatgcaggatcaagaacaagtactcaatgacacagtggatggcaaggaaatctataataccatccgtcgtaaaacaaaggatgccttttataaaaacattgttaagaaaggttatcttctgaaaaagggcaaaggaaaacgttggaaaaatttatattttatcttagagggtagtgatgcccaacttatttattttgaaagcgaaaaacgagctaccaaaccaaaaggattaatagatctcagtgtatgttctgtctatgtcgttcatgatagtctctttggcaggccaaactgttttcagatagtagttcagcactttagtgaagaacattacatcttttactttgcaggagaaactccagaacaagcagaggattggatgaaaggtctgcaggcattttgcaatttacggaaaagtagtccagggacatccaataaacgccttcgtcaggtcagcagccttgttttacatattgaagaagcccataaactcccagtaaaacattttactaatccatattgtaacatctacctgaatagtgtccaagtagcaaaaactcatgcaagggaagggcaaaacccagtatggtcagaagagtttgtctttgatgatcttcctcctgacatcaatagatttgaaataactcttagtaataaaacaaagaaaagcaaagatcctgatatcttatttatgcgctgccagttgagccgattacagaaagggcatgccacagatgaatggtttctgctcagctcccatataccattaaaaggtattgaaccagggtccctgcgtgttcgagcacgatactctatggaaaaaatcatgccagaagaagagtacagtgaatttaaagagcttatactgcaaaaggaacttcatgtagtctatgctttatcacatgtatgtggacaagaccgaacactactggccagcatcctactgaggatttttcttcacgaaaagcttgaatcgttgttgttatgcacactaaatgacagagaaataagcatggaagatgaagccactaccctatttcgagccacaacacttgcaagcaccttgatggagcagtatatgaaagccactgctacacagtttgttcatcatgctttgaaagactctattttaaagataatggaaagcaagcagtcttgtgagcttagtagttccaagctacaaaaggca

SEQ ID NO: 340401 - protein, 350 aa, Artificial Sequence
  derived and/or modified sequence
MFHSSAMVNSHRKPMFNIHRGFYCLTAILPQICICSQFSVPSSYHFTEDPGAFPVATNGERFPWQELRLPSVVIPLHYDLFVHPNLTSLDFVASEKIEVLVSNATQFIILHSKDLEITNATLQSEEDSRYMKPGKELKVLSYPAHEQIALLVPEKLTPHLKYYVAMDFQAKLGDGFEGFYKSTYRTLGGETRILAVTDFEPTQARMAFPCFDEPLFKANFSIKIRRESRHIALSNMPKVKTIELEGGLLEDHFETTVKMSTYLVAYIVCDFHSLSGFTSSGVKVSIYASPDKRNQTHYALQASLKLLDFYEKYFDIYYPLSKLGMFKFHIIVFIFAHKTCFDLFPLSLSM

SEQ ID NO: 340402 - DNA, 1053 bp, Artificial Sequence
  derived and/or modified sequence
atgttccattcatcagctatggtcaatagtcatcgcaagcctatgttcaatatccatcgaggtttctattgcctgactgccattctaccccagatttgtatctgctcacagttttcagtcccatcatcttatcacttcacagaggatccaggggcctttccagtcgcgaccaacggtgagaggttcccatggcaggaattgagactcccttccgtggtaatccccctgcattacgacttgtttgtgcatccgaatctcacttcgctggactttgtcgcctccgaaaaaattgaagttctcgtcagcaacgctactcagtttatcatactgcattccaaagacctggagatcactaacgcgaccttgcagtcagaagaggacagccgatatatgaaacccggcaaggagctgaaggtgctctcatacccagcacatgaacagatcgctcttttggtaccggagaaactgaccccccacttgaagtactacgtggccatggattttcaggcaaagttgggggatggctttgagggtttctacaaaagcacctacaggacattgggcggggagactcgcatcctggccgtgacggactttgaacctacgcaagcaagaatggccttcccctgtttcgatgagccacttttcaaagccaacttctccatcaagattcgccgtgagagcaggcacattgccttgtctaacatgcctaaggtcaagaccatcgaattggagggcgggctgcttgaagaccacttcgagacgacagtaaaaatgagtacctatttggttgcatatatcgtgtgcgacttccatagcctaagcggtttcacgtcttctggggtaaaggtgtccatctacgcctccccggacaagaggaatcagacacactatgctctgcaagcttctttgaaactactggacttctacgagaagtatttcgacatttattatcctctcagtaaattgggaatgttcaagttccatataatcgtatttatttttgcccacaagacttgcttcgacttatttcccttaagtctcagtatgtag

SEQ ID NO: 340403 - DNA, 1053 bp, Artificial Sequence
  derived and/or modified sequence
atgttccacagcagcgccatggtgaacagccacaggaagcccatgttcaacatccaccggggcttctactgcctgacagccatcctgccccagatctgcatctgcagccagttctctgtgcccagcagctaccacttcacagaggaccccggggccttccctgtggccaccaacggggagcgcttcccctggcaggagctgcggctgcccagcgtggtgatccccctgcactatgacctgtttgtgcaccccaacctgaccagcctggactttgtggccagcgagaagattgaggtgctggtgtccaatgccacccagttcatcatcctgcacagcaaggacctggagatcaccaatgccaccctgcagagcgaggaggacagccgctacatgaagccaggcaaggagctgaaggtgctgagctacccagcccacgagcagatcgccctgctggtgcctgagaagctgaccccccacctgaagtactacgtggccatggacttccaggccaagctgggagatggctttgagggcttctacaagagcacctaccgcaccctgggcggggagacccgcatcctggccgtgacagactttgagcccacccaggccaggatggccttcccctgctttgatgagcccctcttcaaggccaacttcagcatcaagatcagaagagagagccgccacatcgccctgagcaacatgcccaaggtgaagaccatcgagctggagggcggcctgctggaggaccactttgagaccaccgtgaagatgagcacctacctggtggcctacatcgtgtgtgacttccacagcctgagcggcttcaccagcagcggcgtgaaggtgtccatctatgccagcccagacaagaggaaccagacccactacgccctgcaggccagcctgaagctgctggacttctatgagaagtactttgacatctactaccccctgagcaagctgggcatgttcaagttccacatcatcgtgttcatctttgcccacaagacctgctttgacctcttccccctgagcctgtccatgtag

SEQ ID NO: 340404 - DNA, 1053 bp, Artificial Sequence
  derived and/or modified sequence
atgttccacagcagcgccatggtgaacagccaccggaagcccatgttcaacatccataggggcttttactgtcttacagcaatactgcctcagatctgcatttgctcacagttttcagtgccttcatcgtaccatttcaccgaagaccccggagcattcccagtggccaccaacggagagaggtttccatggcaggagctgagattgccttccgtggtgattccactgcactacgacttgttcgtgcacccaaatctgaccagtctcgacttcgtggcttcggagaaaatagaggttctggtttccaatgcaacacagtttatcatcctccactccaaggatctggagatcacaaacgccactctgcagtccgaggaagactccagatacatgaagcctggcaaggaactgaaagtactctcataccccgcccacgagcagattgcactgcttgtcccagaaaaactaacgcctcatctgaaatactatgtggccatggattttcaagctaaattgggcgatgggtttgagggtttctacaagtctacctacaggacgttaggtggcgagactaggatcctagccgttaccgatttcgagccgactcaggctaggatggctttcccttgttttgacgagccactgtttaaggctaatttctctattaaaataagacgcgagtctcgacacattgcactgtccaacatgcctaaagtaaagacgatagaactggagggcggattactggaagatcattttgaaactactgtcaagatgtcaacatacctggtcgcctacattgtctgcgatttccactctctgagcgggttcacaagctcaggcgtgaaggtgtcaatctatgcaagccccgacaagcgcaatcagacacattacgcgctccaggcttcacttaagttactggatttctatgaaaagtacttcgacatttactatcctctgtccaaactcggcatgtttaagtttcatataatcgtctttatctttgcacataaaacctgtttcgaccttttcccattatccctttctatgtag

SEQ ID NO: 340405 - DNA, 1053 bp, Artificial Sequence
  derived and/or modified sequence
atgtttcacagttcagctatggttaattcacaccgaaagcctatgttcaacatccacaggggtttttactgtctcaccgccatcttgccacagatatgcatatgttcccagttcagcgtgccttcatcctatcattttaccgaggatccaggggcatttcccgtcgccacgaatggtgagcgctttccctggcaggaactgagactgccctcagtagtgatccctcttcactatgatttgttcgtacaccctaatctcacctcacttgatttcgtcgcttctgaaaagatcgaagtgttggtgtctaatgcaactcagttcataatcttgcactctaaagatttggaaattacaaacgctaccctgcagtccgaggaggattcccgctatatgaagccgggaaaagaattaaaggttttgagctaccccgctcatgagcaaatagcacttcttgtgccggaaaaattaaccccccatctgaagtattatgtcgccatggacttccaggctaaactgggcgatgggtttgaagggttttataaaagcacttacaggaccctcgggggtgaaacccggatactggccgtgacagactttgaaccgacccaagcacggatggcgttcccttgttttgatgaacccctgttcaaggccaacttttccatcaagatacggagggagagccgccacatcgccttgtcgaacatgcctaaagtgaaaaccatcgaactggaaggaggcctgttggaggatcacttcgaaaccacagttaagatgagcacatatttggtcgcgtatatagtgtgtgacttccatagcctctctggctttacaagtagcggagtgaaggtttcgatttatgcctctcccgacaaacgcaatcagacacactacgccttgcaagcttctctgaagttactagacttctacgagaaatattttgacatttactaccctctgagcaaattgggtatgtttaaattccatatcattgtgtttatttttgcacataaaacttgctttgacttatttcccctgagcctgtcaatgtag

SEQ ID NO: 340406 - DNA, 1053 bp, Artificial Sequence
  derived and/or modified sequence
atgttccacagcagcgccatggtgaacagccacagaaagcccatgttcaacatccacagaggcttctactgcctgaccgccatcctgccccagatctgcatctgcagccagttcagcgtgcccagcagctaccacttcaccgaggaccccggcgccttccccgtggccaccaacggcgagagattcccctggcaggagctgagactgcccagcgtggtgatccccctgcactacgacctgttcgtgcaccccaacctgaccagcctggacttcgtggccagcgagaagatcgaggtgctggtgagcaacgccacccagttcatcatcctgcacagcaaggacctggagatcaccaacgccaccctgcagagcgaggaggacagcagatacatgaagcccggcaaggagctgaaggtgctgagctaccccgcccacgagcagatcgccctgctggtgcccgagaagctgaccccccacctgaagtactacgtggccatggacttccaggccaagctgggcgacggcttcgagggcttctacaagagcacctacagaaccctgggcggcgagaccagaatcctggccgtgaccgacttcgagcccacccaggccagaatggccttcccctgcttcgacgagcccctgttcaaggccaacttcagcatcaagatcagaagagagagcagacacatcgccctgagcaacatgcccaaggtgaagaccatcgagctggagggcggcctgctggaggaccacttcgagaccaccgtgaagatgagcacctacctggtggcctacatcgtgtgcgacttccacagcctgagcggcttcaccagcagcggcgtgaaggtgagcatctacgccagccccgacaagagaaaccagacccactacgccctgcaggccagcctgaagctgctggacttctacgagaagtacttcgacatctactaccccctgagcaagctgggcatgttcaagttccacatcatcgtgttcatcttcgcccacaagacctgcttcgacctgttccccctgagcctgagcatgtag

SEQ ID NO: 340407 - DNA, 1275 bp, Artificial Sequence
  derived and/or modified sequence
attaaattcatgtattgaaaatattgttcagaccccatgtgacataactggagccagtgcagtgccatgaagaactacgagattagcctggatattaacttgtcttctagagaatagatttcatgttccattcttctgcaatggttaattcacacagaaaaccaatgtttaacattcacagaggattttactgcttaacagccatcttgccccaaatatgcatttgttctcagttctcagtgccatctagttatcacttcactgaggatcctggggctttcccagtagccactaatggggaacgatttccttggcaggagctaaggctccccagtgtggtcattcctctccattatgacctctttgtccaccccaatctcacctctctggactttgttgcatctgagaagatcgaagtcttggtcagcaatgctacccagtttatcatcttgcacagcaaagatcttgaaatcacgaatgccacccttcagtcagaggaagattcaagatacatgaaaccaggaaaagaactgaaagttttgagttaccctgctcatgaacaaattgcactgctggttccagagaaacttacgcctcacctgaaatactatgtggctatggacttccaagccaagttaggtgatggctttgaagggttttataaaagcacatacagaactcttggtggtgaaacaagaattcttgcagtaacagattttgagccaacccaggcacgcatggctttcccttgctttgatgaaccgttgttcaaagccaacttttcaatcaagatacgaagagagagcaggcatattgcactatccaacatgccaaaggttaagacaattgaacttgaaggaggtcttttggaagatcactttgaaactactgtaaaaatgagtacataccttgtagcctacatagtttgtgatttccactctctgagtggcttcacttcatcaggggtcaaggtgtccatctatgcatccccagacaaacggaatcaaacacattatgctttgcaggcatcactgaagctacttgatttttatgaaaagtactttgatatctactatccactctccaaactgggtatgttcaaattccacattattgtcttcatttttgctcataaaacttgctttgatctcttccctctttctctttctatgtgatttaaatgagcactgaggaattcagttagctcaggaaaaaataatttgttcctcagagatgattcttgagtgtagaaaataaaatatttatgacatgccc

SEQ ID NO: 340408 - protein, 461 aa, Artificial Sequence
  derived and/or modified sequence
MAPQSLPSSRMAPLGMLLGLLMAACFTFCLSHQNLKEFALTNPEKSSTKETERKETKAEEELDAEVLEVFHPTHEWQALQPGQAVPAGSHVRLNLQTGEREAKLQYEDKFRNNLKGKRLDINTNTYTSQDLKSALAKFKEGAEMESSKEDKARQAEVKRLFRPIEELKKDFDELNVVIETDMQIMVRLINKFNSSSSSLEEKIAALFDLEYYVHQMDNAQDLLSFGGLQVVINGLNSTEPLVKEYAAFVLGAAFSSNPKVQVEAIEGGALQKLLVILATEQPLTAKKKVLFALCSLLRHFPYAQRQFLKLGGLQVLRTLVQEKGTEVLAVRVVTLLYDLVTEKMFAEEEAELTQEMSPEKLQQYRQVHLLPGLWEQGWCEITAHLLALPEHDAREKVLQTLGVLLTTCRDRYRQDPQLGRTLASLQAEYQVLASLELQDGEDEGYFQELLGSVNSLLKELR

SEQ ID NO: 340409 - protein, 95 aa, Artificial Sequence
  derived and/or modified sequence
MAPQSLPSSRMAPLGMLLGLLMAACFTFCLSHQNLKEFALTNPEKSSTKETERKETKAEEELDAEVLEVFHPTHEWQALQPGQAVPAGSHVRLNL

SEQ ID NO: 340410 - protein, 163 aa, Artificial Sequence
  derived and/or modified sequence
MAPQSLPSSRMAPLGMLLGLLMAACFTFCLSHQNLKEFALTNPEKSSTKETERKETKAEEELDAEVLEVFHPTHEWQALQPGQAVPAGSHVRLNLQTGEREAKLQYEDKFRNNLKGKRLDINTNTYTSQDLKSALAKFKEGAEMESSKEDKARQAEVKRLFRP

SEQ ID NO: 340411 - protein, 123 aa, Artificial Sequence
  derived and/or modified sequence
MAPQSLPSSRMAPLGMLLGLLMAACFTFCLSHQNLKEFALTNPEKSSTKETERKETKAEEELDAEVLEVFHPTHEWQALQPGQAVPAGSHVRLNLQTGEREAKLQYEDKFRNNLKGKRLDINT

SEQ ID NO: 340412 - protein, 192 aa, Artificial Sequence
  derived and/or modified sequence
MAACFTFCLSHQNLKEFALTNPEKSSTKETERKETKAEEELDAEVLEVFHPTHEWQALQPGQAVPAGSHVRLNLQTGEREAKLQYEDKFRNNLKGKRLDINTNTYTSQDLKSALAKFKEGAEMESSKEDKMDNAQDLLSFGGLQVVINGLNSTEPLVKEYAAFVLGAAFSSNPKVQVEAIEGGALQKLLVIL

SEQ ID NO: 340413 - DNA, 1895 bp, Artificial Sequence
  derived and/or modified sequence
ctggaattgtgggagttgtgtctgccactcggctgccggaggccgaaggccagctattacttctctactgaggccaactgtgagccctggtgtgtttcattggcaggagaagaggctaattaagtgaaactgaaaggtccctgactatggctccccagagcctgccttcatctaggatggctcctctgggcatgctgcttgggctgctgatggccgcctgcttcaccttctgcctcagtcatcagaacctgaaggagtttgccctgaccaacccagagaagagcagcaccaaagaaacagagagaaaagaaaccaaagccgaggaggagctggatgccgaagtcctggaggtgttccacccgacgcatgagtggcaggcccttcagccagggcaggctgtccctgcaggatcccacgtacggctgaatcttcagactggggaaagagaggcaaaactccaatatgaggacaagttccgaaataatttgaaaggcaaaaggctggatatcaacaccaacacctacacatctcaggatctcaagagtgcactggcaaaattcaaggagggggcagagatggagagttcaaaggaagacaaggcaaggcaggctgaggtaaagcggctcttccgccccattgaggaactgaagaaagactttgatgagctgaatgttgtcattgagactgacatgcagatcatggtacggctgatcaacaagttcaatagttccagctccagtttggaagagaagattgctgcgctctttgatcttgaatattatgtccatcagatggacaatgcgcaggacctgctttcctttggtggtcttcaagtggtgatcaatgggctgaacagcacagagcccctcgtgaaggagtatgctgcgtttgtgctgggcgctgccttttccagcaaccccaaggtccaggtggaggccatcgaagggggagccctgcagaagctgctggtcatcctggccacggagcagccgctcactgcaaagaagaaggtcctgtttgcactgtgctccctgctgcgccacttcccctatgcccagcggcagttcctgaagctcggggggctgcaggtcctgaggaccctggtgcaggagaagggcacggaggtgctcgccgtgcgcgtggtcacactgctctacgacctggtcacggagaagatgttcgccgaggaggaggctgagctgacccaggagatgtccccagagaagctgcagcagtatcgccaggtacacctcctgccaggcctgtgggaacagggctggtgcgagatcacggcccacctcctggcgctgcccgagcatgatgcccgtgagaaggtgctgcagacactgggcgtcctcctgaccacctgccgggaccgctaccgtcaggacccccagctcggcaggacactggccagcctgcaggctgagtaccaggtgctggccagcctggagctgcaggatggtgaggacgagggctacttccaggagctgctgggctctgtcaacagcttgctgaaggagctgagatgaggccccacaccaggactggactgggatgccgctagtgaggctgaggggtgccagcgtgggtgggcttctcaggcaggaggacatcttggcagtgctggcttggccattaaatggaaacctgaaggccatcctctttctgctgtgtgtctgtgtagactgggcacagccctgtggccggggggtcaggtgagtggttgggtgatgggctctgctgacgtgcagggctcagcccagggcatccaggaacaggctccagggcaggaacctgggcccaggagttgcaagtctctgcttcttaccaagcagcagctctgtaccttgggaagtcgcttaattgctctgagcttgtttcctcatctgtca

SEQ ID NO: 340414 - DNA, 1923 bp, Artificial Sequence
  derived and/or modified sequence
gcggcgtgacagctgccagctcaccggctcagacggtcgccgccgcgtttgcgcagggggagctggtcgccgccgcggccgcctggaattgtgggagttgtgtctgccactcggctgccggaggccgaaggtccctgactatggctccccagagcctgccttcatctaggatggctcctctgggcatgctgcttgggctgctgatggccgcctgcttcaccttctgcctcagtcatcagaacctgaaggagtttgccctgaccaacccagagaagagcagcaccaaagaaacagagagaaaagaaaccaaagccgaggaggagctggatgccgaagtcctggaggtgttccacccgacgcatgagtggcaggcccttcagccagggcaggctgtccctgcaggatcccacgtacggctgaatcttcagactggggaaagagaggcaaaactccaatatgaggacaagttccgaaataatttgaaaggcaaaaggctggatatcaacaccaacacctacacatctcaggatctcaagagtgcactggcaaaattcaaggagggggcagagatggagagttcaaaggaagacaaggcaaggcaggctgaggtaaagcggctcttccgccccattgaggaactgaagaaagactttgatgagctgaatgttgtcattgagactgacatgcagatcatggtacggctgatcaacaagttcaatagttccagctccagtttggaagagaagattgctgcgctctttgatcttgaatattatgtccatcagatggacaatgcgcaggacctgctttcctttggtggtcttcaagtggtgatcaatgggctgaacagcacagagcccctcgtgaaggagtatgctgcgtttgtgctgggcgctgccttttccagcaaccccaaggtccaggtggaggccatcgaagggggagccctgcagaagctgctggtcatcctggccacggagcagccgctcactgcaaagaagaaggtcctgtttgcactgtgctccctgctgcgccacttcccctatgcccagcggcagttcctgaagctcggggggctgcaggtcctgaggaccctggtgcaggagaagggcacggaggtgctcgccgtgcgcgtggtcacactgctctacgacctggtcacggagaagatgttcgccgaggaggaggctgagctgacccaggagatgtccccagagaagctgcagcagtatcgccaggtacacctcctgccaggcctgtgggaacagggctggtgcgagatcacggcccacctcctggcgctgcccgagcatgatgcccgtgagaaggtgctgcagacactgggcgtcctcctgaccacctgccgggaccgctaccgtcaggacccccagctcggcaggacactggccagcctgcaggctgagtaccaggtgctggccagcctggagctgcaggatggtgaggacgagggctacttccaggagctgctgggctctgtcaacagcttgctgaaggagctgagatgaggccccacaccaggactggactgggatgccgctagtgaggctgaggggtgccagcgtgggtgggcttctcaggcaggaggacatcttggcagtgctggcttggccattaaatggaaacctgaaggccatcctctttctgctgtgtgtctgtgtagactgggcacagccctgtggccggggggtcaggtgagtggttgggtgatgggctctgctgacgtgcagggctcagcccagggcatccaggaacaggctccagggcaggaacctgggcccaggagttgcaagtctctgcttcttaccaagcagcagctctgtaccttgggaagtcgcttaattgctctgagcttgtttcctcatctgtcaggagtgccattaaaggagaaaaatcacgtagaaa

SEQ ID NO: 340415 - DNA, 442 bp, Artificial Sequence
  derived and/or modified sequence
ctctctctctctctctctcactctgtgtacgtgtgtgtgtatactgaggaaaggccatgtgaagacatggcaagagggcagccatctgcaagctaagatgagagtcttcagctggaaccttgatcttggacttctggccttcagaattgtccctgactatggctccccagagcctgccttcatctaggatggctcctctgggcatgctgcttgggctgctgatggccgcctgcttcaccttctgcctcagtcatcagaacctgaaggagtttgccctgaccaacccagagaagagcagcaccaaagaaacagagagaaaagaaaccaaagccgaggaggagctggatgccgaagtcctggaggtgttccacccgacgcatgagtggcaggcccttcagccagggcaggctgtccctgcaggatcccacgtacggctgaatct

SEQ ID NO: 340416 - DNA, 675 bp, Artificial Sequence
  derived and/or modified sequence
gggagttgtgtctgccactcggctgccggaggccgaagggcccaatccccacccccagtcttgtctgaattgtgtggaagacatgaggcactgagagaggtgggggccgagtggcctcctcccacctgctccccaaacatctgctctgggctgcagtaagctggcaatacagattggtccctgactatggctccccagagcctgccttcatctaggatggctcctctgggcatgctgcttgggctgctgatggccgcctgcttcaccttctgcctcagtcatcagaacctgaaggagtttgccctgaccaacccagagaagagcagcaccaaagaaacagagagaaaagaaaccaaagccgaggaggagctggatgccgaagtcctggaggtgttccacccgacgcatgagtggcaggcccttcagccagggcaggctgtccctgcaggatcccacgtacggctgaatcttcagactggggaaagagaggcaaaactccaatatgaggacaagttccgaaataatttgaaaggcaaaaggctggatatcaacaccaacacctacacatctcaggatctcaagagtgcactggcaaaattcaaggagggggcagagatggagagttcaaaggaagacaaggcaaggcaggctgaggtaaagcggctcttccgcccc

SEQ ID NO: 340417 - DNA, 572 bp, Artificial Sequence
  derived and/or modified sequence
cacacccagggatggccagtcacctatccagagcctggtgtggtgctgtgaactcaatccctgtctttcagtgtgattggtgccccagggagccaggttgctgggggaagctctcgtggcactcagccgttccattttgtcggcaaaaaaagagggggggagctggcagaaagctaaggcttttgctgctgggtccctgactatggctccccagagcctgccttcatctaggatggctcctctgggcatgctgcttgggctgctgatggccgcctgcttcaccttctgcctcagtcatcagaacctgaaggagtttgccctgaccaacccagagaagagcagcaccaaagaaacagagagaaaagaaaccaaagccgaggaggagctggatgccgaagtcctggaggtgttccacccgacgcatgagtggcaggcccttcagccagggcaggctgtccctgcaggatcccacgtacggctgaatcttcagactggggaaagagaggcaaaactccaatatgaggacaagttccgaaataatttgaaaggcaaaaggctggatatcaacacca

SEQ ID NO: 340418 - DNA, 1431 bp, Artificial Sequence
  derived and/or modified sequence
agacggtcgccgccgcgtttgcgcagggggagctggtcgccgccgcggccgcctggaattgtgggagttgtgtctgccactcggctgccggaggccgaaggtccctgactatggctccccagagcctgccttcatctaggatggctcctctgggcatgctgcttgggctgctgatggccgcctgcttcaccttctgcctcagtcatcagaacctgaaggagtttgccctgaccaacccagagaagagcagcaccaaagaaacagagagaaaagaaaccaaagccgaggaggagctggatgccgaagtcctggaggtgttccacccgacgcatgagtggcaggcccttcagccagggcaggctgtccctgcaggatcccacgtacggctgaatcttcagactggggaaagagaggcaaaactccaatatgaggacaagttccgaaataatttgaaaggcaaaaggctggatatcaacaccaacacctacacatctcaggatctcaagagtgcactggcaaaattcaaggagggggcagagatggagagttcaaaggaagacaagatggacaatgcgcaggacctgctttcctttggtggtcttcaagtggtgatcaatgggctgaacagcacagagcccctcgtgaaggagtatgctgcgtttgtgctgggcgctgccttttccagcaaccccaaggtccaggtggaggccatcgaagggggagccctgcagaagctgctggtcatcctggccacggagcagccgctcactgcaaagaagaaggtcctgtttgcactgtgctccctgctgcgccacttcccctatgcccagcggcagttcctgaagctcggggggctgcaggtcctgaggaccctggtgcaggagaagggcacggaggtgctcgccgtgcgcgtggtcacactgctctacgacctggtcacggagaagatgttcgccgaggaggaggctgagctgacccaggagatgtccccagagaagctgcagcagtatcgccaggtacacctcctgccaggcctgtgggaacagggctggtgcgagatcacggcccacctcctggcgctgcccgagcatgatgcccgtgagaaggtgctgcagacactgggcgtcctcctgaccacctgccgggaccgctaccgtcaggacccccagctcggcaggacactggccagcctgcaggctgagtaccaggtgctggccagcctggagctgcaggatggtgaggacgagggctacttccaggagctgctgggctctgtcaacagcttgctgaaggagctgagatgaggccccacaccaggactggactgggatgccgctagtgaggctgaggggtgccagcgtgggtgggcttctcaggcaggaggacatcttggcagtgctggcttggccattaaatggaaacctgaaggcc

SEQ ID NO: 340419 - protein, 1340 aa, Artificial Sequence
  derived and/or modified sequence
MLRKGANRYLTVKKKDGSETAHAMMTCNLTHNTKHAVRSLIQRFPVTNKERTELLPKTERGNVFAVEAENREMSKTSGRLNNGIPQIPVKRGESEFDSFRQSLPVFEKQEEIVKIIKENKVVLIVGETGSGKTTQIPQFLLDDCFKNGIPCRIFCTQPRRLAAIAVAERVAAERRERIGQTIGYQIRLESRVSPKTLLTFCTNGVLLRTLMAGDSTLSTVTHVIVDEVHERDRFSDFLLTKLRDLLQKHPTLKLILSSAALDVNLFIRYFGSCPVIYIQGRPFEVKEMFLEDILRTTGYTNKEMLKYKKEKQQEEKQQTTLTEWYSAQENSFKPESQRQRTVLNVTDEYDLLDDGGDAVFSQLTEKDVNCLEPWLIKEMDACLSDIWLHKDIDAFAQVFHLILTENVSVDYRHSETSATALMVAAGRGFASQVEQLISMGANVHSKASNGWMALDWAKHFGQTEIVDLLESYSATLEFGNLDESSLVQTNGSDLSAEDRELLKAYHHSFDDEKVDLDLIMHLLYNICHSCDAGAVLIFLPGYDEIVGLRDRILFDDKRFADSTHRYQVFMLHSNMQTSDQKKVLKNPPAGVRKIILSTNIAETSITVNDVVFVIDSGKVKEKSFDALNFVTMLKMVWISKASAIQRKGRAGRCRPGICFRLFSRLRFQNMLEFQTPELLRMPLQELCLHTKLLAPVNCPIADFLMKAPEPPPALIVRNAVQMLKTIDAMDTWEDLTELGYHLADLPVEPHLGKMVLCAVVLKCLDPILTIACTLAYRDPFVLPTQASQKRAAMLCRKRFTAGAFSDHMALLRAFQAWQKARSDGWERAFCEKNFLSQATMEIIIGMRTQLLGQLRASGFVRARGGGDIRDVNTNSENWAVVKAALVAGMYPNLVHVDRENLVLTGPKEKKVRFHPASVLSQPQYKKIPPANGQAAAIKALPTDWLIYDEMTRAHRIANIRCCSAVTPVTILVFCGPARLASNALQEPSSFRVDGIPNDSSDSEMEDKTTANLAALKLDEWLHFTLEPEAASLLLQLRQKWHSLFLRRMRAPSKPWSQVDEATIRAIIAVLSTEEQSAGLQQPSGIGQRPRPMSSEELPLASSWRSNNSRKSSADTEFSDECTTAERVLMKSPSPALHPPQKYKDRGILHPKRGTEDRSDQSSLKSTDSSSYPSPCASPSPPSSGKGSKSPSPRPNMPVRYFIMKSSNLRNLEISQQKGIWSTTPSNERKLNRAFWESSIVYLVFSVQGSGHFQGFSRMSSEIGREKSQDWGSAGLGGVFKVEWIRKESLPFQFAHHLLNPWNDNKKVQISRDGQELEPLVGEQLLQLWERLPLGEKNTTD

SEQ ID NO: 340420 - DNA, 4023 bp, Artificial Sequence
  derived and/or modified sequence
atgctgagaaagggcgccaacagatacctgaccgtgaagaagaaggacggcagcgagaccgcccacgccatgatgacctgcaacctgacccacaacaccaagcacgccgtgagaagcctgatccagagattccccgtgaccaacaaggagagaaccgagctgctgcccaagaccgagagaggcaacgtgttcgccgtggaggccgagaacagagagatgagcaagaccagcggcagactgaacaacggcatcccccagatccccgtgaagagaggcgagagcgagttcgacagcttcagacagagcctgcccgtgttcgagaagcaggaggagatcgtgaagatcatcaaggagaacaaggtggtgctgatcgtgggcgagaccggcagcggcaagaccacccagatcccccagttcctgctggacgactgcttcaagaacggcatcccctgcagaatcttctgcacccagcccagaagactggccgccatcgccgtggccgagagagtggccgccgagagaagagagagaatcggccagaccatcggctaccagatcagactggagagcagagtgagccccaagaccctgctgaccttctgcaccaacggcgtgctgctgagaaccctgatggccggcgacagcaccctgagcaccgtgacccacgtgatcgtggacgaggtgcacgagagagacagattcagcgacttcctgctgaccaagctgagagacctgctgcagaagcaccccaccctgaagctgatcctgagcagcgccgccctggacgtgaacctgttcatcagatacttcggcagctgccccgtgatctacatccagggcagacccttcgaggtgaaggagatgttcctggaggacatcctgagaaccaccggctacaccaacaaggagatgctgaagtacaagaaggagaagcagcaggaggagaagcagcagaccaccctgaccgagtggtacagcgcccaggagaacagcttcaagcccgagagccagagacagagaaccgtgctgaacgtgaccgacgagtacgacctgctggacgacggcggcgacgccgtgttcagccagctgaccgagaaggacgtgaactgcctggagccctggctgatcaaggagatggacgcctgcctgagcgacatctggctgcacaaggacatcgacgccttcgcccaggtgttccacctgatcctgaccgagaacgtgagcgtggactacagacacagcgagaccagcgccaccgccctgatggtggccgccggcagaggcttcgccagccaggtggagcagctgatcagcatgggcgccaacgtgcacagcaaggccagcaacggctggatggccctggactgggccaagcacttcggccagaccgagatcgtggacctgctggagagctacagcgccaccctggagttcggcaacctggacgagagcagcctggtgcagaccaacggcagcgacctgagcgccgaggacagagagctgctgaaggcctaccaccacagcttcgacgacgagaaggtggacctggacctgatcatgcacctgctgtacaacatctgccacagctgcgacgccggcgccgtgctgatcttcctgcccggctacgacgagatcgtgggcctgagagacagaatcctgttcgacgacaagagattcgccgacagcacccacagataccaggtgttcatgctgcacagcaacatgcagaccagcgaccagaagaaggtgctgaagaacccccccgccggcgtgagaaagatcatcctgagcaccaacatcgccgagaccagcatcaccgtgaacgacgtggtgttcgtgatcgacagcggcaaggtgaaggagaagagcttcgacgccctgaacttcgtgaccatgctgaagatggtgtggatcagcaaggccagcgccatccagagaaagggcagagccggcagatgcagacccggcatctgcttcagactgttcagcagactgagattccagaacatgctggagttccagacccccgagctgctgagaatgcccctgcaggagctgtgcctgcacaccaagctgctggcccccgtgaactgccccatcgccgacttcctgatgaaggcccccgagcccccccccgccctgatcgtgagaaacgccgtgcagatgctgaagaccatcgacgccatggacacctgggaggacctgaccgagctgggctaccacctggccgacctgcccgtggagccccacctgggcaagatggtgctgtgcgccgtggtgctgaagtgcctggaccccatcctgaccatcgcctgcaccctggcctacagagaccccttcgtgctgcccacccaggccagccagaagagagccgccatgctgtgcagaaagagattcaccgccggcgccttcagcgaccacatggccctgctgagagccttccaggcctggcagaaggccagaagcgacggctgggagagagccttctgcgagaagaacttcctgagccaggccaccatggagatcatcatcggcatgagaacccagctgctgggccagctgagagccagcggcttcgtgagagccagaggcggcggcgacatcagagacgtgaacaccaacagcgagaactgggccgtggtgaaggccgccctggtggccggcatgtaccccaacctggtgcacgtggacagagagaacctggtgctgaccggccccaaggagaagaaggtgagattccaccccgccagcgtgctgagccagccccagtacaagaagatcccccccgccaacggccaggccgccgccatcaaggccctgcccaccgactggctgatctacgacgagatgaccagagcccacagaatcgccaacatcagatgctgcagcgccgtgacccccgtgaccatcctggtgttctgcggccccgccagactggccagcaacgccctgcaggagcccagcagcttcagagtggacggcatccccaacgacagcagcgacagcgagatggaggacaagaccaccgccaacctggccgccctgaagctggacgagtggctgcacttcaccctggagcccgaggccgccagcctgctgctgcagctgagacagaagtggcacagcctgttcctgagaagaatgagagcccccagcaagccctggagccaggtggacgaggccaccatcagagccatcatcgccgtgctgagcaccgaggagcagagcgccggcctgcagcagcccagcggcatcggccagagacccagacccatgagcagcgaggagctgcccctggccagcagctggagaagcaacaacagcagaaagagcagcgccgacaccgagttcagcgacgagtgcaccaccgccgagagagtgctgatgaagagccccagccccgccctgcaccccccccagaagtacaaggacagaggcatcctgcaccccaagagaggcaccgaggacagaagcgaccagagcagcctgaagagcaccgacagcagcagctaccccagcccctgcgccagccccagcccccccagcagcggcaagggcagcaagagccccagccccagacccaacatgcccgtgagatacttcatcatgaagagcagcaacctgagaaacctggagatcagccagcagaagggcatctggagcaccacccccagcaacgagagaaagctgaacagagccttctgggagagcagcatcgtgtacctggtgttcagcgtgcagggcagcggccacttccagggcttcagcagaatgagcagcgagatcggcagagagaagagccaggactggggcagcgccggcctgggcggcgtgttcaaggtggagtggatcagaaaggagagcctgcccttccagttcgcccaccacctgctgaacccctggaacgacaacaagaaggtgcagatcagcagagacggccaggagctggagcccctggtgggcgagcagctgctgcagctgtgggagagactgcccctgggcgagaagaacaccaccgactag

SEQ ID NO: 340421 - DNA, 4023 bp, Artificial Sequence
  derived and/or modified sequence
atgctccgtaagggcgctaaccggtatctgactgtcaagaaaaaggatgggagtgagactgcacacgcaatgatgacatgtaaccttacccacaacacaaaacacgcagtgcgctcgttgattcaacggtttcctgtgacaaataaggaacggactgagctgcttccaaagacagagcgagggaacgtgttcgctgtcgaagctgaaaaccgggagatgagtaagacctctggacgtctcaacaacggcatcccccagatcccagtaaagaggggagagtcagaattcgattcctttaggcagagcctgcccgtgtttgaaaaacaggaggaaatagtcaaaataataaaggagaacaaggtggtcctcatcgtcggtgagaccggaagcgggaagacaacacagatcccacagtttttgctcgacgactgctttaaaaacgggattccttgccgcattttctgcactcaacctaggagacttgctgcaatcgccgtcgccgagcgagtcgcggcggagcggcgagagcggatcggtcagaccattgggtatcaaatccgcctggagtctcgagtttcacccaagaccctgctgaccttttgcaccaacggtgtgctcctgcgtacattaatggcgggagacagcaccttatccaccgtcacccacgtcatagtggatgaggtgcacgaacgggaccgctttagcgacttcctgctgacgaagcttagggatctgctgcagaaacaccctactctgaaactaattttatcaagcgctgcgctagatgtgaacctgtttatcagatactttgggtcgtgccctgtgatttacattcagggccggccgtttgaggtcaaagaaatgtttttagaagatatccttcggactacggggtatacaaacaaagagatgctaaagtataaaaaggagaagcaacaggaggagaagcagcagacaacattaacagaatggtacagcgcccaggagaatagttttaagcctgagtcccagcgacagcggaccgtgctgaacgtcaccgatgagtatgacctactcgatgacgggggggatgctgtgttctcgcagctgaccgagaaagacgtgaattgtctggagccatggctcatcaaagaaatggacgcatgcctgagtgatatatggctgcacaaggatattgacgccttcgctcaggtgttccacctaatcctgacggaaaatgtgtctgtggattacagacactcagagaccagtgcaactgctctgatggtggcggcggggaggggcttcgcatcccaggtcgagcagctgatctcgatgggtgccaacgttcatagcaaagctagcaatggatggatggcactcgattgggccaagcactttggacagactgaaattgtggacctgctggagagttactccgccaccctggaattcggaaatctggacgagtcaagcctcgtccagacaaatggaagcgacctgagtgccgaagaccgtgagctgttgaaggcttatcaccattctttcgatgacgaaaaggtggacctagaccttatcatgcatctcctctataacatctgccactcttgtgatgccggggcagtgctgatttttctcccagggtatgacgagattgtcggactgcgtgatcgaattctgtttgacgacaaacgattcgctgactctacacatagatatcaagtcttcatgctccacagtaatatgcagacttccgatcaaaagaaagttctaaaaaacccccccgcgggtgttcgcaagataattctatccactaatattgctgagacatccatcaccgttaacgatgtcgtgttcgtcatcgacagcgggaaggtcaaggagaaaagcttcgatgccctgaacttcgtaaccatgttgaaaatggtctggatctcaaaagcaagtgctattcaaaggaaaggaagagcagggcgatgtcgaccaggcatatgcttcagactgttctcaaggctgcgattccagaacatgctggagttccaaaccccagaactcctgcgtatgcctttacaggaactgtgtcttcatacaaagctgcttgcaccagtcaactgccccatcgccgattttttaatgaaggctccggaaccacctccggcactaatcgtccgcaatgccgtgcagatgttgaaaactatcgacgctatggacacctgggaggacctgaccgaactgggataccacctggcggacttgcctgtcgagcctcatcttggcaagatggtgttgtgtgccgtcgtgctgaaatgccttgatcctatcttaacaatagcctgcaccctggcctaccgagacccattcgtactgcctacccaggcctcacagaaaagagccgccatgctctgccgtaaaaggttcaccgcaggagccttcagcgatcatatggctctcctgcgagcgttccaggcctggcagaaagctcggtccgatgggtgggaacgggccttttgtgaaaaaaacttccttagtcaggccacaatggagattataattggcatgcggacccaactgttgggccagctgcgagctagcgggtttgtgcgagccagaggggggggggatatccgcgatgtcaacaccaacagtgagaattgggctgtggtgaaggccgcgttggtagccggcatgtatccaaacttggtccacgtggaccgagagaacctggttctcactggccctaaggagaagaaggtccggtttcatcctgcctctgttctttcacagcctcagtataagaaaattcctccggccaatgggcaggccgcagcaatcaaagccctcccgactgactggcttatctatgatgagatgacaagagcacatagaattgcgaacatccgttgttgcagtgctgtcacccccgtaaccatccttgtcttctgtggcccagccagactcgcgagcaatgccctccaagagccgagcagctttagagtggacggtattccaaacgactcatcggattcagagatggaagacaagaccaccgctaatctcgcagccctgaaactggatgaatggttgcattttaccctggaaccagaagccgcctccctgctgcttcagctccgccagaaatggcactcgctcttcctccgacggatgcgggcaccctcaaaaccatggtcccaggtggatgaggccacaatccgggcaattattgctgttctgagcacggaggaacagtcagccggactccaacaaccatccggaataggtcagagacctcgccccatgagctcagaggaacttcccctcgcttcgtcctggaggtctaacaacagccgcaaaagcagcgcggatactgagttcagtgacgaatgcacaacagcggaaagggtcctgatgaaatctccatcccccgctctgcaccctccccagaaatacaaagatagagggattctgcaccccaagcggggtactgaggatcgttctgaccagagttctcttaagtccaccgactcaagtagttatcccagcccgtgtgctagcccgagccctccatctagcggaaaaggcagcaaatcccccagtccccggccgaacatgcccgtccgatatttcatcatgaaatcgagcaatctacgcaatctggagatttcccagcagaaggggatctggagcactactccttccaatgaacgtaaactgaatagggctttctgggagtccagcatcgtgtacctggtgtttagcgtgcagggaagtggccactttcaaggtttctctcgcatgagtagtgagattggtagagaaaagagtcaggactggggctcagctggtctcggcggagtgtttaaggtggagtggatccggaaagagagtctgcctttccagtttgcccaccatctgctcaatccctggaacgataacaagaaggtgcaaatctcgcgcgacggacaggagctagaacctctcgtcggcgagcaattgttgcaactctgggagcgactgcctctcggcgagaagaacaccacagattag

SEQ ID NO: 340422 - DNA, 4023 bp, Artificial Sequence
  derived and/or modified sequence
atgctgaggaagggggccaaccgctacctgactgtgaagaagaaggatggcagcgagacagcccacgccatgatgacctgcaacctgacccacaacaccaagcatgctgtgcgcagcctcatccagcgcttccctgtgaccaacaaggagaggacagagctgctgcccaagacagaaagaggaaatgtgtttgctgtggaggctgaaaatcgggagatgagcaagaccagcggccgcctgaacaacggcatcccccagatccctgtgaagagaggagagagcgagtttgacagcttccggcagagcctgcctgtgtttgagaagcaggaggagatcgtgaagatcatcaaggagaacaaggtggtgctgattgtgggggagaccggcagcggcaagaccacccagatcccccagttcctgctggatgactgcttcaagaatggcatcccctgccgcatcttctgcacccagccccggcggctggccgccatcgctgtggccgagcgggtggccgctgagcggcgggagcgcatcggccagaccatcggctaccagatccggctggagagccgggtgagccccaagaccctgctgaccttctgcaccaatggagtgctgctgcggaccctgatggccggggacagcaccctgagcacagtgacccacgtgattgtggatgaggtgcatgagcgggaccgcttcagtgacttcctgctgaccaagctgcgggacctgctgcagaagcaccccaccctgaagctgatcctgagcagcgctgccctggatgtgaacctcttcatccgctacttcggcagctgccctgtgatctacatccagggccggccctttgaggtgaaggagatgttcctggaggacatcctgcggaccaccggctacaccaacaaggagatgctgaagtacaagaaggagaagcagcaggaggagaagcagcagaccaccctgacagagtggtacagcgcccaggagaacagcttcaagccagagagccagaggcagaggacagtgctgaatgtgacagatgaatatgacctgctggatgatggaggagatgctgtgttcagccagctgacagagaaggatgtgaactgcctggagccctggctgatcaaggagatggatgcctgcctgagtgacatctggctgcacaaggacattgatgcctttgcccaggtgttccacctgatcctgacagaaaatgtgtctgtggactaccgccacagcgagaccagcgccacagccctgatggtggccgccggccggggctttgccagccaggtggagcagctgatctccatgggcgccaacgtgcacagcaaggccagcaatggctggatggccctggactgggccaagcacttcggccagacagaaattgtggacctgctggagagctacagcgccaccctggagtttggaaacctggatgagagcagcctggtgcagaccaacggcagtgacctgtctgcagaagatcgggagctgctgaaggcctaccaccacagctttgatgatgagaaggtggacctggacctgatcatgcacctgctgtacaacatctgccacagctgtgatgctggagctgtgctgatcttcctgcccggctatgatgaaattgtgggcctgcgggaccgcatcctgtttgatgacaagagatttgctgacagcacccaccgctaccaggtgttcatgctgcacagcaacatgcagaccagtgaccagaagaaggtgctgaagaaccccccagctggggtgaggaagatcatcctgagcaccaacattgctgagaccagcatcaccgtgaatgatgtggtgtttgtgattgacagcggcaaggtgaaggagaagagctttgatgccctgaactttgtgaccatgctgaagatggtgtggatcagcaaggccagcgccatccagaggaagggccgggccggccgctgcaggcctggcatctgcttccgcctcttcagccggctgcgcttccagaacatgctggagttccagaccccagagctgctgaggatgcccctgcaggagctgtgcctgcacaccaagctgctggcccctgtgaactgccccatcgctgacttcctgatgaaggcccctgagcccccaccagccctgattgtgagaaatgctgtgcagatgctgaagaccattgatgccatggacacctgggaggacctgacagagctgggctaccacctggccgacctgcctgtggagccccacctgggcaagatggtgctgtgtgctgtggtgctgaagtgcctggaccccatcctgaccatcgcctgcaccctggcctacagagacccctttgtgctgcccacccaggccagccagaagagagctgccatgctgtgcaggaagcgcttcaccgctggggccttcagtgaccacatggccctgctgcgggccttccaggcctggcagaaggcccggagtgatggctgggagcgggccttctgtgagaagaacttcctgagccaggccaccatggagatcatcatcggcatgaggacccagctgctgggccagctgcgggccagcggctttgtgcgggcccggggcggcggggacatcagagatgtgaacaccaacagcgagaactgggccgtggtgaaggccgccctggtggccggcatgtaccccaacctggtgcacgtggaccgggagaacctggtgctgaccggccccaaggagaagaaggtgcgcttccacccagcctctgtgctgagccagccccagtacaagaagatccccccagccaacggccaggccgccgccatcaaggccctgcccacagactggctgatctatgatgagatgacccgggcccaccgcatcgccaacatccgctgctgcagcgctgtgacccctgtgaccatcctggtgttctgtggccctgcccggctggccagcaatgccctgcaggagcccagcagcttccgggtggatggcatccccaatgacagcagtgacagcgagatggaggacaagaccacagccaacctggccgccctgaagctggatgagtggctgcacttcaccctggagcctgaggccgccagcctgctgctgcagctgcggcagaagtggcacagcctcttcctgcggaggatgagggcccccagcaagccctggagccaggtggatgaggccaccatccgggccatcatcgctgtgctgagcacagaggagcagagcgctggcctgcagcagcccagcggcatcggccagaggccccggcccatgagcagcgaggagctgcccctggccagctcctggaggagcaacaacagcaggaagagcagcgctgacacagagttcagtgatgagtgcaccacagctgagcgggtgctgatgaagagccccagccctgccctgcaccccccccagaagtacaaggaccggggcatcctgcaccccaagaggggcacagaagatagaagtgaccagagcagcctgaagagcacagacagcagcagctaccccagcccctgtgccagccccagcccccccagcagcggcaagggcagcaagagccccagcccccggcccaacatgcctgtgcgctacttcatcatgaagagcagcaacctgaggaacctggagatcagccagcagaagggcatctggagcaccacccccagcaatgaaaggaagctgaacagagccttctgggagagcagcatcgtgtacctggtgttttctgtgcagggcagcggccacttccagggcttcagcaggatgagcagcgagatcggccgggagaagagccaggactggggcagcgctggcctgggcggcgtcttcaaggtggagtggatcaggaaggagagcctgcccttccagtttgcccaccacctgctgaacccctggaatgacaacaagaaggtgcagatcagcagagatggccaggagctggagcccctggtgggggagcagctgctgcagctgtgggagcggctgcccctgggggagaagaacaccacagactag

SEQ ID NO: 340423 - DNA, 4023 bp, Artificial Sequence
  derived and/or modified sequence
atgctgcggaagggcgccaaccggtacctgaccgtgaagaagaaggacggctccgagaccgcccacgccatgatgacatgcaacctcacccataacacaaaacatgcggtacggtctctcattcagcgtttccccgttaccaacaaggagcgtactgaactgctcccaaagaccgagagagggaatgtgttcgcagtggaggccgagaacagagagatgagcaaaacgagcggcagactcaacaacggaattccacagatccctgtgaaacggggggagagcgagttcgatagctttcggcaatccctacctgtatttgagaaacaagaggaaatcgtgaagatcatcaaggagaacaaagtagtgctgatcgtaggagagacagggagtggaaaaacaacacagatcccccaattcttgcttgatgactgcttcaagaacggtatcccatgccgcattttctgcacccagccgagaaggctagcagccattgctgtggccgaaagagtggctgccgagcgccgggaacgaattggccagactataggataccaaatccgtttggaatcccgggtttccccgaagacgctgctcactttttgcacaaatggtgtgttattacggacattgatggcgggtgacagcacactgtccacagttacacatgtaattgtcgatgaggtacacgaaagggaccggttcagcgactttctgctcaccaagttgagggacctactccaaaagcatcctacacttaaactgatcctgagctcagcagctctggacgtcaacttgttcatcaggtactttggaagctgccccgtcatatatatccagggcagacctttcgaagttaaagagatgtttttggaggacattctacgtacgaccggctataccaacaaggagatgctaaaatacaaaaaggaaaaacaacaggaagagaagcagcagaccactctgacagagtggtacagtgcccaggaaaacagcttcaaaccggagtcacaacgccagcgaaccgtcctcaacgtgaccgacgaatacgaccttttggacgacgggggggacgccgtatttagccagctaacggaaaaggatgtgaactgtcttgaaccttggctgatcaaagagatggatgcttgtctgtcagacatctggctgcacaaagatattgacgccttcgcccaagtgttccaccttattcttacagaaaacgtgagtgtagattatcgtcactcagagaccagcgctactgcactcatggtcgcagccggcaggggatttgcaagtcaagtagagcagctgatctccatgggtgccaacgtgcacagcaaagcctccaacggatggatggctctcgactgggctaagcattttggtcagaccgagattgtggatctcctggagagctactccgccacactcgagttcgggaacttagacgaaagctccctggtccagacaaatgggtctgacctgagcgccgaggatagagagctcttaaaggcctaccaccactctttcgatgatgaaaaggttgatttggacctgatcatgcaccttctctataatatttgccattcctgcgacgccggagcggtgctgatttttctgcccggctacgatgagattgtcggtctaagggaccgaattttatttgatgataagagatttgcggattccacgcatagataccaggtattcatgctccattccaacatgcagacgagtgaccagaaaaaggtgctgaagaatccaccggccggggtcagaaagatcatcctatccaccaatattgccgaaacaagcatcacagtaaacgacgtcgtttttgtgatagatagcgggaaggtgaaggagaagtctttcgatgctctcaattttgtgacaatgcttaaaatggtgtggatttctaaagcatcagccatccagaggaagggccgagctggccgttgtcgccctgggatttgctttcgcctcttttccaggctacggtttcaaaacatgttggaattccagacacctgagttgctccgcatgcctctgcaggagctctgtttgcacaccaaactcctcgcaccggtgaactgcccaatagcagatttcctcatgaaggcccccgagccacctcccgccttgattgtaaggaacgcagtgcagatgcttaagactattgacgccatggacacctgggaggacctgacagagctaggataccatttggctgatcttcccgttgaaccccatctcggcaagatggtgctatgtgccgtcgttctgaagtgcttggatcccatcctcaccatcgcttgtaccctggcttatcgggatccttttgtactccccacgcaagcatcacagaagcgcgcagccatgttatgtcgtaagcggtttactgctggtgccttttccgatcatatggcgttgttacgtgcctttcaagcttggcagaaagcgcggtcagacgggtgggagcgcgcattctgcgaaaagaacttcctgagtcaggccactatggaaatcattatcgggatgcggactcaactgttgggacaacttcgagcttctgggttcgtccgggcacgcggcggaggggacattcgcgacgtgaatacgaatagtgagaattgggcagtggttaaggctgcactggtggcagggatgtaccctaatctggtccatgttgaccgggagaatcttgttctcaccggcccaaaggagaaaaaagttcgatttcatccagctagtgtcctctcacagccccagtataagaaaatcccgcccgcgaacggacaggccgcagcgatcaaggccctgcccacagactggctcatctacgatgaaatgaccagagcacaccgtattgccaacatccggtgctgtagtgcggtcacacccgtgacaatcttagtgttctgcggaccagcccggctggcaagcaacgccctacaagagcctagttcatttagagtggatggcatccccaacgactcgtctgatagtgagatggaagataagacaacggctaatctcgcggccctcaagctggacgagtggcttcacttcaccttggaacccgaggccgccagtttgttgttgcaactaaggcaaaaatggcactcgttatttctgcgccgcatgcgggcacccagtaagccttggtcacaggttgatgaagcaacaatacgagctatcatagctgtcctgagcaccgaggaacagtctgcagggcttcagcagcccagtggtatcgggcaacgtccacgcccaatgtcgtccgaggagctgccactcgcctccagctggcgttctaataacagtaggaagagttccgcggatacagaatttagcgatgaatgtacaactgcagagagagttcttatgaaaagtccatctcctgccctgcaccctccacagaaatacaaggatcgcggcatactgcaccctaagcgcgggacagaagaccgatcagaccaatcatctctgaaatctacagattctagcagttatccttcgccctgtgcctcgccgagccccccgagtagcggcaagggttctaaatccccatccccgaggcccaacatgccagtaagatacttcattatgaagtcaagcaatctgagaaatctggagatctcccagcagaagggaatctggtctactacgccttccaacgaaaggaagctgaatcgggctttctgggaaagctctatcgtctatctggttttctcggtacagggatcaggccacttccagggattttcacgtatgtcgtcggaaattgggcgcgagaagagccaggactggggatctgctgggctgggcggggtgttcaaggtggagtggataaggaaagaatccctccccttccaattcgcccatcacctgcttaacccctggaacgacaataaaaaagtgcagatttctcgggacggccaggaactcgagcctctcgtgggtgagcagttactgcagctctgggaaaggttgccccttggagagaaaaatacaaccgattag

SEQ ID NO: 340424 - DNA, 4023 bp, Artificial Sequence
  derived and/or modified sequence
atgctgagaaagggggcaaaccgatatttgaccgtgaagaaaaaggacggttctgagaccgcacacgctatgatgacctgcaatctgacacacaacacgaagcatgcagtacgctcactcatccagaggttccccgtgaccaacaaggagcggaccgagctgcttcccaagaccgaaagaggaaatgtgttcgccgtggaggccgaaaaccgcgagatgtccaaaacgagcggacgattaaataatgggatccctcagatacccgtgaaacgtggcgaaagcgagtttgactcattcagacagagcttaccagtgttcgagaaacaggaagagattgtgaagattataaaagagaacaaagttgtgttgatagtgggagagactggcagcgggaaaacaacacagatccctcagtttctgctcgacgactgctttaaaaatgggattccatgccgcatcttttgcacccaacctagacgtctggccgcaattgctgtcgccgaaagggtcgcagccgaacgtcgggagaggataggacaaaccattggataccagatacggcttgagagcagggtctcaccgaaaacgctgctgacattctgtaccaacggagtactgctcaggacgcttatggccggagactccacattgtccactgtgacccacgttatcgttgatgaggttcacgagcgcgataggttctccgactttcttctcaccaagctgagagatctgctgcagaagcaccctacactcaaattgattttgtcctccgcggctctggatgtcaacttatttattcggtattttggcagctgtcccgttatatacattcagggaaggcctttcgaggtgaaagaaatgtttctggaagatatactgcgcacaacaggttacactaataaggaaatgctaaaatacaaaaaggaaaagcagcaggaggaaaaacagcaaaccacgcttacagagtggtattcggcccaagaaaactccttcaagccagagagccagcgacagcgcaccgtcctgaacgttacagacgaatatgacttgttagacgacggaggagacgcggtcttttctcagctaaccgagaaggacgtgaattgcctggaaccctggctcattaaagaaatggacgcctgcctgtcagacatctggctacacaaagatatcgacgcctttgcccaggtgtttcatctgatattgaccgagaacgtcagtgtcgactatagacactctgaaacctccgccaccgctctgatggttgccgcaggacgaggattcgcttcccaggttgagcaattgatctcaatgggggcaaatgtccacagtaaagctagcaatggctggatggctctcgactgggccaagcacttcggacagactgagattgtggatctgctggaatcatacagcgccaccctggagtttggcaatttggacgaatcatcactcgtacagactaatgggtctgacttgagtgcagaggaccgcgaactactcaaggcttaccaccattctttcgacgacgagaaagtggatctagacctcattatgcacctcttgtacaacatatgtcatagttgcgacgccggagccgtattgatcttcctccccggttatgacgaaattgtgggtttacgggataggatcctttttgacgataaacgctttgccgattccactcacagatatcaggtcttcatgctgcatagcaacatgcagacctctgaccagaagaaggttctgaaaaatccaccagcgggtgtgcgcaagataatattatctaccaacattgcggagacatcgattaccgtcaacgacgttgtttttgtgatcgacagtgggaaggtgaaggaaaagtcctttgatgcactgaactttgtgaccatgctgaaaatggtgtggatctccaaggcttccgccatccaacgtaaaggtagagccggaagatgtagaccagggatttgcttccgcctgttctctagactgcgttttcagaatatgctggaatttcagactccggagcttcttcgtatgcccctgcaggaactttgtttgcacacaaaactgctggccccagtgaattgtcctatagcagacttcctgatgaaagccccagagccgcctcctgctttaatcgttcgtaatgcagtgcagatgctaaagaccattgatgcaatggatacttgggaggatctgacggagcttggttaccaccttgccgatctgcccgtggagccccacttggggaagatggtgttgtgtgccgtcgttttgaaatgcttagatcctatccttactatcgcttgtaccttggcctaccgcgaccccttcgtgttgccgacacaagcaagccagaagagggctgctatgttgtgccgcaaaaggttcacggccggtgccttctccgatcatatggcacttctccgcgctttccaggcttggcaaaaggcccgatctgacggctgggagagagctttctgcgaaaagaacttcctcagccaggcgactatggagattatcattggaatgcggacacagctcctaggccagctacgcgcaagcggattcgtacgtgccaggggcggaggcgatatccgggatgtgaatacaaattccgagaattgggccgtggtgaaggccgcacttgttgctggaatgtacccgaacctggtgcacgtggatcgcgaaaatttggttcttactggaccaaaggagaagaaagtgcgttttcatcccgcttctgttctgtcacagcctcagtataaaaagattccgccagcaaacgggcaagccgctgctattaaggcgttaccaaccgattggctgatttatgatgagatgacccgggctcataggattgctaacatccggtgctgttcagccgtgacaccagtaaccattttggtgttttgtgggcctgccaggttagcatcaaacgcgctccaggaaccctccagtttcagggttgatgggattcctaatgacagctctgactcagaaatggaagataaaactacagcaaatcttgccgctttgaaactggacgaatggttgcattttacgcttgaacccgaggctgcatcactgctgttgcagctgcgccagaagtggcatagcctcttcctgcgaaggatgcgtgccccatccaaaccctggtcccaggtggacgaagctactatccgagccattatcgcagtgctatccacggaagagcagagtgccggactgcagcagccctcagggatcggccagcgacccaggccgatgtcatccgaggagctccctctcgcctcgtcatggcgctctaataacagtcggaagtccagcgccgatacagagttttccgacgagtgcactacagccgagagggtcttaatgaaaagcccctccccagccttgcacccacctcagaagtataaagacagaggcatccttcacccaaaaagggggaccgaggatcgtagcgatcagagctccctaaagagtacagatagcagcagctacccctccccatgtgcttcgccttcaccaccgtcttccggcaaaggctctaaaagcccatctcctagacctaatatgcctgtgcggtactttatcatgaaatcgagcaacctgaggaacctcgaaatttcccaacaaaagggcatctggagtaccacacctagcaacgaacggaaactcaatcgtgccttctgggagagttcaatcgtgtacctggtgttcagcgttcagggttctggccatttccagggcttctccaggatgtcctccgagatcggcagggaaaagtcccaggactggggtagcgcaggcctgggcggagttttcaaggtcgaatggatccgcaaagagtcgcttccttttcagtttgcgcatcatctgctgaacccgtggaatgataataaaaaggtccagataagcagggatgggcaggaacttgagccgctagtaggtgaacaattgctgcagctgtgggaacgactgccactcggcgagaagaacacaaccgactag

SEQ ID NO: 340425 - protein, 294 aa, Artificial Sequence
  derived and/or modified sequence
MAMSSGGSGGGVPEQEDSVLFRRGTGQSDDSDIWDDTALIKAYDKAVASFKHALKNGDICETSGKPKTTPKRKPAKKNKSQKKNTAASLQQWKVGDKCSAIWSEDGCIYPATIASIDFKRETCVVVYTGYGNREEQNLSDLLSPICEVANNIEQNAQENENESQVSTDESENSRSPGNKSDNIKPKSAPWNSFLPPPPPMPGPRLGPGKPGLKFNGPPPPPPPPPPHLLSCWLPPFPSGPPIIPPPPPICPDSLDDADALGSMLISWYMSGYHTGYYMTGFHCVSQDGLNLLTP

SEQ ID NO: 340426 - DNA, 885 bp, Artificial Sequence
  derived and/or modified sequence
atggccatgagcagcggcggcagcggcggcggcgtgcccgagcaggaggacagcgtgctgttcagaagaggcaccggccagagcgacgacagcgacatctgggacgacaccgccctgatcaaggcctacgacaaggccgtggccagcttcaagcacgccctgaagaacggcgacatctgcgagaccagcggcaagcccaagaccacccccaagagaaagcccgccaagaagaacaagagccagaagaagaacaccgccgccagcctgcagcagtggaaggtgggcgacaagtgcagcgccatctggagcgaggacggctgcatctaccccgccaccatcgccagcatcgacttcaagagagagacctgcgtggtggtgtacaccggctacggcaacagagaggagcagaacctgagcgacctgctgagccccatctgcgaggtggccaacaacatcgagcagaacgcccaggagaacgagaacgagagccaggtgagcaccgacgagagcgagaacagcagaagccccggcaacaagagcgacaacatcaagcccaagagcgccccctggaacagcttcctgcccccccccccccccatgcccggccccagactgggccccggcaagcccggcctgaagttcaacggccccccccccccccccccccccccccccccccacctgctgagctgctggctgccccccttccccagcggcccccccatcatccccccccccccccccatctgccccgacagcctggacgacgccgacgccctgggcagcatgctgatcagctggtacatgagcggctaccacaccggctactacatgaccggcttccactgcgtgagccaggacggcctgaacctgctgaccccctag

SEQ ID NO: 340427 - DNA, 885 bp, Artificial Sequence
  derived and/or modified sequence
atggctatgtccagcggcgggtccggcggcggggttccggagcaagaagacagcgtgctctttagacgtggaaccggacagtctgacgattccgacatatgggatgatactgccctgataaaagcttatgacaaggcagtggcctcatttaagcacgctcttaaaaatggggacatctgcgaaacgtcagggaagccaaagactacacccaagaggaaacccgcaaaaaagaacaaatcacagaagaagaatactgccgcctccctgcagcagtggaaggttggcgataaatgtagcgctatctggtctgaggacggttgtatttaccccgcgaccatcgcctccatagatttcaagcgcgagacttgcgttgtcgtgtataccgggtatggcaatcgcgaagagcagaacctcagcgacttactctcgcctatttgcgaggtagctaataacatcgaacagaacgcccaggaaaacgagaatgaatcacaggtttcaaccgatgagtccgaaaactctcggagtccaggtaataagagcgataatatcaaacctaaaagtgccccatggaattcttttctgccgcccccgcctccgatgcctggcccgagacttggtcctggcaagccaggactgaaatttaatggccctccgccaccacctcccccaccccccccacacttgttgtcctgctggcttccaccattcccttccggccctccaatcattccaccaccacctcctatctgtcccgactcactggatgacgccgatgcactaggctctatgcttatctcctggtacatgagcggctaccacaccggctactacatgacaggattccattgcgtttcccaggacggactgaacttactcacaccctag

SEQ ID NO: 340428 - DNA, 885 bp, Artificial Sequence
  derived and/or modified sequence
atggctatgtcctctggagggtccggtggaggagtccctgagcaggaagactccgttctattccgccgaggtaccgggcaaagcgatgattctgacatctgggatgacacggctctcatcaaggcctacgataaagcggtcgcatcctttaagcacgctttaaagaatggcgatatatgcgagacttcaggcaaaccaaagactacgccaaaacggaaaccagctaagaaaaacaaatcacagaaaaaaaatacggctgcctccctccagcaatggaaagtgggcgacaaatgcagcgcaatctggtcagaggacggctgcatctaccccgcgacgatcgcgtccatcgactttaaacgcgagacatgtgttgtggtctacacagggtacggaaatcgggaggagcagaatctgagtgatttgctgagcccaatctgcgaggtcgccaataacattgaacaaaacgcccaggagaacgaaaacgagtcacaggtttcaactgatgagtccgagaacagtcgcagccccggaaacaagtctgacaatataaaaccaaaatccgccccttggaattccttcctgccacctccgccccctatgcccgggccacggctcggacctgggaaacctggccttaaatttaatggccccccgcctccccccccacctccgcctccccatctcctgtcatgttggctcccccctttcccaagtggcccacccataattcccccgcccccccctatctgtccggactccttagacgatgccgacgctctgggctccatgcttatttcgtggtacatgtctggataccacactggatactatatgaccggttttcattgtgtgtcacaagacggactgaatcttctaaccccttag

SEQ ID NO: 340429 - DNA, 885 bp, Artificial Sequence
  derived and/or modified sequence
atggccatgagcagcggcggcagcggcggcggcgtgcctgagcaggaggacagcgtgctcttccggcggggcaccggccagagtgatgacagcgacatctgggatgacacagccctgatcaaggcctatgacaaggctgtggccagcttcaagcacgccctgaagaatggagacatctgtgagaccagcggcaagcccaagaccacccccaagaggaagccagccaagaagaacaagagccagaagaagaacacagctgccagcctgcagcagtggaaggtgggggacaagtgcagcgccatctggagcgaagatggctgcatctacccagccaccatcgccagcattgacttcaagcgggagacctgtgtggtggtgtacacaggctacggcaaccgggaggagcagaacctgagtgacctgctgagccccatctgtgaggtggccaacaacatcgagcagaatgcccaggagaatgaaaatgaaagccaggtgtccacagatgaaagtgagaacagccgcagccctggcaacaagagtgacaacatcaagcccaagagcgccccctggaacagcttcctgcccccacctccacccatgcctggcccccggctgggccctgggaagccaggcctgaagttcaatggacctcctcctcctcctcctcctcctccaccccacctgctgagctgctggctgccccccttccccagcggcccccccatcatccccccacctccacccatctgcccagacagcctggatgatgctgatgccctgggctccatgctgatctcctggtacatgagcggctaccacacaggctactacatgacaggcttccactgtgtgtcccaggacggcctgaacctgctgaccccctag

SEQ ID NO: 340430 - DNA, 885 bp, Artificial Sequence
  derived and/or modified sequence
atggccatgagcagcggcggcagcggcggcggcgtgcccgagcaggaggactctgtcttgtttagaagaggcacaggccaatccgacgactctgatatctgggatgacactgccctgatcaaggcctacgacaaggccgttgcctcctttaagcatgcacttaaaaacggggatatctgtgaaacatcgggcaagcctaaaacgactcctaaacggaagcctgccaagaaaaacaagtcacaaaagaagaacacggccgcttcactgcagcagtggaaagtcggagacaagtgctccgctatatggtcagaagatgggtgtatttatcctgctacaatcgcatcaatagactttaaaagagagacgtgcgtcgtcgtgtataccgggtacggcaaccgggaagaacaaaacctatccgatctcctctcacccatttgtgaagtagctaataacatcgagcaaaatgctcaggagaatgagaacgaaagccaggttagcacagacgaatctgagaacagccggtcgcccgggaataagtcagataacattaagcccaaatctgccccctggaactcattccttccccccccaccccctatgcccggcccaaggcttggacccggcaagcccgggctgaaattcaacggacctcctccaccgcctccgccaccgcccccacacctcctttcgtgctggctccctccattcccttcagggccacccattataccgcctccgcccccaatctgccctgattcgttagacgatgccgatgcgctgggttctatgctgatctcttggtatatgtcaggctatcataccgggtattacatgacaggtttccactgcgtgagccaagatgggctcaatctgctgaccccttag

SEQ ID NO: 340431 - DNA, 885 bp, Artificial Sequence
  derived and/or modified sequence
atggccatgagcagcggcggcagcggcggcggcgtgcccgagcaggaggactctgttctgtttaggcgcggcacaggtcagagcgacgactctgacatctgggacgacacagctctcatcaaggcctacgacaaggctgtggcctccttcaaacatgcactcaaaaatggagacatatgtgaaacgtccggcaagccaaaaacgactcccaaacgtaaacctgccaagaaaaacaagtctcagaaaaagaataccgccgcatcactgcagcaatggaaggtgggcgacaaatgctccgccatatggagtgaagatggttgtatttaccctgctactatcgcatcaatcgactttaagcgcgaaacttgcgttgtagtctacacagggtacgggaatcgcgaggagcagaatctgtccgacctgttatcccctatttgtgaagtcgccaacaatattgaacaaaacgcgcaggagaatgagaacgaaagccaggtaagcacagacgagtcagaaaatagtcggtccccgggcaataagagtgataatataaaacctaagagtgcaccctggaacagttttttaccacccccaccgcccatgcctgggccaagactgggccctggtaaacctggtctgaagttcaacggacccccacccccacccccgccccccccgccccacctgctctcatgctggctgccacccttcccctcggggccacccataatccctcccccaccccctatttgtcccgactccctggatgatgctgacgctctcggatcaatgttaatctcctggtatatgtcgggctatcataccggttattatatgactggatttcattgtgtgtctcaggacggactcaacctcctgaccccttag

SEQ ID NO: 340432 - DNA, 885 bp, Artificial Sequence
  derived and/or modified sequence
atggccatgtccagcggcggatcagggggaggcgtacccgaacaagaagatagcgttctcttcaggcggggtacgggccaatccgatgactcggacatctgggatgatacagccctcattaaagcttacgacaaggccgtggcttcgtttaagcatgccctgaagaatggagacatatgtgagacctccgggaaacccaaaacgacccctaagcgaaagcctgcaaagaaaaacaagagccaaaaaaagaataccgccgcttcattacagcagtggaaggtgggggacaagtgcagtgctatctggagtgaagatggatgcatttatcccgcaactattgcttcaatcgatttcaagagggagacctgtgtagtcgtctatactggatacggaaatcgggaagagcaaaatctctcagatctgctgtcgcccatttgcgaggttgccaacaacattgagcagaacgcccaggaaaatgagaacgagagtcaggtttcaaccgacgagagcgagaatagtcgttcaccgggaaacaagtcagacaacataaagcccaaaagcgcaccatggaatagttttctaccgccacccccacccatgccaggccctcgtctcggacctggcaagcctggcttgaagtttaacgggcctcctcccccaccaccaccccctccgcctcatttgctctcatgttggctccctccattcccaagcgggcctccaatcatccccccacctccccctatttgtcctgattccctggacgatgcagatgcactgggcagcatgctgatttcctggtatatgtcgggctatcacactgggtattatatgaccggtttccactgcgtatcccaggatggtctaaacttgttgacaccatag

SEQ ID NO: 340433 - DNA, 885 bp, Artificial Sequence
  derived and/or modified sequence
atggctatgagctctggaggcagtggtggaggagtgcctgaacaggaggattcggtcctgttcaggaggggaaccggacaatccgacgacagcgatatatgggacgatactgcactcattaaggcttacgacaaagctgtcgcctctttcaagcacgccttaaaaaacggcgacatttgtgagacatcagggaagcctaagacaactcctaagcgcaaaccagcgaagaaaaataagtctcaaaagaagaatactgctgcctccctgcagcagtggaaagtgggcgataagtgctctgccatctggtccgaagatggatgcatatatccggctacaatcgccagcatcgattttaaaagagaaacctgtgtagtggtctacacagggtacggtaatagagaagagcagaatcttagtgacctgctcagcccaatctgcgaagtcgctaacaacatagagcagaatgcgcaggagaacgaaaacgaatcccaggtttcgacagacgagagcgagaatagtcgcagccccggtaacaagagtgacaatatcaaacccaaaagcgccccttggaattccttcctacccccaccgccacctatgcccggaccaagattaggcccagggaaacccggactgaagttcaacggtccccctcctccaccgcctccacctccaccccacttactgtcctgctggttgccacctttcccttccggccctcccatcatccctcccccaccccctatttgtcccgactcattggatgacgctgatgcactgggaagtatgctgatttcttggtatatgagcgggtatcataccggctactacatgacaggttttcactgcgtctctcaggatgggcttaacctgctgaccccttag

SEQ ID NO: 340434 - DNA, 1550 bp, Artificial Sequence
  derived and/or modified sequence
gccccacgctgcgcacccgcgggtttgctatggcgatgagcagcggcggcagtggtggcggcgtcccggagcaggaggattccgtgctgttccggcgcggcacaggccagagcgatgattctgacatttgggatgatacagcactgataaaagcatatgataaagctgtggcttcatttaagcatgctctaaagaatggtgacatttgtgaaacttcgggtaaaccaaaaaccacacctaaaagaaaacctgctaagaagaataaaagccaaaagaagaatactgcagcttccttacaacagtggaaagttggggacaaatgttctgccatttggtcagaagacggttgcatttacccagctaccattgcttcaattgattttaagagagaaacctgtgttgtggtttacactggatatggaaatagagaggagcaaaatctgtccgatctactttccccaatctgtgaagtagctaataatatagaacaaaatgctcaagagaatgaaaatgaaagccaagtttcaacagatgaaagtgagaactccaggtctcctggaaataaatcagataacatcaagcccaaatctgctccatggaactcttttctccctccaccaccccccatgccagggccaagactgggaccaggaaagccaggtctaaaattcaatggcccaccaccgccaccgccaccaccaccaccccacttactatcatgctggctgcctccatttccttctggaccaccaataattcccccaccacctcccatatgtccagattctcttgatgatgctgatgctttgggaagtatgttaatttcatggtacatgagtggctatcatactggctattatatgacagggtttcactgtgttagccaggatggtctcaatctcctgaccccgtgatccacccgcctcggccttccaagagaaatgaaatttttttaatgcacaaagatctggggaaatgctggcatagagcagcactaaatgacaccactaaagaaacgatcagacagatctggaatgtgaagcgttatagaagataactggcctcatttcttcaaaatatcaagtgttgggaaagaaaaaaggaagtggaatgggtaactcttcttgattaaaagttatgtaataaccaaatgcaatgtgaaatattttactggactctattttgaaaaaccatctgtaaaagactggggtgggggtgggaggccagcacggtggtgaggcagttgagaaaatttgaatgtggattagattttgaatgatattggataattattggtaattttatgagctgtgagaagggtgttgtagtttataaaagactgtcttaatttgcatacttaagcatttaggaatgaagtgttagagtgtcttaaaatgtttcaaatggtttaacaaaatgtatgtgaggcgtatgtggcaaaatgttacagaatctaactggtggacatggctgttcattgtactgtttttttctatcttctatatgtttaaaagtatataataaaaatatttaatttttttttaaattag

SEQ ID NO: 340435 - DNA, 1550 bp, Artificial Sequence
  derived and/or modified sequence
gccccacgctgcgcacccgcgggtttgctatggcgatgagcagcggcggcagtggtggcggcgtcccggagcaggaggattccgtgctgttccggcgcggcacaggccagagcgatgattctgacatttgggatgatacagcactgataaaagcatatgataaagctgtggcttcatttaagcatgctctaaagaatggtgacatttgtgaaacttcgggtaaaccaaaaaccacacctaaaagaaaacctgctaagaagaataaaagccaaaagaagaatactgcagcttccttacaacagtggaaagttggggacaaatgttctgccatttggtcagaagacggttgcatttacccagctaccattgcttcaattgattttaagagagaaacctgtgttgtggtttacactggatatggaaatagagaggagcaaaatctgtccgatctactttccccaatctgtgaagtagctaataatatagaacaaaatgctcaagagaatgaaaatgaaagccaagtttcaacagatgaaagtgagaactccaggtctcctggaaataaatcagataacatcaagcccaaatctgctccatggaactcttttctccctccaccaccccccatgccagggccaagactgggaccaggaaagccaggtctaaaattcaatggcccaccaccgccaccgccaccaccaccaccccacttactatcatgctggctgcctccatttccttctggaccaccaataattcccccaccacctcccatatgtccagattctcttgatgatgctgatgctttgggaagtatgttaatttcatggtacatgagtggctatcatactggctattatatgacagggtttcactgtgttagccaggatggtctcaatctcctgaccccgtgatccacccgcctcggccttccaagagaaatgaaatttttttaatgcacaaagatctggggaaatgctggcatagagcagcactaaatgacaccactaaagaaacgatcagacagatctggaatgtgaagcgttatagaagataactggcctcatttcttcaaaatatcaagtgttgggaaagaaaaaaggaagtggaatgggtaactcttcttgattaaaagttatgtaataaccaaatgcaatgtgaaatattttactggactctattttgaaaaaccatctgtaaaagactgaggtgggggtgggaggccagcacggtggtgaggcagttgagaaaatttgaatgtggattagattttgaatgatattggataattattggtaattttatgagctgtgagaagggtgttgtagtttataaaagactgtcttaatttgcatacttaagcatttaggaatgaagtgttagagtgtcttaaaatgtttcaaatggtttaacaaaatgtatgtgaggcgtatgtggcaaaatgttacagaatctaactggtggacatggctgttcattgtactgtttttttctatcttctatatgtttaaaagtatataataaaaatatttaatttttttttaaattag

SEQ ID NO: 340436 - DNA, 882 bp, Artificial Sequence
  derived and/or modified sequence
atggccatgagcagcggcggcagcggcggcggcgtgcccgagcaggaggacagcgtgctgttccgccgcggcaccggccagagcgacgacagcgacatctgggacgacaccgccctgatcaaggcctacgacaaggccgtggccagcttcaagcacgccctgaagaacggcgacatctgcgagaccagcggcaagcccaagaccacccccaagcgcaagcccgccaagaagaacaagagccagaagaagaacaccgccgccagcctgcagcagtggaaggtgggcgacaagtgcagcgccatctggagcgaggacggctgcatctaccccgccaccatcgccagcatcgacttcaagcgcgagacctgcgtggtggtgtacaccggctacggcaaccgcgaggagcagaacctgagcgacctgctgagccccatctgcgaggtggccaacaacatcgagcagaacgcccaggagaacgagaacgagagccaggtgagcaccgacgagagcgagaacagccgcagccccggcaacaagagcgacaacatcaagcccaagagcgccccctggaacagcttcctgcccccccccccccccatgcccggcccccgcctgggccccggcaagcccggcctgaagttcaacggccccccccccccccccccccccccccccccccacctgctgagctgctggctgccccccttccccagcggcccccccatcatccccccccccccccccatctgccccgacagcctggacgacgccgacgccctgggcagcatgctgatcagctggtacatgagcggctaccacaccggctactacatgaccggcttccactgcgtgagccaggacggcctgaacctgctgaccccc

SEQ ID NO: 340437 - protein, 227 aa, Artificial Sequence
  derived and/or modified sequence
MAMSSGGSGGGVPEQEDSVLFRRGTGQSDDSDIWDDTALIKAYDKAVASFKHALKNGDICETSGKPKTTPKRKPAKKNKSQKKNTAASLQQNENESQVSTDESENSRSPGNKSDNIKPKSAPWNSFLPPPPPMPGPRLGPGKPGLKFNGPPPPPPPPPPHLLSCWLPPFPSGPPIIPPPPPICPDSLDDADALGSMLISWYMSGYHTGYYMGFRQNQKEGRCSHSLN

SEQ ID NO: 340438 - DNA, 684 bp, Artificial Sequence
  derived and/or modified sequence
atggccatgagcagcggcggcagcggcggcggcgtgcccgagcaggaggacagcgtgctgttcagaagaggcaccggccagagcgacgacagcgacatctgggacgacaccgccctgatcaaggcctacgacaaggccgtggccagcttcaagcacgccctgaagaacggcgacatctgcgagaccagcggcaagcccaagaccacccccaagagaaagcccgccaagaagaacaagagccagaagaagaacaccgccgccagcctgcagcagaacgagaacgagagccaggtgagcaccgacgagagcgagaacagcagaagccccggcaacaagagcgacaacatcaagcccaagagcgccccctggaacagcttcctgcccccccccccccccatgcccggccccagactgggccccggcaagcccggcctgaagttcaacggccccccccccccccccccccccccccccccccacctgctgagctgctggctgccccccttccccagcggcccccccatcatccccccccccccccccatctgccccgacagcctggacgacgccgacgccctgggcagcatgctgatcagctggtacatgagcggctaccacaccggctactacatgggcttcagacagaaccagaaggagggcagatgcagccacagcctgaactag

SEQ ID NO: 340439 - DNA, 684 bp, Artificial Sequence
  derived and/or modified sequence
atggccatgtcatcaggcggtagtggaggtggggtgcccgagcaggaggactcagttctctttaggcgtggaaccggccagagtgacgatagcgatatttgggatgacactgcccttattaaagcctatgacaaagccgtcgcctcattcaagcacgcccttaagaacggggacatttgcgagacttctgggaaaccgaaaaccaccccaaaaaggaaaccagctaaaaagaacaaaagccagaaaaagaatacagctgcatccctgcagcaaaatgagaatgagtcacaggtgagcaccgatgagtccgagaactcccgctctccagggaacaagagtgataacattaaaccaaaaagcgcaccttggaacagtttcctgccaccgcctccccccatgcctgggccccggctgggccctggtaagcctgggctgaagtttaacggcccacctccacctccgccacctccgccacctcacttgctctcatgctggctcccacctttccctagcggcccaccaataattccgcctcctcctcccatttgcccagatagtcttgacgacgcagatgcgctgggatccatgctgatctcttggtacatgtctggttaccatacaggttactatatggggttcaggcagaatcaaaaagagggaaggtgtagtcatagtctgaattag

SEQ ID NO: 340440 - DNA, 684 bp, Artificial Sequence
  derived and/or modified sequence
atggctatgagcagcggaggcagcggcggaggtgtgccggagcaggaggattccgtgctgttccggcgaggaaccggacagtctgacgacagtgatatttgggatgacacggccctaatcaaagcatacgacaaggctgtcgccagttttaaacatgctctcaagaatggtgatatttgtgaaacgtccggaaagccaaaaacaacacctaagcgcaagccagccaaaaaaaacaagtcccaaaaaaagaacaccgcagcctctcttcaacaaaacgaaaacgaatctcaggtgagtacagatgaatcagaaaactctagatcccctggcaacaagtcagacaacattaagcccaaatcggcaccctggaatagctttctcccaccacccccacccatgcctggaccacgtttaggaccagggaaacccgggctgaagttcaacggaccgccacctcctccaccacctccgcctccccacttgctatcgtgttggctgcctccattcccttcaggccctcccattattccaccaccacctcccatctgccccgattcgctcgacgacgctgatgcactcggtagcatgctcatatcctggtatatgagtggttatcatacgggctactacatggggtttcgtcagaaccagaaagaaggtagatgttcccactcactgaactag

SEQ ID NO: 340441 - DNA, 684 bp, Artificial Sequence
  derived and/or modified sequence
atggccatgagcagcggcggcagcggcggcggcgtgcctgagcaggaggacagcgtgctcttccggcggggcaccggccagagtgatgacagcgacatctgggatgacacagccctgatcaaggcctatgacaaggctgtggccagcttcaagcacgccctgaagaatggagacatctgtgagaccagcggcaagcccaagaccacccccaagaggaagccagccaagaagaacaagagccagaagaagaacacagctgccagcctgcagcagaatgaaaatgaaagccaggtgtccacagatgaaagtgagaacagccgcagccctggcaacaagagtgacaacatcaagcccaagagcgccccctggaacagcttcctgcccccacctccacccatgcctggcccccggctgggccctgggaagccaggcctgaagttcaacggccccccacctcctcctcctcctcctccaccccacctgctgagctgctggctgccccccttccccagcggcccccccatcatccccccacctccacccatctgcccagacagcctggatgatgctgatgccctgggctccatgctgatctcctggtacatgagcggctaccacacaggctactacatgggcttccggcagaaccagaaggagggccgctgcagccacagcctgaactag

SEQ ID NO: 340442 - DNA, 684 bp, Artificial Sequence
  derived and/or modified sequence
atggccatgagcagcggcggcagcggcggcggcgtgcccgagcaggaagactctgtcttatttcgtcgggggactggccagtccgatgattcagacatctgggacgacaccgccctcatcaaggcatacgacaaagcagtcgcctcttttaagcacgctctgaaaaacggagacatatgcgagaccagcggcaaacctaagaccacccccaaacgcaagccagccaaaaagaacaagtcccagaagaaaaataccgccgcatccctgcaacagaatgagaacgagagtcaggtgtcgacagatgaaagcgagaattcccgatcgcccggaaacaagagtgataacataaaacccaagtccgcgccgtggaactcattcctccctccaccacctcccatgccgggtccgcgtttaggcccaggcaaacccggattgaaattcaatgggcctcctcctccccctcctcccccccccccccacctcttgtcctgttggctgccacctttcccctccggccctcctatcatcccccccccccctccaatttgtcccgattctctcgatgacgccgacgctctcgggtcaatgctcatcagttggtacatgtcaggatatcatactggctattacatgggcttccgccagaaccagaaggaaggcagatgcagccacagcctaaactag

SEQ ID NO: 340443 - DNA, 684 bp, Artificial Sequence
  derived and/or modified sequence
atggccatgagcagcggcggcagcggcggcggcgtgcccgagcaggaagacagcgtgttattccggagagggaccgggcagtccgacgatagcgatatttgggatgacactgctctaatcaaagcatacgacaaggcagtggccagcttcaagcatgcgctgaagaatggcgatatctgtgaaacatctggaaagcccaagaccaccccgaagcggaaacctgctaaaaaaaataaatctcaaaaaaagaatacggccgcaagcctccagcagaatgagaacgagagtcaggtgtccacagatgagagtgagaactcccgttctccaggcaacaagagcgacaatataaaaccaaaaagcgcaccttggaactccttccttccaccaccgcctcccatgccgggtccaaggttaggtcccggtaagcccggcctaaagtttaacgggccgcccccacctccgccccctccacccccccacctactgtcctgttggctgccccctttcccctctggtcccccgattatccccccacccccgcccatctgtccggactcactggacgacgcagatgcgctaggttccatgcttatcagttggtacatgtcaggataccatactgggtattacatgggttttcggcagaaccaaaaggaaggtagatgctcccattcccttaattag

SEQ ID NO: 340444 - DNA, 684 bp, Artificial Sequence
  derived and/or modified sequence
atggccatgagttcagggggtagcggaggaggtgtcccagagcaggaggactctgtacttttcaggcggggtacgggccagtcagacgactcagatatatgggatgacacggccctcatcaaggcatacgataaagctgtcgcctctttcaagcatgccttaaaaaatggcgacatttgcgaaacaagtggcaaacctaaaacgacaccaaaacggaaacctgccaagaagaacaagagtcaaaaaaaaaataccgcggcttcactgcagcagaatgaaaatgaaagtcaggtgtctaccgacgagtctgagaattccagaagccccggtaataagtccgataatatcaaacccaaaagcgctccatggaactcctttctgccaccccctccaccaatgcccggaccccgtctgggccctgggaagccagggctgaagttcaacggccctccccctcccccacctcccccacctccgcatcttttatcgtgttggctccctcccttccccagcgggccaccaatcataccccctccacctcccatatgtcctgattctctcgacgatgccgacgcgcttggatctatgttgattagctggtatatgtcggggtaccacacgggatactacatgggttttcgccagaaccagaaggagggcaggtgctctcactccttgaactag

SEQ ID NO: 340445 - DNA, 684 bp, Artificial Sequence
  derived and/or modified sequence
atggcgatgtcatccggtggttctggcggtggcgtgccagagcaagaggattccgtcctcttccggaggggaactggccagtctgacgacagtgatatttgggacgacacagcattaatcaaagcttacgataaggctgtggcaagttttaagcatgctctaaaaaacggcgatatttgcgagacatcaggtaagcccaaaactacacctaaacgaaagcccgcaaagaagaataaatcccaaaaaaagaacaccgcagcgtctctccagcagaacgagaacgagtctcaggtcagcacagatgaatctgagaacagccgcagtcccggaaacaaatctgataacatcaagcctaagtcagccccttggaactcattcctgccaccacctcctccaatgcctggtccccgtctgggccctggaaagcccggtctgaaatttaatgggcctcctccacctccccctcctccacctccacatctgctctcctgctggcttccaccattcccatcaggcccaccaataatacctcctcctcctcccatctgtccagacagcctggacgacgctgatgcactagggtccatgctcatatcatggtacatgtccggctaccataccggatactacatggggtttcgccaaaaccagaaggaaggaaggtgcagtcattccctaaattag

SEQ ID NO: 340446 - DNA, 1308 bp, Artificial Sequence
  derived and/or modified sequence
actcttaagaagggacggggccccacgctgcgcacccgcgggtttgctatggcgatgagcagcggcggcagtggtggcggcgtcccggagcaggaggattccgtgctgttccggcgcggcacaggccagagcgatgattctgacatttgggatgatacagcactgataaaagcatatgataaagctgtggcttcatttaagcatgctctaaagaatggtgacatttgtgaaacttcgggtaaaccaaaaaccacacctaaaagaaaacctgctaagaagaataaaagccaaaagaagaatactgcagcttccttacaacagaatgaaaatgaaagccaagtttcaacagatgaaagtgagaactccaggtctcctggaaataaatcagataacatcaagcccaaatctgctccatggaactcttttctccctccaccaccccccatgccagggccaagactgggaccaggaaagccaggtctaaaattcaatggcccaccaccgccaccgccaccaccaccaccccacttactatcatgctggctgcctccatttccttctggaccaccaataattcccccaccacctcccatatgtccagattctcttgatgatgctgatgctttgggaagtatgttaatttcatggtacatgagtggctatcatactggctattatatgggtttcagacaaaatcaaaaagaaggaaggtgctcacattccttaaattaaggagtaagtctgccagcattatgaaagtgaatcttacttttgtaaaactttatggtttgtggaaaacaaatgtttttgaacatttaaaaagttcagatgttaaaaagttgaaaggttaatgtaaaacaatcaatattaaagaattttgatgccaaaactattagataaaaggttaatctacatccctactagaattctcatacttaactggttggttatgtggaagaaacatactttcacaataaagagctttaggatatgatgccattttatatcactagtaggcagaccagcagacttttttttattgtgatatgggataacctaggcatactgcactgtacactctgacatatgaagtgctctagtcaagtttaactggtgtccacagaggacatggtttaactggaattcgtcaagcctctggttctaatttctcatttgcaggaaatgctggcatagagcagcactaaatgacaccactaaagaaacgatcagacagatctggaatgtgaagcgttatagaagataactggcctcatttcttcaaaatatcaagtgttgggaaagaaaaaa

SEQ ID NO: 340447 - DNA, 867 bp, Artificial Sequence
  derived and/or modified sequence
actcttaagaagggacggggccccacgctgcgcacccgcgggtttgctatggcgatgagcagcggcggcagtggtggcggcgtcccggagcaggaggattccgtgctgttccggcgcggcacaggccagagcgatgattctgacatttgggatgatacagcactgataaaagcatatgataaagctgtggcttcatttaagcatgctctaaagaatggtgacatttgtgaaacttcgggtaaaccaaaaaccacacctaaaagaaaacctgctaagaagaataaaagccaaaagaagaatactgcagcttccttacaacagaatgaaaatgaaagccaagtttcaacagatgaaagtgagaactccaggtctcctggaaataaatcagataacatcaagcccaaatctgctccatggaactcttttctccctccaccaccccccatgccagggccaagactgggaccaggaaagccaggtctaaaattcaatggcccaccaccgccaccgccaccaccaccaccccacttactatcatgctggctgcctccatttccttctggaccaccaataattcccccaccacctcccatatgtccagattctcttgatgatgctgatgctttgggaagtatgttaatttcatggtacatgagtggctatcatactggctattatatgggttttagacaaaatcaaaaagaaggaaggtgctcacattccttaaattaaggagtaagtctgccagcattatgaaagtgaatcttacttttgtaaaactttatggtttgtggaaaacaaatgtttttgaacatttaaaaagttcagatgttagaaagttgaaaggttaatgtaaaacaatcaata

SEQ ID NO: 340448 - DNA, 681 bp, Artificial Sequence
  derived and/or modified sequence
atggccatgagcagcggcggcagcggcggcggcgtgcccgagcaggaggacagcgtgctgttccgccgcggcaccggccagagcgacgacagcgacatctgggacgacaccgccctgatcaaggcctacgacaaggccgtggccagcttcaagcacgccctgaagaacggcgacatctgcgagaccagcggcaagcccaagaccacccccaagcgcaagcccgccaagaagaacaagagccagaagaagaacaccgccgccagcctgcagcagaacgagaacgagagccaggtgagcaccgacgagagcgagaacagccgcagccccggcaacaagagcgacaacatcaagcccaagagcgccccctggaacagcttcctgcccccccccccccccatgcccggcccccgcctgggccccggcaagcccggcctgaagttcaacggccccccccccccccccccccccccccccccccacctgctgagctgctggctgccccccttccccagcggcccccccatcatccccccccccccccccatctgccccgacagcctggacgacgccgacgccctgggcagcatgctgatcagctggtacatgagcggctaccacaccggctactacatgggcttccgccagaaccagaaggagggccgctgcagccacagcctgaac

SEQ ID NO: 340449 - DNA, 186 bp, Artificial Sequence
  derived and/or modified sequence
atgcagagaaacctgggcaccgagcccaagatggccccccaggagaaccagctgcaggagaaggagaacagcagacccgacagcagcctgcccgagaccagcaagaaggagcacatcagcgccgagaacatgagcctggagaccctgagaaacagcagccccgaggacctgttcgtgagcatctag

SEQ ID NO: 340450 - DNA, 186 bp, Artificial Sequence
  derived and/or modified sequence
atgcagcggaacttgggaacagagcccaagatggccccacaggagaatcagcttcaggagaaggaaaactcacggcccgactccagccttcccgagactagcaaaaaagaacacatttccgcagagaacatgagcctagagacgctgaggaatagctcgcctgaggacctgttcgtgtctatttag

SEQ ID NO: 340451 - DNA, 186 bp, Artificial Sequence
  derived and/or modified sequence
atgcagaggaacctgggcacagagcccaagatggccccccaggagaaccagctgcaggagaaggagaacagcaggccagacagcagcctgcctgagaccagcaagaaggagcacatctctgctgagaacatgagcctggagaccctgaggaacagcagccctgaggacctgtttgtgtccatctag

SEQ ID NO: 340452 - DNA, 186 bp, Artificial Sequence
  derived and/or modified sequence
atgcagcggaacctgggcaccgagcccaagatggccccccaggagaaccagctccaagagaaggagaattcaaggcccgacagctcattgcctgagacgtcaaagaaagagcacatctccgcagagaatatgtccctggagacacttagaaatagttctcctgaggatttgtttgtgtccatctag

SEQ ID NO: 340453 - DNA, 186 bp, Artificial Sequence
  derived and/or modified sequence
atgcagagaaacctggggactgagcccaaaatggcccctcaggaaaatcagttgcaggaaaaagaaaactcaagaccggatagctcactacccgagacctctaaaaaggagcatatcagcgccgaaaacatgtctctggagacattaagaaattccagccccgaggatctgtttgtctctatttag

SEQ ID NO: 340454 - protein, 75 aa, Artificial Sequence [sequence omitted]

SEQ ID NO: 340455 - DNA, 228 bp, Artificial Sequence
  derived and/or modified sequence
atgagcaagctggtgtacctgtacatgctgagagtgtacatcagcaacatcaacagcaacagcgtggtgtacatcttcatcagcatccccgtgacccacagcctggacaactggaccttcctggtgagcttcgagatcggcaagtacgagagcagcaacttcgtgctgttccacgactacagcggctacgtgagacccctgagcatcccctacgagctggagggctag

SEQ ID NO: 340456 - DNA, 228 bp, Artificial Sequence
  derived and/or modified sequence
atgagcaaactggtgtatctgtatatgctgcgggtatacataagcaatattaatagtaactcggtggtgtatatttttattagcatccctgttacacatagcctggataattggacatttctcgtcagtttcgagataggaaagtatgagagtagtaactttgtattgtttcacgactactctggttacgtaaggccactaagcatcccctacgagctcgaggggtag

SEQ ID NO: 340457 - DNA, 228 bp, Artificial Sequence
  derived and/or modified sequence
atgagcaagctggtgtacctgtacatgctgcgggtgtacatcagcaacatcaacagcaacagcgtggtgtacatcttcatcagcatccctgtgacccacagcctggacaactggaccttcctggtgtcctttgagatcggcaagtatgagagcagcaactttgtgctcttccatgactacagcggctacgtgcggcccctgagcatcccctatgagctggagggctag

SEQ ID NO: 340458 - DNA, 228 bp, Artificial Sequence
  derived and/or modified sequence
atgagcaagctggtgtacctgtacatgctgcgggtgtacatcagcaacataaattctaattctgtggtatacatatttatctccatccctgtgacccattcactggacaactggacctttttggtttccttcgagataggaaagtacgagtcctccaactttgtgctctttcatgactactcaggctatgtgcgccctttgtctattccgtacgagctcgaggggtag

SEQ ID NO: 340459 - DNA, 228 bp, Artificial Sequence
  derived and/or modified sequence
atgtctaagctcgtatatctctatatgctccgcgtgtatatttctaacatcaacagcaacagcgtggtgtacatctttatttcaatccccgtcactcactcccttgacaactggacatttcttgtgagtttcgagattggaaagtacgaaagcagcaatttcgtgctctttcacgattatagcgggtacgtgcgtcccttaagcatcccctacgagctggaaggttag

SEQ ID NO: 340460 - DNA, 1258 bp, Artificial Sequence
  derived and/or modified sequence
gccttttgtcaccttttggtgtcatatcgaaaaatacattgccaaatccaaggtcatgaaattttacctctatgtgatcttctaagagttttatgttttagattatatatttaggtgattgatttcttttaattaatttttgtatgttttcagatggtgatctgacatcattttttaatatggaagtccagttttcttagtaccatttattgaaaagattatctttttactattgaatacccttggaacccatgtcaaaattagtttatctatatatgttaagggtttatatctcaaatataaattctaattcagtggtctatatatttatttctataccagtaacacactctttagataattggacctttttagtaagttttgaaattgggaaatatgaatcttccaactttgttctttttcatgattattcaggctatgtaaggccactttcaattccatatgaacttgagggttagcttatccatttctgcaaaacagttggaattttaataaacatcacattgaatctgtagattgttttgggtagcattgacatttcaatgacttacattttccaatctatgaatgcaagaagtatttctatattttaggtattctttatttttataatttttaatttttatgggtatttagtaggtgtatatatatatggagtacatgatgtgttttgatagaggtatgcaatgtataataatcacatcatggaaaatagagtatccatccccacgagcatttatatttaggtcttctttaattttttcaacaattttgttttccctttctaattttcagagtgtaagtctttcatttcttttgttaaatgtattactatatatttcattctttttgatgctattgtaaaaggaattattttattaattttaataattttcttatataatcttaaatttacaaattattcattgtgattgtatagggatacaacctattttgcatgtcaaacttgtactttgtaacttttctgaatgcatttattaggtagagtagctttttaaattttttttatttttaatttttctgagtacatagtaggtgtatgtatttatatggcacatgagatgttttgatacaggcatataatgtgtaataatcgcatcatggaacatgagatactcatccactcaagaatttatgctttgtgttacaaacaatccaattacactcttttagttattttaaaatatacaatgtaattattgactgtacccactcc

SEQ ID NO: 340461 - DNA, 19184 bp, Artificial Sequence
  derived and/or modified sequence
gtagatgtatttatgtttttagggatgccctctgcatctttattagtaaatcttctttcagctttactcatcctatttgtgtttggagaaacagaaataagatttactggacaaactgaatttgttgttaatgaaacaagtacaacagttattcgtcttatcattgaaaggataggagagccagcaaatgttactgcaattgtatcgctgtatggagaggacgctggtgacttttttgacacatatgctgcagcttttatacctgccggagaaacaaacagaacagtgtacatagcagtatgtgatgatgacttaccagagcctgacgaaacttttatttttcacttaacattacagaaaccttcagcaaatgtgaagcttggatggccaaggactgttactgtgacaatattatcaaatgacaatgcatttggaattatttcatttaatatgcttccctcaatcgcagtgagtgagcccaagggcagaaatgagtctatgcctcttactctcatcagggaaaagggaacctatggaatggtcatggtgacttttgaggtagagggtggcccaaatccccctgatgaagatttgagtccagttaaaggaaatatcacctttccccctggcagagcaacagtaatttataacttgacagtactcgatgacgaggtaccagaaaatgatgaaatatttttaattcaactgaaaagtgtagaaggaggagctgagattaacacctctaggaattccattgagatcatcattaagaaaaatgatagtcccgtgagattccttcagagtatttatttggttcctgaggaagaccacatactcataattccagtagttcgtggaaaggacaacaatggaaatctgattggatctgatgaatatgaggtttcaatcagttatgctgtcacaactgggaattccacagcacatgcccagcaaaatctggacttcattgatcttcagccaaacacaactgttgtttttccaccttttattcatgaatctcacttgaaatttcaaatagttgatgacaccataccggagattgctgaatcgtttcacattatgttactaaaagataccttacagggagatgctgtgctaataagcccttctgttgtacaagtcaccattaagccaaatgataaaccttatggagtcctttcattcaacagtgttttgtttgaaaggacagttataattgatgaagatagaatatcaagatatgaagaaatcacagtggttagaaatggaggaacccatgggaatgtctctgcgaattgggtgttgacacggaacagcactgatccctcaccagtaacagcagatatcagaccgagctctggagttctccattttgcacaagggcagatgttggcaacaattcctcttactgtggttgatgatgatcttccagaagaggcagaagcttatctacttcaaattctgcctcatacaatacgaggaggtgcagaagtgagcgagccagcggagcttttgttctacattcaggatagtgatgatgtctatggcctaataacattttttcctatggaaaaccagaagattgaaagcagcccaggtgaacgatacttatccttgagttttacaagactaggagggactaaaggagatgtgaggttgctttattctgtactttacattcctgctggagctgtggaccccttgcaagcaaaagaaggcatcttaaatatatcaaggagaaatgacctcatttttccagagcaaaaaactcaagtcactacaaaattaccaataagaaatgatgcattccttcaaaatggagctcactttctagtacagttggaaactgtggagttgttaaacataattcctctaatcccacccataagccctagatttggggaaatctgcaatatttctttactggttactccagccattgcaaatggagaaattggctttctcagcaatcttccaattattttgcatgaaccagaagattttgctgctgaagtggtatacattcccttacatcgggatggaactgatggccaggctactgtctactggagtttgaagccctctggctttaattcaaaagcagtgaccccggatgatataggcccctttaatggctctgttttgtttttatctgggcaaagtgacacaacaatcaacattactatcaaaggtgatgacataccggaaatgaatgaaactgtaacactttctctagacagggttaacgtggaaaaccaagtgctgaaatctggatatactagccgtgacctaattattttggaaaatgatgaccctgggggagtttttgaattttctcctgcttccagaggaccctatgttataaaagaaggagaatctgtagagctccacatcatccgatcaagggggtcccttgttaagcagtttctacactaccgagtagagccaagagatagcaatgaattctatggaaacacgggagtactagaatttaaacctggagaaagggagatagtgatcaccttgctagcaagattggatgggataccagagttggatgaacactactgggtggtcctcagcagccacggagaacgggaaagcaagttgggaagtgccaccattgtcaatataacgattctgaaaaatgatgatcctcatggcattatagaatttgtttctgatggtctaattgtgatgataaatgaaagcaaaggagatgctatctatagtgctgtttatgatgtagtaagaaatcgaggcaactttggtgatgttagtgtatcatgggtggttagtccagactttacacaagatgtatttcctgtacaagggactgttgtctttggagatcaggaattttcaaaaaatatcaccatttactcccttccagatgagattccagaagaaatggaagaatttaccgttatcctactgaatggcactggaggagctaaagtgggaaatagaacaactgcaactctgaggattagaagaaatgatgaccccatttattttgcagaacctcgtgtagtgagggttcaggaaggtgagactgccaactttacagttctcagaaatggatctgttgatgtgacttgcatggtccagtatgctaccaaggatgggaaggctactgcaagagagagagatttcattcctgttgaaaaaggagaaacgctcatttttgaggttggaagtagacagcagagcatatccatatttgttaatgaagatggtatcccggaaacagatgagcccttttatataatcctcttgaattcaacaggtgatacagtagtatatcaatatggagtagctacagtaataattgaagctaatgatgacccaaatggcattttttctctggagcccatagacaaagcagtggaagaaggaaagactaatgcattttggattttgaggcaccgaggatactttggtagtgtttctgtatcttggcagctctttcagaatgattctgctttgcagcctgggcaggagttctatgaaacttcaggaactgttaacttcatggatggagaagaagcaaaaccaatcattctccatgcttttccagataaaattcctgaattcaatgaattttatttcctaaaacttgtaaacatttcaggtggatccccaggtcctgggggccagctagcagaaaccaacctccaggtgacagtaatggttccattcaatgatgatccctttggagtttttatcttggatccagagtgtttagagagagaagtggcagaagatgtcctgtctgaagatgatatgtcttatattaccaacttcaccattttgaggcagcagggtgtgtttggtgatgtacaactgggctgggaaatactgtccagtgagttccctgctggtttgccaccaatgatagattttttactggttggaattttccccaccaccgtgcatttacaacagcacatgcggcgtcaccacagtggaacggatgctttgtactttaccggactagagggtgcatttgggactgttaatccaaaataccatccctccaggaataatacaattgccaactttacattctcagcttgggtaatgcccaatgccaatacgaatggattcattatagcgaaggatgacggtaatggaagcatctactacggggtaaaaatacaaacaaacgaatcccatgtgacactttcccttcattataaaaccttgggttccaatgctacatacattgccaagacaacagtcatgaaatatttagaagaaagtgtttggcttcatctactaattatcctggaggatggtataatcgaattctacctggatggaaatgcaatgcccaggggaatcaagagtctgaaaggagaagccattactgacggtcctgggatactgagaattggagcagggataaatggcaatgacagatttacaggtctgatgcaggatgtgaggtcctatgagcggaaactgacgcttgaagaaatttatgaacttcatgccatgcccgcaaaaagtgatttacacccaatttctggatatctggagttcagacagggagaaactaacaaatcattcattatttctgcaagagatgacaatgacgaggaaggagaagaattattcattcttaaactagtttctgtatatggaggagctcgtatttcggaagaaaatactactgcaagattaacaatacaaaaaagtgacaatgcaaatggcttgtttggtttcacaggagcttgtataccagagattgcagaggagggatcaaccatttcttgtgtggttgagagaaccagaggagctctggattatgtgcatgttttttacaccatttcacagattgaaactgatggcattaattaccttgttgatgactttgctaatgccagtggaactattacattccttccttggcagagatcagaggttctgaatatatatgttcttgatgatgatattcctgaacttaatgagtatttccgtgtgacattggtttctgcaattcctggagatgggaagctaggctcaactcctaccagtggtgcaagcatagatcctgaaaaggaaacgactgatatcaccatcaaagctagtgatcatccatatggcttgctgcagttctccacagggctgcctcctcagcctaaggacgcaatgaccctgcctgcaagcagcgttccacatatcactgtggaggaggaagatggagaaatcaggttattggtcatccgtgcacagggacttctgggaagggtgactgcggaatttagaacagtgtccttgacagcattcagtcctgaggattaccagaatgttgctggcacattagaatttcaaccaggagaaagatataaatacattttcataaacatcactgataattctattcctgaactggaaaaatcttttaaagttgagttgttaaacttggaaggaggagtagctgaactctttagggttgatggaagtggtagtggtgatggggacatggaattcttccttccaactattcacaaacgtgccagtctaggagtggcttcccaaattctagtgacaattgcagcctctgaccacgctcatggcgtatttgaatttagccctgagtcactctttgtcagtggaactgaaccagaagatgggtatagcactgttacattaaatgttataagacatcatggaactctgtctccagtgactttgcattggaacatagactctgatcctgatggtgatctcgccttcacctctggcaacatcacatttgagattgggcagacgagcgccaatatcactgtggagatattgcctgacgaagacccagaactggataaggcattctctgtgtcagtcctcagtgtttccagtggttctttgggagctcatattaatgccacgttaacagttttggctagtgatgatccatatgggatattcattttttctgagaaaaacagacctgttaaagttgaggaagcaacccagaacatcacactatcaataataaggttgaaaggcctcatgggaaaagtccttgtctcatatgcaacactagatgatatggaaaaaccaccttattttccacctaatttagcgagagcaactcaaggaagagactatataccagcttctggatttgctctttttggagctaatcagagtgaggcaacaatagctatttcaattttggatgatgatgagccagaaaggtccgaatctgtctttatcgaactactcaactctactttagtagcgaaagtacagagtcgttcaattccaaattctccacgtcttgggcctaaggtagaaactattgcgcaactaattatcattgccaatgatgatgcatttggaactcttcagctctcagcaccaattgtccgagtggcagaaaatcatgttggacccattatcaatgtgactagaacaggaggagcatttgcagatgtctctgtgaagtttaaagctgtgccaataactgcaatagctggtgaagattatagtatagcttcatcagatgtggtcttgctagaaggggaaaccagtaaagccgtgccaatatatgtcattaatgatatctatcctgaactggaagaatcttttcttgtgcaactgatgaatgaaacaacaggaggagccagactaggggctttaacagaggcagtcattattattgaggcctctgatgacccctatggattatttggttttcagattactaaacttattgtagaggaacctgagtttaactcagtgaaggtaaacctgccaataattcgaaattctgggacactcggcaatgttactgttcagtgggttgccaccattaatggacagcttgctactggcgacctgcgagttgtctcaggtaatgtgacctttgcccctgggatgtcaagttatccaagtgcaactaactgatgcctctggtggaggtactattgggttagatcgaattgcaaatattattattcctgccaatgatgatccttatggtacagtagcctttgctcagatggtttatcgtgttcaagagcctctggaaagaagttcctgtgctaatataactgtcaggcgaagcggagggcactttggtcggctgttgttgttctacagtacttccgacattgatgtagtggctctggcaatggaggaaggtcaagatttactgtcctactatgaatctccaattcaaggggtgcctgacccactttggagaacttggatgaatgtctctgccgtgggggagcccctgtatacctgtgccactttgtgccttaaggaacaagcttgctcagcgttttcatttttcagtgcttctgagggtccccagtgtttctggatgacatcatggatcagcccagctgtcaacaattcagacttctggacctacaggaaaaacatgaccagggtagcatctctttttagtggtcaggctgtggctgggagtgactatgagcctgtgacaaggcaatgggccataatgcaggaaggtgatgaattcgcaaatctcacagtgtctattcttcctgatgatttcccagagatggatgagagttttctaatttctctccttgaagttcacctcatgaacatttcagccagtttgaaaaatcagccaaccataggacagccaaatatttctacagttgtcatagcactaaatggtgatgcctttggagtgtttgtgatctacaatattagtcccaatacttccgaagatggcttatttgttgaagttcaggagcagccccaaaccttggtggagctgatgatacacaggacagggggcagcttaggtcaagtggcagtcgaatggcgtgttgttggtggaacagctactgaaggtttagattttataggtgctggagagattctgacctttgctgaaggtgaaaccaaaaagacagtcattttaaccatcttggatgactctgaaccagaggatgacgaaagtatcatagttagtttggtgtacactgaaggtggaagtagaattttgccaagctccgacactgttagagtgaacattttggccaatgacaatgtggcaggaattgttagctttcagacagcttccagatctgtcataggtcatgaaggagaaattttacaattccatgtgataagaactttccctggtcgaggaaatgttactgttaactggaaaattattgggcaaaatctagaactcaattttgctaactttagcggacaacttttctttcctgaggggtcgttgaatacaacattgtttgtgcatttgttggatgacaacattcctgaggagaaagaagtataccaagtcattctgtatgatgtcaggacacaaggagttccaccagccggaatcgccctgcttgatgctcaaggatatgcagctgtcctcacagtagaagccagtgatgaaccacatggagttttaaattttgctctttcatcaagatttgtgttactacaagaggctaacataacaattcagcttttcatcaacagagaatttggatctctaggagctatcaatgtcacatataccacggttcctggaatgctgagtctgaagaaccaaacagtaggaaacctagcagagccagaagttgattttgtccctatcattggctttctgattttagaagaaggggaaacagcagcagccatcaacattaccattcttgaggatgatgtaccagagctagaagaatatttcctggtgaatttaacttacgttggacttaccatggctgcttcaacttcatttcctcccagactagattcagaaggtttgactgcacaagttattattgatgccaatgatggggcccgaggtgtaattgaatggcaacaaagcaggtttgaagtaaatgaaacccatggaagtttaacattggtagcccagaggagcagagaacctcttggccatgtttccttatttgtgtatgctcagaatttggaagcacaagtggggctggattatatcttcaccccaatgattcttcattttgctgatggagaaaggtataaaaatgtcaatatcatgattcttgatgatgacattccagaaggagatgaaaaatttcagctgattttaacaaatccttctcctggactagagctagggaaaaatacaatagccttaattattgtccttgctaatgatgacggccctggagttctatcatttaacaacagtgagcactttttcctaagagagccaacagctctctacgtccaggagagtgttgcagtattgtacattgttcgggaacctgcacaaggattgtttggaacagtgacagttcagttcattgtgacagaagtgaattcctcaaatgaatctaaagatctgactccttccaaaggctatattgttttagaagaaggtgttcgattcaaggccctacaaatatctgccatattagacacggaaccagaaatggatgagtattttgtttgcaccttgtttaatccaactggaggtgctagactaggggtgcatgttcaaaccctgataacagttttgcaaaaccaggcccctttggggctattcagtatctctgcagttgaaaatagagccacctccatagacatcgaagaagccaataggaccgtgtatttaaatgtatctcgaactaatggcattgatttggctgtgagtgtgcagtgggagacagtatctgaaacagcctttggcatgaggggaatggatgttgtgttttccgtatttcaaagttttttggatgaatcagcttctggctggtgtttctttactttggaaaatttaatatatggtataatgttaagaaaatcatctgttactgtttaccgatggcaggggatttttattccagttgaggatttaaatatagaaaatcctaaaacttgtgaggcctttaatattggtttttctccctactttgtgattactcatgaagaaagaaatgaagaaaagccttctcttaacagtgtgtttacattcacatctggatttaaattattcctggtacaaacaatcattattctggaaagttctcaagtaagatattttacttcagacagccaagattatttaatcattgcaagtcaaagagatgattccgaattaactcaggtcttcaggtggaatggaggaagcttcgtgttgcatcaaaaactccctgtccgaggtgtgctgaccgtggccttgttcaacaagggaggctctgtgttcttagccatttcccaggctaatgccaggctaaactcccttttattcagatggtctggcagtgggtttattaactttcaagaggtgcctgtcagtgggacaacagaagttgaggctttgtcttcagccaatgatatttacctaatatttgccgaaaatgtctttctaggagatcagaattcaattgatattttcatctgggagatgggacagtcttccttcaggtattttcagtctgtagattttgctgctgttaacagaatccactccttcacaccagcctcaggaatagcccacatacttcttattggccaagatatgtctgctctttactgctggaattcggagcgtaatcaattctcttttgttctggaagtaccttctgcttatgatgtggcttctgttacagtaaagtcccttaattcaagcaagaatttaatagctctagtgggagctcattcacatatatatgagctagcctacatttccagccattctgactttattcctagttcaggtgaactgatatttgaacctggtgagagagaagctacaatagcagtaaatatccttgatgatacagttccagaaaaagaagaatccttcaaagttcaacttaaaaatcccaaaggaggagcagagattggcattaatgattctgtaacaataaccattctgtctaatgatgatgcctatggaattgttgcatttgctcagaattcattatataagcaagtggaagaaatggagcaagatagcctagtaaccttgaacgttgaacgcttaaaaggaacatatggccgtataaccatagcatgggaagctgatggaagtattagtgatatatttcctacctcaggagtgattttatttactgaaggccaggtactgtcaacaatcactctaactattcttgctgataatataccagagttatcagaggttgtgattgtaaccctcacccgtatcaccacagaaggggttgaggactcatacaaaggtgctactattgatcaggacagaagcaagtctgttataacaactttgcccaatgactcaccttttggcttggtgggctggcgtgctgcgtctgtcttcattagagtagcagagcctaaagaaaacaccaccactcttcagttacaaatagctcgagataaaggactacttggggatattgccattcacttgagagctcaacccaatttcttactgcatgtcgataatcaagctactgagaatgaagattatgtattgcaagaaacaataataataatgaaagaaaacataaaagaagctcatgccgaagtttccattttgccggatgaccttcctgaattggaggaaggatttattgtcactatcactgaggtgaacctggtgaactctgacttctctacaggacagccaagtgtgcggaggcccggaatggaaatagctgagataatgatagaagaaaatgacgatcccagaggaatttttatgtttcatgttactagaggcgctggggaagttattactgcctatgaggtgcctccacccttgaacgttcttcaagttcctgtagtccggctggctggaagctttggggcagtaaatgtttattggaaagcatcaccagacagtgctggcctggaagactttaaaccatctcatgggattcttgaatttgcagataaacaggttactgcaatgatagaaatcaccataattgatgatgctgaatttgaattgacagagacgttcaatatttccttgatcagtgttgctggaggtggcagacttggtgatgatgttgtggtaactgttgttattccacaaaatgattctccatttggagtatttggatttgaagaaaagactgtaatgattgatgaatccctttcatccgatgaccctgattcatatgtgacattgacggttgtccggtccccaggaggaaaaggaaccgtccgacttgagtggaccatagatgagaaggctaaacataaccttagtcctttgaatgggacccttcattttgatgagactgagtcccagaagaccattgtgttgcacacacttcaagacacagtgttggaggaggacaggcgtttcaccattcagctgatatcaattgatgaggtagaaatatctccagtaaaaggtagtgcatcaataattattcggggtgataagcgagcatcaggagaagttgggatagctccgtcatctaggcacatcctcattggggaaccctcagcaaaatataatggtaccgctattatcagccttgttcgaggcccagggattttgggggaggtcacagtgttctggaggatattccctccttccgtgggggaatttgctgaaacatcaggaaaactgacaatgcgagacgaacagtctgcagtcattgtagtaatacaggctttgaacgatgacattcccgaggaaaaaagcttctatgagtttcagctcactgcagtcagtgagggaggagttctgagtgaatccagcagcactgccaacatcacggtggtggccagcgactctccctatggccgatttgccttttcacatgagcaacttcgagtgtcagaagcacagagggttaacatcacaatcatccgttccagtggagattttggccatgtgcgactctggtacaagacgatgagcgggacagcggaagcaggcttggattttgttcctgcagcaggggagctcctctttgaagcaggggagatgaggaaaagtctgcatgttgaaatccttgatgatgactatcctgaaggcccagaggaattttctctaacaattacaaaggtggaactccagggaagagggtatgattttaccattcaagaaaatggacttcagatagatcaacctcctgaaataggaaacatctccattgttcgcatcataataatgaaaaatgataacgcagaaggcatcattgaatttgacccaaagtatactgccttcgaagtggaggaagatgttgggctgatcatgatcccagtggtgaggctacatggaacttatggctatgtgacagctgatttcatctctcagagctcctctgccagtcccggaggtgttgattacattttgcatggcagtacagtcacctttcagcatgggcaaaacttaagttttataaatatctccatcattgatgacaatgaaagtgaatttgaggagcccattgaaattctactcactggagctactggaggagcggtccttgggcgccacctagtgagcagaatcataatagctaagagtgactctccctttggagttataaggtttctcaatcaaagcaaaatttctattgctaatcccaattccacaatgattttatcactggtgctggagcggactggaggactcttgggagagattcaggtgaactgggagacagtaggacccaactctcaagaagccttactgccacagaatagagacattgcagacccagtgagcgggttgttctattttggagaaggagaaggaggagtgagaaccataattctgacaatctatcctcatgaagaaattgaagttgaagagacattcattattaaacttcatcttgtgaaaggagaagctaaattagactccagagctaaagatgttacattaaccatacaagagtttggtgacccaaatggagttgttcagtttgctcctgaaactttgtctaagaagacttattcagagcctctggctctggaagggcccctgctcattaccttctttgtcagaagagtcaagggcacctttggagagattatggtttactgggaattaagtagtgagtttgacattactgaagactttctttccaccagtggatttttcaccattgctgatggagagagtgaagctagctttgatgttcatttgctaccagatgaggtacctgagatagaggaagattatgtgatccagcttgtttctgtagagggaggagccgaactggatctggagaagagtatcacatggttctctgtttatgcaaatgatgacccacatggagtatttgccctgtattcggatcgccagtcaatacttattgggcagaaccttattagatccatccaaattaacataacccggcttgctggaacatttggagatgtggctgttgggcttcgaatatcatcggatcataaagaacagccgattgttaccgaaaatgcagagaggcagctggtggtcaaagatggtgccacatataaagtggacgtggtgccaataaagaatcaggtcttcctatcactgggctctaatttcactttgcaactggtgactgtgatgcttgtcggtggacgtttctatggaatgccaacaattcttcaggaagcaaaatctgctgtccttccagtctctgagaaagctgccaattctcaggtcggatttgaatccactgcttttcaactcatgaacatcactgctggcacaagccacgttatgatttctaggagaggcacatatggagctctctcggttgcctggaccactggatatgctcctgggttagaaattcctgaattcattgttgttggcaacatgaccccaacactggggagcctttcattttcccacggtgaacaaaggaaaggagttttcctgtggacgtttcctagccctggttggccagaggcctttgttcttcacctatcaggagtgcagagcagtgctcctggcggagctcaactccgatcaggtttcattgttgctgaaattgaaccaatgggcgtcttccaattttccactagctcaagaaatatcatagtgtcagaagatacacagatgatcagattacatgtacaaagactatttgggttccacagcgatcttattaaagtttcttatcagaccactgcaggaagcgccaagccactggaagattttgagcctgttcagaatggggaactgttttttcaaaaattccaaactgaggttgattttgaaataaccattattaatgatcagctttctgagatagaagaatttttttacattaaccttacttcagtagaaattaggggattacaaaagtttgatgttaattggagcccacgcctgaatctagatttcagtgttgcagtgattacaatattggataatgatgacctggcaggaatggatatttccttccccgagacaactgtggctgtagcagttgacacaactctcattcctgtagaaactgaatccaccacatacctcagcacaagcaagacgactaccattctgcagccaaccaacgtggttgccattgttactgaggcaactggtgtatctgccatccctgagaaacttgtcacccttcatggcacacctgctgtgtctgaaaagcctgatgtggccactgtaactgccaatgtttccattcatggaacattcagccttgggccatccattgtttatattgaagaggagatgaagaatggcacattcaacactgcagaagttcttatccgaagaactggtgggtttactggcaatgtcagcataacagttaaaactttcggtgaaagatgtgctcagatggaaccaaatgcattgccctttcgtggtatctatgggatttccaacctaacatgggcagttgaagaagaagactttgaagaacaaactcttacccttatattcctagatggagaaagagaacgtaaagtatcagttcaaattttggatgatgatgagcctgaggggcaggaattcttctacgtgtttctcacaaaccctcaagggggagcacagattgtggaggagaaggatgatactggatttgcagcttttgccatggttattattacagggagtgaccttcacaatggcatcataggattcagtgaggagtcccagagtggactagaactcagggaaggagctgttatgagaagattgcaccttattgtcacaagacagccaaacagggcctttgaagatgtcaaggtcttttggcgagtcacacttaacaaaacagtcgtcgtgctccagaaggatggggtaaacctggtggaggaacttcagtctgtgtcagggaccacaacctgtacaatgggtcaaacaaaatgctttatcagcattgaactcaaaccagaaaaggtaccacaggttgaagtgtatttttttgtggaactatatgaagctactgctggagcagcaataaacaacagtgccagattcgcacagattaaaatcttagaaagtgatgaatctcaaagccttgtgtatttttctgtgggttctcggctggcagtggctcacaagaaggccactttaatcagtctgcaggtggccagagattctgggacaggactaatgatgtctgttaactttagtacccaggagttgaggagtgctgaaacaattggtcgtaccatcatatctccagctatttctggaaaggattttgtgataactgaaggcacattggtctttgaacctggccagagaagcactgtattggatgtcatcctaacgccagagacaggatctttaaattcatttcctaaacgcttccagattgtcctttttgacccaaaaggtggtgccagaattgataaagtgtatgggactgccaacatcactcttgtctcagatgcagattcgcaggccatttgggggcttgcagatcagctacatcagcctgtgaatgatgatattctcaacagagtgctccataccatcagcatgaaagtggccacagaaaacacagatgaacaactcagtgccatgatgcatttaatagaaaagataactactgaaggaaaaattcaagctttcagtgttgccagccgaactcttttctatgagattctttgttctcttattaacccaaagcgcaaggacactaggggattcagtcactttgctgaagtgactgagaattttgccttttctctgctgactaatgttacttgcggctctcctggtgaaaaaagcaaaaccatccttgatagttgcccatatttgtcaatattggctcttcactggtatcctcagcaaatcaatggacacaagtttgaaggaaaggaaggagattacattcgaattccagagaggctactggatgtccaggatgcagaaataatggctgggaaaagtacatgtaaattagtccagtttacagagtatagcagccaacagtggtttataagtggaaacaatcttcctaccctaaaaaataaggtattatctttgagtgtgaaaggtcagagttcacaactcctgactaatgacaatgaggttctctacaggatttatgctgctgagcctagaattattcctcagacatctctgtgtctcctttggaatcaggctgctgcaagctggttgtctgacagtcagttttgcaaagtggttgaggaaactgcagactatgtggaatgtgcctgttcacacatgtctgtgtatgctgtctatgctcggactgacaacttgtcttcatacaatgaagccttcttcacttctggatttatatgtatctcaggtctttgcttggctgttctttcccatatcttctgtgccaggtactccatgtttgcagctaaacttctgactcacatgatggcagccagcttaggtacacagattctgtttctggcgtctgcatacgcaagtccccaactcgctgaggagagctgttcagctatggctgctgtcacacattacctgtatctttgccagtttagctggatgctcattcagtctgtgaatttctggtacgtgctggtgatgaatgatgagcacacagagaggcgatatctgctgtttttccttctgagttggggactaccagcttttgtggtgattctcctcatagttattttgaaaggaatctatcatcagagcatgtcacagatctatggactcattcatggtgacctgtgttttattccaaacgtctatgctgctttgttcactgcagctcttgttcctttgacgtgcctcgtggtggtgttcgtggtgttcatccatgcctaccaggtgaagccacagtggaaagcatatgatgatgtcttcagaggaaggacaaatgctgcagaaattccactgattttatatctctttgctctgatttccgtgacatggctttggggaggactacacatggcctacagacacttctggatgttggttctctttgtcattttcaacagtctgcagggactttatgttttcatggtttatttcattttacacaaccaaatgtgttgccctatgaaggccagttacactgtggaaatgaatgggcatcctggacccagcacagcctttttcacgcccgggagtggaatgcctcctgctggaggggaaatcagcaagtccacccagaatctcatcggtgctatggaggaggtgccacctgactgggagagagcatccttccaacagggcagtcaggccagccctgatttaaagccaagtccacaaaatggagccacgttcccgtcctctggaggatatggccaggggtcactgatagccgatgaggagtcccaggagtttgatgatttaatatttgcattaaaaactggtgctggtctcagtgtcagtgataatgaatctggtcaaggcagccaggaggggggcaccttgactgactcccagatcgtggagctcaggaggatacccatcgccgacactcacctgtagcacctcactaaccattcgactgagcacactttcatatttgtatcagcttttgtgctaaaactctctaagtacatccacctgtgtaataggaacctgtgaattgtactggatgattaatacaaacgtgattgttgtatttggagtataaattactgattgtatgtgacctgaaaattcactgctataagaaaggtggagtcagtttgtatcagttaataggatgttcatattccaaggatattagttgtttttttaatcatcctatatggctaacattgtttaatgaaagtaataatcaataaagcaatagaatcta

SEQ ID NO: 340462 - DNA, 6921 bp, Artificial Sequence
  derived and/or modified sequence
gtggatgtgttcatgttcctcggcatgccatcagcttcattgctagttaatttactgtccgcactattgattctgtttgtattcggagagactgagatccgattcacaggtcagacggagttcgtggtgaacgagacaagcactacagtcattcgcttgattatagagaggattggggagccagctaatgtgacggcaatcgtctccctgtatggggaggatgcaggtgattttttcgatacctatgcagcagcatttatccccgccggagagactaaccgaacagtgtatatcgccgtatgcgacgacgatctgccggagcctgacgagacgttcatcttccacctcaccttgcagaagccttccgctaacgtcaagctgggttggccccgcacagtgacagtgacaatcctgagcaacgacaatgcctttgggatcatatcttttaacatgctccccagtattgccgtgagcgaaccgaagggacgaaatgagtcaatgccactgacattgatccgggagaagggaacgtatggaatggttatggtgaccttcgaggtcgaaggcggacctaatccccctgatgaggatctgtcgcctgtcaaaggcaacatcacttttccgcccgggagagccaccgtcatttataatctgactgtccttgatgatgaggtcccagaaaacgatgagattttcctgatccaactgaagtctgtggagggcggcgctgaaatcaatacaagcaggaactccatcgaaattatcatcaaaaaaaacgattctcccgtcaggttcctgcagtctatttatctggtgccggaggaagaccacattttgataatccccgtggtgcgagggaaggataataacggcaatctgataggcagcgatgaatacgaggtatccattagctatgccgtgacaactggaaacagcaccgcccatgcccagcaaaatctggatttcatcgacctgcagccaaacacaacggttgtattccccccgtttatccatgaaagccacctcaagtttcagatagtcgacgatactattcctgagatcgctgaatccttccatattatgctgctcaaggataccctgcagggcgacgccgtgcttattagcccctcggtcgtccaagttaccatcaagcctaacgacaaaccctatggtgttcttagtttcaactcagttctgttcgaaaggacagtcatcatcgacgaagatcgcattagcaggtatgaagagattaccgtggtccgtaacggggggactcacggtaacgtgtctgcaaactgggtccttaccaggaattctaccgatcccagccccgttactgctgacatacgcccttctagtggagttttgcattttgcgcagggtcagatgctggcgacaatcccgctgacagtggtggacgatgaccttccagaggaggcggaagcctacctgctacaaatccttccgcacactatccgcggcggcgctgaggtcagcgaaccagctgaactgctcttctacatccaggattccgatgacgtttacggactcattacctttttcccaatggagaatcagaagatcgaaagtagccctggtgagcgctatctgtccctctccttcacccgacttgggggcacaaaaggggatgtgcggcttctgtactctgtgctctacatccccgccggcgccgtggatcccctgcaggctaaggagggcatcctgaatatttcccgacggaatgacctgatcttccccgaacagaagacccaggtcacaaccaagctgcctatccggaacgacgcttttctgcaaaatggcgcccatttcctggtgcagctggagacagtggagctcttgaatatcattcctctgattccacctatctccccgcgatttggcgagatatgcaatatcagcctgcttgtcaccccagcaatcgctaatggggaaatcgggtttctctccaacttacctatcattctgcatgaacccgaggactttgccgccgaggttgtgtacattcctttacatcgtgacggtaccgatgggcaggccaccgtgtactggagcctcaaaccttcaggctttaatagcaaggccgtcactcctgacgatatcgggccgtttaacggatccgtgctgttcctgtctggacagtctgacacgaccatcaatattaccattaagggggacgatatcccggaaatgaacgagactgtcaccctgagtcttgatcgcgtgaatgtagagaaccaagttctcaaaagcggctatactagccgggatttgatcatcctcgagaatgacgaccccggtggggtcttcgagttcagccccgcctccagggggccctatgtgatcaaggagggagagtccgttgaattgcacattatacggagcagagggtcgttggtgaaacagtttcttcattacagggtcgagccgcgcgattctaacgagttttatgggaataccggcgtgttagagtttaagcctggcgagcgcgagatagtcatcacactgcttgcacggctcgacggcatcccggaactcgatgagcattactgggtggttctatcctcccatggggagcgtgaatctaaacttgggtcagcgacaatcgtaaacattactatcctgaagaacgacgatccccatggtattattgaattcgtttcagatggcctgatagtcatgattaatgaatccaagggcgatgccatctatagcgccgtctacgacgtcgtcagaaacaggggtaacttcggcgacgtgtctgtatcatgggttgtctctcctgactttacacaggacgtgtttccagtgcagggcacagtagtgttcggggatcaggaattttcaaagaacattactatatattccttgcctgatgaaatcccagaagagatggaagaattcacagttatcctgctgaatggaaccggaggggcgaaggtggggaacaggacaacggcaaccctgcgaatccgcagaaatgatgatcctatttacttcgcggagccaagggtggtgagagttcaggagggagagaccgctaactttactgtgctgagaaatggttcggtggatgtcacttgcatggtacagtacgctacaaaagacgggaaggccactgctagagagcgagacttcatacctgtggagaagggcgagaccctgattttcgaagttggctccagacagcaatccatatctatttttgtaaacgaggatgggattcccgagacagacgagccattttacattatcctcctcaacagcactggagacacagtggtgtatcagtatggcgtcgccaccgtcattattgaggccaacgacgaccctaacggcatttttagcctcgagcctatcgacaaagctgtggaggagggcaagaccaatgccttttggatcctgcggcaccggggctacttcggttccgtaagtgtgtcttggcaacttttccagaatgatagcgccctccagcctgggcaggaattctatgagacttctgggacagtgaactttatggacggggaagaagccaagcctattatcctgcacgctttccccgacaaaataccagagtttaatgagttctacttcctgaagctggtcaacatctcaggagggagcccaggacctggcgggcagctcgccgaaacaaacctgcaggttaccgtcatggtgccttttaatgacgatcccttcggggtctttatcttggatccagagtgcttagagcgagaggtcgccgaagacgttctatccgaggacgacatgagctatattacaaattttacgattcttcggcagcagggggtgttcggagatgttcaactgggctgggaaattttgtcatctgaatttcctgccggcctgcctccgatgatcgacttccttctggtaggcatttttccaaccacagtgcatcttcagcaacacatgagacggcatcactctgggacagacgctctctattttactggtctagagggtgcctttggcactgtcaatcccaaatatcacccttcacggaataatactatcgcaaatttcaccttcagtgcctgggtcatgcccaacgcaaataccaatggcttcattattgccaaggatgatggaaatggaagcatctattatggggtcaagatccagaccaacgagtcacacgtcacactaagtctgcactacaagactctcggtagcaatgcgacgtatatcgccaagaccacggtgatgaagtatctagaggagtcagtttggctccacttgctgattatcctcgaagacggaatcatagagttctacctggatgggaacgccatgccccgaggcatcaagtctcttaaaggcgaagccatcacagatgggccaggaattctgagaataggcgctggaatcaacgggaacgatagatttaccggtcttatgcaggatgtgaggagctatgagaggaaattgacattggaggaaatatacgaattgcacgccatgccagcgaaatccgatttgcatccgatctccggttacctcgaattccgccagggggagaccaacaagtcctttattatttctgccagagacgacaacgacgaggaaggagaggagctattcattttgaaattagtttcggtttacggcggggcgcgcatatcagaggaaaacaccactgcccgattaacaattcagaagagcgacaacgcaaacgggttattcggtttcactggagcctgtattcccgagatcgctgaggaagggtccactataagttgcgtggtggaaagaacacggggggccctggattatgtacacgtattctatactatcagccagattgaaaccgacgggatcaattatttggtggatgactttgctaatgccagcgggacaattacatttttgccttggcagagatcagaagtgctaaatatctacgtgctcgacgacgacatccccgaactgaacgaatactttcgggtgaccctggtgtctgcaattccaggcgacggaaaactaggatcgacacccacgagcggcgcctctattgatccagaaaaggagactacagacataacgatcaaagcctctgatcacccttacggcctcctgcaattcagcacaggattgccacctcagccaaaggatgccatgacacttcccgcaagtagcgtcccccatataaccgtggaggaagaggacggcgagatccgactgctcgtcatccgcgctcagggactgttgggccgggtgactgccgagtttaggacagtctctctgacagccttttctcccgaagattaccagaatgttgcaggcacgcttgagtttcagcccggggaacgttataagtacatctttattaatatcacggacaacagcattccagaattagaaaaatcctttaaggtggagctgctcaacttagaaggcggggtggcagagctctttcgagttgacgggtcggggtctggagacggagacatggagtttttcctcccaacaatccacaaacgggcctctctgggagttgcttctcagatactggtcacaatcgcggcgtcagaccatgcacacggtgtgttcgagttctcccccgaaagcctgttcgtctccggcactgaacctgaggatggatactctacagtgaccctgaatgtcatccgtcaccacggcactctctcacctgtgacactccactggaatatagacagtgaccccgacggcgacttggcatttacgagcggtaatatcacattcgagatcgggcagacttcagcaaatataaccgtggagatcttaccagatgaggatcccgaactggataaagccttttcagtctctgtcctgagcgtcagttcgggctcccttggtgctcatattaatgccactttgaccgtgttggctagcgacgatccctatggtattttcatcttttctgaaaaaaatcggcccgttaaggtggaggaggcaacccagaatataaccctgtccatcatcagattgaaggggctgatgggcaaagtgctggtgtcctacgccacactcgatgacatggaaaagccaccatattttcccccgaacctggccagggctacacagggccgcgattacattcccgccagtggcttcgctctgttcggtgcgaaccagtcagaagccaccatagccatctctatactggacgacgacgagcctgagcgcagcgagtccgtttttatcgagctgttaaactccacacttgtggccaaagtgcagagccgaagcattccaaattcgccccggctaggtcccaaggttgagaccattgctcagctgattatcatcgccaatgacgacgcctttggcacattgcaactgagtgcaccaatagtgcgggtggcggaaaatcacgtgggccccattattaacgtcacgcggacagggggcgcttttgccgacgtctcagtgaaattcaaggctgtccccatcacagccatagctggagaggactattccatcgctagtagcgatgtggtgttgctggagggtgaaacaagtaaggccgtacccatttacgtcatcaatgatatttatcccgagctagaggagagtttcctagtacaactgatgaacgagaccaccggcggagctaggcttggggccctgacagaggctgtgattattatcgaggctagcgacgacccttatggtctcttcggcttccagatcacaaaactaatagtggaagagccggaattcaactccgtgaaggttaacctgccaattatcagaaactctggcaccctggggaacgttacggtccaatgggttgcaaccattaatgggcagctagccacgggagatctgcgggtcgtatccggcaatgtgaccttcgcccccggcatgagctcctaccccagtgccaccaactag

SEQ ID NO: 340463 - DNA, 6921 bp, Artificial Sequence
  derived and/or modified sequence
gtggatgtgttcatgttcctgggcatgcccagcgccagcctgctggtgaacctgctgagcgccctgctgatcctgtttgtgtttggagaaacagagatccgcttcaccggccagacagaatttgtggtgaatgagaccagcaccaccgtcatccgcctcatcatcgagcgcatcggggagcccgccaacgtgacagccatcgtgtccctgtatggagaagatgctggggacttctttgacacctatgctgctgccttcatcccagctggggagaccaacagaacagtgtacatcgctgtgtgtgatgatgacctgcctgagccagatgagaccttcatcttccacctgaccctgcagaagcccagcgccaacgtgaagctgggctggcccaggacagtgacagtgaccatcctgagcaatgacaatgccttcggcatcatctccttcaacatgctgcccagcattgctgtgtctgagcccaagggcagaaatgaatccatgcccctgaccctcatccgggagaagggcacctacggcatggtgatggtgacctttgaggtggagggcggccccaaccccccagatgaggacctgagccctgtgaagggcaacatcaccttccccccaggccgggccaccgtcatctacaacctgactgtgctggatgatgaggtgcctgaaaatgatgagatcttcctgatccagctgaagtctgtggagggcggcgctgagatcaacaccagcagaaattccattgagatcatcatcaagaagaatgacagccctgtgcgcttcctgcagagcatctacctggtgcctgaggaggaccacatcctgatcatccctgtggtgcggggcaaggacaacaacggcaacctgattggaagtgatgaatatgaggtgtccatctcctatgctgtgaccactggaaacagcacagcccacgcccagcagaacctggacttcatcgacctgcagcccaacaccaccgtggtgttcccccccttcatccacgagagccacctgaagttccagatcgtggatgacaccatccctgagattgctgagagcttccacatcatgctgctgaaggacaccctgcagggagatgctgtgctgatcagccccagcgtggtgcaggtgaccatcaagcccaatgacaagccctacggcgtgctgtccttcaacagcgtgctgtttgagaggacagtcatcattgatgaggaccgcatcagccgctatgaggagatcaccgtggtgagaaatggaggcacccacggcaatgtgtctgccaactgggtgctgaccaggaacagcacagaccccagccctgtgacagctgacatccggcccagcagtggagtgctgcactttgcccagggccagatgctggccaccatccccctgactgtggtggatgatgacctgcctgaggaggccgaggcctacctgctgcagatcctgccccacaccatccggggcggcgctgaggtgtctgagcctgctgagctgctcttctacatccaggacagtgatgatgtgtatggcctcatcaccttcttccccatggagaaccagaagattgagagcagccctggagagcgctacctgagcctgtccttcacccggctgggcggcaccaagggagatgtgcggctgctgtacagcgtgctgtacatcccagctggagctgtggaccccctgcaggccaaggagggcatcctgaacatcagcagaagaaatgacctgatcttccctgagcagaagacccaggtgaccaccaagctgcccatcagaaatgatgccttcctgcagaatggagcccacttcctggtgcagctggagaccgtggagctgctgaacatcatccccctcatcccccccatcagccccaggtttggagagatctgcaacatcagcctgctggtgaccccagccatcgccaatggagagatcggcttcctgagcaacctgcccatcatcctgcacgagcctgaggactttgctgctgaggtggtgtacatccccctgcacagagatggaacagatggccaggccaccgtgtactggagcctgaagcccagcggcttcaacagcaaggctgtgaccccagatgacatcggccccttcaatggatctgtgctcttcctgagcggccagagcgacaccaccatcaacatcaccatcaagggagatgacatccctgagatgaatgagaccgtgaccctgagcctggacagagtgaatgtggagaaccaggtgctgaagagcggctacaccagccgggacctgatcatcctggagaatgatgaccccggcggcgtgtttgagttcagccctgccagccggggcccctacgtgatcaaggagggggagagcgtggagctgcacatcatccgcagccggggcagcctggtgaagcagttcctgcactacagagtggagccccgggacagcaatgagttctacggcaacacaggagtgctggagttcaagccaggagagcgggagatcgtcatcaccctgctggcccggctggatggcatccctgagctggatgagcactactgggtggtgctgagcagccatggagagcgggagagcaagctgggcagcgccaccatcgtgaacatcaccatcctgaagaatgatgacccccacggcatcatcgagtttgtgtctgatggcctcatcgtgatgatcaatgaaagcaaaggagatgccatctacagcgctgtgtatgatgtggtgaggaacagaggcaactttggagatgtgtctgtgtcctgggtggtgtccccagacttcacccaggatgtgtttcctgtgcagggcaccgtggtgtttggagaccaggagttcagcaagaacatcaccatctacagcctgcctgatgagatccctgaggagatggaggagttcaccgtcatcctgctgaatggcaccggcggggccaaggtgggcaacagaaccacagccaccctgcgcatcagaagaaatgatgaccccatctactttgctgagccccgggtggtgcgggtgcaggagggggagacagccaacttcaccgtgctgagaaatggatctgtggatgtgacctgcatggtgcagtatgccaccaaggatggcaaggccacagcccgggagcgggacttcatccctgtggagaagggggagaccctcatctttgaggtgggcagccggcagcagagcatcagcatctttgtgaatgaagatggcatccctgagacagatgagcccttctacatcatcctgctgaacagcactggagacacagtggtgtaccagtatggagtggccaccgtcatcatcgaggccaatgatgaccccaacggcatcttcagcctggagcccatcgacaaggctgtggaggagggcaagaccaatgccttctggatcctgcggcaccggggctactttggatctgtgtctgtgtcctggcagctgttccagaatgattctgccctgcagcccggccaggagttctatgagaccagcggcaccgtgaacttcatggatggagaggaggccaagcccatcatcctgcacgccttcccagacaagatccctgagttcaatgagttctacttcctgaagctggtgaacatcagcggcggcagccctggccctgggggccagctggccgagaccaacctgcaggtgacagtgatggtgcccttcaatgatgacccctttggagtcttcatcctggaccctgaatgtctggagcgggaggtggctgaagatgtgctgtctgaagatgacatgagctacatcaccaacttcaccatcctgcggcagcagggcgtgtttggagatgtgcagctgggctgggagatcctgagcagcgagttccctgctggcctgccccccatgattgacttcctgctggtgggcatcttccccaccaccgtgcacctgcagcagcacatgagaagacaccacagcggcacagatgccctgtacttcaccggcctggagggcgcctttggaacagtgaaccccaagtaccaccccagcaggaacaacaccatcgccaacttcaccttcagcgcctgggtgatgcccaatgccaacaccaacggcttcatcatcgccaaggatgatggaaatggcagcatctactatggagtgaagatccagaccaatgaaagccacgtgaccctgagcctgcactacaagaccctgggcagcaatgccacctacatcgccaagaccaccgtgatgaagtacctggaggagagcgtgtggctgcacctgctgatcatcctggaggatggcatcatcgagttctacctggatggaaatgccatgccccggggcatcaagagcctgaagggggaggccatcacagatggccctggcatcctgcgcatcggggccggcatcaatggaaatgaccgcttcaccggcctgatgcaggatgtgcgctcctatgaaaggaagctgaccctggaggagatctatgagctgcacgccatgcctgccaagagtgacctgcaccccatcagcggctacctggagttccggcagggcgagaccaacaagagcttcatcatcagcgccagagatgacaatgatgaggagggggaggagctgttcatcctgaagctggtgtctgtgtatggaggagcccgcatcagcgaggagaacaccacagcccggctgaccatccagaagagtgacaatgccaacggcctgtttggcttcaccggggcctgcatccctgagattgctgaggagggcagcaccatcagctgtgtggtggagaggaccaggggggccctggactatgtgcacgtgttctacaccatcagccagattgaaacagatggcatcaactacctggtggatgactttgccaatgccagcggcaccatcaccttcctgccctggcagaggtctgaggtgctgaacatctacgtgctggatgatgacatccctgagctgaatgagtacttccgggtgaccctggtgtctgccatccctggagatggcaagctgggcagcacccccaccagcggggccagcattgatcctgagaaggagaccacagacatcaccatcaaggccagtgaccacccctacggcctgctgcagttcagcacaggcctgcccccccagcccaaggatgccatgaccctgcctgccagctctgtgccccacatcaccgtggaggaggaggatggagagatccggctgctggtgatccgggcccagggcctgctgggccgggtgacagctgagttcagaacagtgtccctgacagccttcagccctgaggactaccagaatgtggccggcaccctggagttccagcctggagagcgctacaagtacatcttcatcaacatcacagacaacagcatccctgagctggagaagagcttcaaggtggagctgctgaacctggagggcggcgtggccgagctgttccgggtggatggcagcggcagcggagatggagacatggagttcttcctgcccaccatccacaagagggccagcctgggcgtggccagccagatcctggtgaccatcgccgccagtgaccacgcccatggagtgtttgagttcagccctgagagcctgtttgtgtctggaacagagccagaagatggctacagcacagtgaccctgaatgtcatccgccaccacggcaccctgagccctgtgaccctgcactggaacatcgacagcgaccctgatggagacctggccttcaccagcggcaacatcacctttgagatcggccagaccagcgccaacatcaccgtggagatcctgcctgatgaagatcctgagctggacaaggccttctctgtgtctgtgctgtctgtgagcagcggcagcctgggcgcccacatcaatgccaccctgactgtgctggccagtgatgacccctacggcatcttcatcttcagcgagaagaacagacctgtgaaggtggaggaggccacccagaacatcaccctgagcatcatccggctgaagggcctgatgggcaaggtgctggtgtcctatgccaccctggatgacatggagaagccaccctacttcccccccaacctggcccgggccacccagggccgggactacatcccagccagcggctttgccctgtttggagccaaccagagcgaggccaccatcgccatcagcatcctggatgatgatgagcctgagaggtctgagagcgtcttcatcgagctgctgaacagcaccctggtggccaaggtgcagagccgcagcatccccaacagcccccggctgggccccaaggtggagaccatcgcccagctgatcatcatcgccaatgatgatgccttcggcaccctgcagctgagcgcccccatcgtgcgggtggctgaaaatcatgtgggccccatcatcaacgtgaccaggactggaggagcctttgctgatgtgtctgtgaagttcaaggctgtgcccatcacagccatcgccggggaggactacagcatcgccagcagtgatgtggtgctgctggagggggagaccagcaaggctgtgcccatctacgtgatcaatgacatctacccagagctggaggagagcttcctggtgcagctgatgaatgagaccaccggcggggcccggctgggcgccctgacagaagctgtgatcatcatcgaggccagtgatgacccctacggcctgtttggcttccagatcaccaagctgattgtggaggagcctgagttcaacagcgtgaaggtgaacctgcccatcatccggaacagcggcaccctgggcaatgtgacagtgcagtgggtggccaccatcaatggccagctggccaccggggacctgcgggtggtgtctggaaatgtgacctttgcccctggcatgagcagctaccccagcgccaccaactag

SEQ ID NO: 340464 - DNA, 6921 bp, Artificial Sequence
  derived and/or modified sequence
gtggacgtgttcatgttcctgggcatgcccagcgccagcctgctggtaaatttattgtcggcactcctcattctcttcgtgtttggggaaactgagatcagatttaccggccaaaccgagttcgtggtgaacgagacctcaactaccgtcatccgattgatcatagagcggatcggtgagccagccaacgtcactgctatcgtctcactgtatggggaggacgcaggcgatttcttcgatacctacgcagcagccttcatcccggccggtgaaacaaatagaactgtgtacattgcagtatgcgacgacgacctcccagaaccagacgaaactttcatcttccaccttacattacagaagccatccgcaaatgtgaagctcggttggccgcgaactgtgacagtcacgatcttgagcaacgataacgcctttggtataatcagtttcaacatgctgccctcgatcgctgtttccgagcctaagggccgaaacgagagcatgccgctgaccctgatcagggaaaagggcacgtatgggatggtgatggtcaccttcgaggtggagggtggacccaacccccccgacgaggacctctctcccgtcaaggggaacatcaccttcccgcccggccgcgccaccgtgatatacaacctgaccgttttagatgatgaagtgccggagaatgacgaaatctttttaatccagttaaaaagtgtggaaggcggtgcggagattaacacaagccggaacagcatcgaaataatcataaaaaagaatgattcaccagtaagatttctgcagtctatatacctcgtccctgaagaagatcatatcctcatcatacctgtcgtccgcggcaaggacaataatggcaacctcataggcagcgatgagtacgaagtttccatctcttacgccgtgactacggggaattctacagcacacgcgcagcaaaatttggacttcatcgacctgcagcctaacaccacggtcgtctttcccccttttatacacgagagccacctaaagtttcagatagttgatgacacaatcccagagattgcggagtcttttcacattatgctgctgaaggacacactccagggggacgcggttctcatttccccaagcgtggtgcaagtgaccataaagcctaacgacaaaccatacggggtcctatccttcaattctgtactatttgagcggacggtgattatagacgaagatagaatctcccgctatgaagagataacagtggtacgcaacggtggtacacacggcaacgtgagtgcaaactgggtgttaaccagaaacagtaccgacccttctcccgtgactgccgacattcgcccgtccagcggagtgctccatttcgctcagggtcaaatgttggcaaccattcccttaaccgtcgtggatgacgacctgcctgaagaagcggaggcttatcttctccaaatcctcccccacactattcgggggggggctgaggtgagcgaaccagcagagttgctgttttatatacaggactccgacgacgtctatggcctgattactttcttccctatggagaatcagaaaatagaatcatctccgggcgaaaggtatctttcactgagctttactaggttgggaggtaccaaaggcgacgtgcgtttactgtatagcgttctttacatacccgctggtgccgtggatcctctccaagctaaagagggcattcttaacatctccagaagaaatgacctgatctttcccgagcagaagacccaggtaaccacaaagctgccaatacgtaacgatgcttttctccagaacggagctcacttcctcgtgcagttggaaactgtggaattgctcaacatcattcctcttatcccaccaatcagcccgagattcggcgaaatttgcaatatcagtctgctcgtgacaccagccatcgctaatggggaaattgggtttctgtcaaatttaccaatcattctccatgaacccgaggatttcgccgccgaagtggtgtacattcctctgcatcgggacggcacggatgggcaggcaacagtctactggtctctcaaaccttcaggcttcaactcaaaagctgtgacacctgatgacatagggccttttaacgggagcgttcttttcttgtccgggcagtctgacacgacaattaatataaccatcaaaggagacgatatccccgaaatgaatgagactgtgactctttcacttgatagagtgaacgtagaaaaccaggtcctcaagagcggctacaccagccgggatctcattattctcgaaaatgacgacccaggcggggtctttgagttctcacccgctagtagggggccatatgtcatcaaagaaggagagtcagtggaactgcatatcataaggagtagaggaagcctcgtgaagcaattcttgcattatagggtagaaccaagggacagcaatgaattctacgggaacacaggagtgctggaattcaaaccaggcgaaagggagatagtcattaccctcttagcaagactcgacggtatacccgaactcgacgagcactattgggttgtactgtcctcgcacggcgaacgggagtctaaactcggcagcgccaccatcgttaacataaccattttgaagaacgacgacccgcacggtatcatcgagtttgtttctgacggactgatagtcatgattaatgagtcaaagggcgacgctatttatagtgcggtctatgacgtcgtccgcaatagaggcaatttcggagacgtttctgtgtcatgggtggtgagcccagactttactcaggacgtatttccagtccaaggcactgtcgtcttcggagaccaggagttcagcaaaaacataaccatctactctctcccggacgagattccagaagagatggaggagttcacagttattctgctcaacggaacaggtggcgccaaggttggaaataggacaaccgccactcttaggattcgccggaacgacgatcctatatactttgcagagcctcgggttgtcagagtgcaggagggcgagaccgcgaacttcacagtgctcaggaatggttctgtagacgtgacatgcatggtccagtatgccaccaaagatgggaaagctacggctcgagaacgggattttattcccgtggagaaaggcgagaccctaatattcgaagtgggatctagacagcagagtatctctatcttcgtcaatgaagacgggattccagaaaccgatgaacccttttatattatccttctgaacagcaccggtgatactgttgtttatcaatacggggttgcaaccgtgattattgaggccaatgatgaccccaacggtatattttccttggagccaatcgacaaagctgtcgaggaaggaaaaaccaacgccttttggatcctcagacatcggggttattttgggtctgtgtctgtgtcttggcaactctttcagaatgactcagcactccagcccggacaggaattctacgaaacatctggaaccgttaatttcatggatggggaagaggccaagcctatcatcctgcacgctttcccagataagatcccagaattcaatgagttttatttcctgaagctggtgaacatttcaggcggctcacctggtccagggggccagctagccgaaactaacctgcaggttaccgttatggtcccttttaatgatgatccttttggtgtcttcatcctggaccccgaatgtctggagcgcgaagtggcagaagacgtgcttagcgaggacgatatgtcgtatattaccaacttcaccatcctgcgacagcagggggtgtttggggatgtgcagctgggctgggaaatcctatcctcagagtttcccgctggtcttccgcctatgatcgactttctcctggtcggtatattcccaaccaccgtgcatctccagcagcacatgcgaaggcaccattcaggaaccgatgctctttacttcactggtctggaaggagcttttggaactgttaatccgaaataccatcctagcagaaacaataccatcgccaatttcaccttctctgcctgggtaatgcccaacgcaaacaccaatggttttataatagccaaggatgacgggaatggcagtatctactacggcgtcaagatacagacaaatgagtcgcatgttaccctgagcttgcactacaagacgctggggagtaatgctacatacatcgcaaaaacaacagtgatgaaatacctggaagagtccgtttggctccaccttctcattattctggaggacgggattattgaattctacctggatgggaatgctatgcctcgcgggattaagtctctcaaaggagaggccattactgacggccccggcatcctgagaataggcgcaggaatcaacggcaacgatcgattcacggggctgatgcaggatgtacgcagctatgaacgcaagcttacacttgaggagatctatgaactacacgccatgcctgccaagtctgacctccatcctatatccgggtatctggagtttcggcagggtgaaactaataagagttttatcatctccgcgcgggatgacaatgatgaggaaggtgaagaactatttatcctgaagctcgtgtcagtatacggtggcgccaggatctcggaggagaacacaactgctcggctgaccatccagaagagcgataatgccaacggacttttcggttttactggggcgtgcattccagagatagccgaggagggaagtaccataagctgtgtggtcgaaaggactcgcggcgctctcgattacgtacatgtcttttacaccatctcccagatcgaaactgacggaattaattacctggtagatgactttgcaaatgcttctggaaccatcacctttctgccatggcagcgctctgaagtgctgaacatctacgtcttggacgacgatatccctgaacttaacgagtattttcgtgtgactttagtgtcagctatccccggtgatggcaagttgggtagtacacccacttcgggggcctctattgatccagagaaagaaacaaccgacataacaatcaaagcctctgaccatccatacggacttctccaattctctaccgggctgcccccacagcctaaagacgcaatgaccctcccggcatcatcagttccacacattactgtggaagaggaggatggggagatccggctgctggtaatccgcgcacagggtctattaggccgtgtgaccgcagagtttcgaaccgtgtcgctcacggccttttcacctgaagactaccagaatgtggctggcacactagagtttcagcctggagaaagatataagtatatctttattaatattactgacaacagcatccctgaattggagaagtcatttaaagtggagctgctgaacttagaaggcggagtcgcggaactctttcgggtagacggaagcggatctggggatggggatatggagttcttcctgccaaccattcataagcgtgccagtttgggtgtcgctagtcaaattctggttactatcgctgcctctgaccacgcccacggtgtcttcgagttttctccggagagtctcttcgttagcggcaccgagccagaagacggctactccactgtaacgcttaacgtgatccggcatcacggcactctgtccccagtgaccctgcattggaatatcgacagcgatcccgatggggatcttgccttcacctctggaaatattacttttgagatagggcagaccagtgccaacataaccgtggaaattttgcccgacgaggatcctgaactggataaagccttttccgtgagcgtgttgagtgtgtcctcaggctctctgggcgctcatataaacgctaccttaaccgtcctcgcttcagatgatccatatggcatttttatattcagcgagaagaaccgtcctgtgaaggtcgaagaggctacgcagaacattactttaagcatcataaggctcaaggggctgatgggcaaggtgttggtgtcctatgctacccttgatgatatggaaaaaccaccatatttcccgcccaacttggcgagggccacgcagggccgggactacataccagccagcgggttcgccttattcggggccaaccagagcgaagccactatcgcgatatctattcttgatgatgatgagcctgaacgatcagagagcgtgtttatcgaacttcttaactccactcttgtggccaaggtgcagtcccgatctatcccaaacagcccccggctgggacccaaggtcgaaaccatagctcaactgataattatcgccaacgacgacgccttcggcacgctccaactatccgcccccattgtccgcgtcgcggaaaaccatgttggacccatcattaacgtcactaggactgggggagcatttgccgatgtctcagtcaagttcaaggccgtccccattacagccattgctggtgaagactactcaatcgcttcttcagacgttgttcttctcgaaggtgaaacctcaaaggcagtcccaatctacgtaataaacgacatctaccccgaattggaagagtccttcttggtgcaattgatgaatgaaaccaccggcggtgctcggctaggcgccttaaccgaagcagttattatcatcgaggctagcgatgatccgtacgggttgttcgggtttcaaatcaccaagttgattgtggaagagcctgagttcaattcagttaaggttaatttgcccatcatcaggaattcaggaactctcggcaatgtcactgtgcagtgggtcgccaccatcaacggccagttggccactggggatttacgagttgttagtggcaatgtgactttcgcccccggcatgtcctcatatccttctgctactaactag

SEQ ID NO: 340465 - DNA, 6920 bp, Artificial Sequence
  derived and/or modified sequence
gtcgatgtgttcatgtttctcggtatgccatcggcatcccttcttgtaaaccttctgtcggcactgttaattttattcgtgtttggcgagaccgagatccggtttaccggtcaaactgagttcgtggtgaacgagacttccactaccgtcatacgactaattattgagagaattggagagccagccaacgtgacagcgatagtctccctttatggggaagacgcaggcgacttttttgatacctacgcggcagctttcattcctgcgggagagactaaccggaccgtgtatatagcagtatgtgacgacgaccttccagagcccgatgagactttcatctttcacctgaccttgcaaaagccgtcagctaatgtgaaactgggctggccccgtaccgttactgtgactattctaagcaacgacaatgcatttggaataatttctttcaacatgctcccctcaatcgctgtgtcggaacccaagggcaggaacgaaagcatgcccctgaccctcatccgggaaaaggggacgtacgggatggttatggtcacctttgaagtggagggcggtccaaacccacctgacgaagacctctcccctgtgaagggcaatattacatttccgccaggaagggcgaccgttatatacaacttaacagttctggacgacgaagtccctgaaaacgacgagatttttcttatccagctgaagtcagtggagggaggtgctgaaatcaatactagtcgcaactcaatagagattattattaagaagaatgacagtccagttcggtttttacagtcaatctacctggtccccgaggaggatcatatcttgatcatcccagtggtgcggggtaaagacaacaacggcaacctgatagggagcgacgagtacgaagtgagtatttcgtatgccgtcactacagggaatagtacagcacacgctcagcaaaacctggacttcatagacttacagccaaacacaacggtcgtttttcctccattcatccacgagtcccacctgaaattccagattgtggacgacaccatccctgaaattgccgaatccttccacatcatgctcctaaaggacactctacaaggcgatgccgtcttgatctccccaagtgtagttcaggtgacaatcaaaccaaacgataagccatacggcgttcttagctttaactctgtgctgttcgaacgtacagtgataattgatgaagataggattagccgatacgaggaaattactgtagtgcgaaatggcggaacgcacggaaatgtttcagccaactgggtgcttacacgcaattctaccgatccatcacccgtgacggctgacatccgcccatcatcaggtgtgttgcacttcgcccagggccagatgttagccacaatccccttgaccgtggttgatgatgatttgcccgaggaggcagaagcatatcttctgcagatcctaccccacaccattagagggggtgccgaagtgtccgagcctgccgagctgctcttttacatccaggactcagatgacgtttatggcctgattaccttcttccccatggaaaatcagaagattgagagctcacccggtgagcggtatctgtctttaagtttcacccgattaggcggaaccaaaggcgatgtgcggctgttatactcagtgctctatataccagccggtgccgtggatccacttcaggcgaaggaggggatcttaaatatctcccgacgtaacgacctgatctttcctgaacagaagactcaagtgaccacaaagcttccaattcgcaacgacgcttttctgcaaaacggggctcacttcctcgttcagctcgaaactgtggaactgctgaatatcatccctctgattccccctatctctccaagattcggagagatctgcaacatctccttactggtgacccctgctatagctaatggcgaaattgggtttctctcaaatctgcctatcattctccatgagcccgaagacttcgctgcagaagtggtctatattcctttgcaccgcgatgggaccgacggccaagccactgtgtattggtcacttaaaccaagtggatttaattctaaagccgtgacccccgacgatattggccctttcaatggctcagtgctgtttttaagcggccagagcgacacgaccattaatatcacaattaagggtgatgacatacctgagatgaacgagaccgtgacccttagcctggacagggttaacgtcgagaatcaggtgttaaagtcaggctacacttctagggatcttattatccttgagaatgacgaccctggtggagtgtttgagttttcacccgctagccgcggaccctacgtcattaaggaaggagagtcagtggaattgcacattatcagaagcagaggctctctggttaaacagtttttgcactacagggttgaacctagagattccaacgagttctacggaaatactggcgtactggagttcaaaccaggcgagcgcgagatcgtgatcacacttctggccaggcttgacgggatcccggagctggacgagcactattgggtggtcctatcctcacacggggagcgtgaatcaaaactgggctctgctacaatcgtgaacatcacaattcttaaaaatgatgatccacatgggattattgaatttgtgtctgacggtctgatcgtgatgattaacgagagtaaaggggacgcgatctactccgcagtgtacgatgtcgtacgcaatagaggcaatttcggtgacgtctccgttagctgggtcgtcagtccagattttacccaggacgtgttcccagttcagggcaccgtggtattcggggatcaggagttctccaagaatattaccatctatagcctgccagacgaaataccagaggagatggaggagtttaccgtgatactactgaacggaacaggtggcgcaaaggttggcaacagaactacggctacgctgcgcatccggaggaatgatgaccctatatattttgccgagcctcgcgtggtcagggttcaggaaggcgaaactgccaatttcacggtgctgaggaatgggtccgtggacgtaacttgtatggtgcaatacgctactaaggatggaaaagctaccgcgcgtgagagagacttcatccctgtcgagaaaggtgaaacactgatctttgaggtgggctctcgccaacaatcgatctccattttcgttaatgaggatggaatccctgaaaccgacgagcccttttacatcatcctattgaactctactggtgatacggtggtgtaccagtacggggtggccaccgtaataattgaagccaatgatgaccccaatgggatcttctccctggagcctatcgataaggctgtcgaggagggaaagaccaacgcattctggatcttgcggcaccggggatactttggatcagttagtgtttcttggcaattattccagaacgactctgctctgcagcctggacaggaattctatgaaacttctggcaccgtgaatttcatggacggggaagaggccaagccgatcatcctgcatgcattcccggacaagatcccagagttcaacgaattctacttcctcaagttggttaacatatccggcggaagtcctggcccaggcggacagctggccgaaaccaatctgcaggttacggtgatggtgcctttcaatgacgatccttttggcgtctttatccttgaccccgaatgccttgagcgagaggtagctgaggatgttttgtcagaggacgatatgagttatattactaacttcactatccttcgtcagcagggcgtgtttggtgacgtgcaactcggatgggaaatcctgtctagcgagttccctgcaggcctaccgccaatgatcgatttcttgttagtgggaatttttccaactaccgtccatcttcagcaacatatgcggcgacaccactcaggtactgacgccctatactttacaggcctggaaggagcttttggaacggttaatccaaagtaccaccccagccgtaacaatacaattgccaatttcaccttttctgcttgggtaatgccaaatgccaacactaatggtttcattattgccaaggacgacggcaacgggagtatttattatggcgtgaaaatccagacaaatgagagccacgtgacactcagcctccactataaaacgttaggcagtaatgccacctacattgcgaaaaccacggtgatgaaatatctggaagagagcgtgtggctgcacctcctgatcattctggaagatggcattatcgagttctacctggatggcaacgctatgccgagaggcattaagtccctgaagggggaagccatcaccgacggcccaggcatcctaagaattggagccggaatcaatggaaacgaccgcttcactgggctcatgcaagacgtacggagttacgagcgcaagctgacactcgaggaaatctacgagctgcatgccatgccagcaaaaagcgacctgcatcccatttcaggatacctcgaattcagacagggtgaaaccaataagtcattcattatcagcgcccgagacgacaacgacgaggagggagaagaactcttcatcctgaagctggtatcagtgtatggcggtgcacggatcagtgaggagaatactaccgcacggctgacaatccagaagtctgacaatgctaacgggctcttcggttttacaggggcatgcatacctgaaatcgcagaagaagggtcgactatcagctgcgtagtggagcgcacgcggggtgccctggactatgtccatgtgttttatacaatttcgcagatcgagacagatgggatcaactacctcgtagatgactttgcaaacgccagtgggactatcacctttctgccctggcaacgttcagaagtgctgaacatctacgtgctcgatgatgatatccctgagctgaacgaatattttagagtgactctggtgtcagccattcccggagatggcaagctgggctccacgcccacttctggggcaagcattgacccagaaaaagaaaccaccgatattaccatcaaagcatccgaccacccttatgggcttctgcagttctccaccggactccccccacaaccaaaggacgctatgactctgccggcaagtagcgtgccccacattactgtagaggaagaagatggagaaatccgcctgctcgtgatcagagcccaaggactgcttggcagagtaaccgccgagtttagaactgttagcttaacggcattcagccctgaagactaccagaacgtggccggtaccttggagttccaaccaggcgagaggtataaatacatctttatcaatattaccgataattcgatccccgaattagagaagagcttcaaggtggagttactcaacctagagggaggggtggccgagctgttccgagttgatggctccggctcaggagatggggatatggagttcttcctccctacaattcacaaacgggcttcactaggagtggctagccagattctggtgacgattgcagctagcgaccatgcacatggggtgttcgagttcagccccgagtccctgttcgtcagtggcacggaacctgaggacggctactctactgtgaccctgaacgtcatccggcatcacggaaccctgtcccctgtcaccctgcattggaacatcgactcagatcctgatggggacctcgctttcacgtccggtaacatcaccttcgagatcggtcaaacttccgccaacataactgttgagatcctcccggacgaagatccagaactcgataaagccttcagcgtttctgtgctgtcagtctctagcggcagtctcggagcccatataaatgccacgctcactgtgttagcttcagacgatccttacggaatcttcattttcagcgaaaagaataggcctgtgaaggtggaagaggccacccagaacattaccctgtcgataatcaggcttaaaggcctgatgggcaaagtgttggtttcttacgccacccttgacgacatggaaaaaccgccatacttcccaccaaacctcgcacgcgcaacccagggtcgagattacatcccggcttctggatttgccctgtttggcgctaaccagtccgaagccaccatagcaatatcgattctggacgacgacgagccggagaggagtgagagcgtcttcatcgagctgttgaattctactttggtagccaaggtgcagtcccgaagtatccccaattcacctagattggggccaaaggtcgaaactatagcccagcttatcatcattgctaatgacgacgccttcgggacccttcagctctcggcacctattgtcagggtcgccgaaaatcacgtgggcccaatcatcaatgtgacgcggactggaggggcttttgccgacgtgagcgtgaaatttaaggctgtgcccatcaccgctattgctggagaggattattctattgcatcctcggatgtcgtgctgctagagggtgagacaagtaaggctgtcccaatctacgtcataaacgatatctaccccgagctggaagaatcgttcctcgtccagctgatgaatgaaactaccggaggggctaggttgggggcactcacagaggcagtgattatcatcgaagcctccgacgacccttatgggctgtttggtttccaaattaccaagctgatcgttgaagagccagaatttaactccgtgaaggtgaacttacctatcatcagaaattctggaacacttggtaatgtgaccgtgcagtgggtggccaccatcaatgggcagctggcgaccggggaccttcgtgtcgtctccggaaacgtcactttcgctccagggatgagctcatatccctcggcaaccaatta

SEQ ID NO: 340466 - DNA, 6921 bp, Artificial Sequence
  derived and/or modified sequence
gtggacgtgttcatgttcctgggcatgcccagcgccagcctgctggtgaacctgctgagcgccctgctgatcctgttcgtgttcggcgagaccgagatcagattcaccggccagaccgagttcgtggtgaacgagaccagcaccaccgtgatcagactgatcatcgagagaatcggcgagcccgccaacgtgaccgccatcgtgagcctgtacggcgaggacgccggcgacttcttcgacacctacgccgccgccttcatccccgccggcgagaccaacagaaccgtgtacatcgccgtgtgcgacgacgacctgcccgagcccgacgagaccttcatcttccacctgaccctgcagaagcccagcgccaacgtgaagctgggctggcccagaaccgtgaccgtgaccatcctgagcaacgacaacgccttcggcatcatcagcttcaacatgctgcccagcatcgccgtgagcgagcccaagggcagaaacgagagcatgcccctgaccctgatcagagagaagggcacctacggcatggtgatggtgaccttcgaggtggagggcggccccaacccccccgacgaggacctgagccccgtgaagggcaacatcaccttcccccccggcagagccaccgtgatctacaacctgaccgtgctggacgacgaggtgcccgagaacgacgagatcttcctgatccagctgaagagcgtggagggcggcgccgagatcaacaccagcagaaacagcatcgagatcatcatcaagaagaacgacagccccgtgagattcctgcagagcatctacctggtgcccgaggaggaccacatcctgatcatccccgtggtgagaggcaaggacaacaacggcaacctgatcggcagcgacgagtacgaggtgagcatcagctacgccgtgaccaccggcaacagcaccgcccacgcccagcagaacctggacttcatcgacctgcagcccaacaccaccgtggtgttcccccccttcatccacgagagccacctgaagttccagatcgtggacgacaccatccccgagatcgccgagagcttccacatcatgctgctgaaggacaccctgcagggcgacgccgtgctgatcagccccagcgtggtgcaggtgaccatcaagcccaacgacaagccctacggcgtgctgagcttcaacagcgtgctgttcgagagaaccgtgatcatcgacgaggacagaatcagcagatacgaggagatcaccgtggtgagaaacggcggcacccacggcaacgtgagcgccaactgggtgctgaccagaaacagcaccgaccccagccccgtgaccgccgacatcagacccagcagcggcgtgctgcacttcgcccagggccagatgctggccaccatccccctgaccgtggtggacgacgacctgcccgaggaggccgaggcctacctgctgcagatcctgccccacaccatcagaggcggcgccgaggtgagcgagcccgccgagctgctgttctacatccaggacagcgacgacgtgtacggcctgatcaccttcttccccatggagaaccagaagatcgagagcagccccggcgagagatacctgagcctgagcttcaccagactgggcggcaccaagggcgacgtgagactgctgtacagcgtgctgtacatccccgccggcgccgtggaccccctgcaggccaaggagggcatcctgaacatcagcagaagaaacgacctgatcttccccgagcagaagacccaggtgaccaccaagctgcccatcagaaacgacgccttcctgcagaacggcgcccacttcctggtgcagctggagaccgtggagctgctgaacatcatccccctgatcccccccatcagccccagattcggcgagatctgcaacatcagcctgctggtgacccccgccatcgccaacggcgagatcggcttcctgagcaacctgcccatcatcctgcacgagcccgaggacttcgccgccgaggtggtgtacatccccctgcacagagacggcaccgacggccaggccaccgtgtactggagcctgaagcccagcggcttcaacagcaaggccgtgacccccgacgacatcggccccttcaacggcagcgtgctgttcctgagcggccagagcgacaccaccatcaacatcaccatcaagggcgacgacatccccgagatgaacgagaccgtgaccctgagcctggacagagtgaacgtggagaaccaggtgctgaagagcggctacaccagcagagacctgatcatcctggagaacgacgaccccggcggcgtgttcgagttcagccccgccagcagaggcccctacgtgatcaaggagggcgagagcgtggagctgcacatcatcagaagcagaggcagcctggtgaagcagttcctgcactacagagtggagcccagagacagcaacgagttctacggcaacaccggcgtgctggagttcaagcccggcgagagagagatcgtgatcaccctgctggccagactggacggcatccccgagctggacgagcactactgggtggtgctgagcagccacggcgagagagagagcaagctgggcagcgccaccatcgtgaacatcaccatcctgaagaacgacgacccccacggcatcatcgagttcgtgagcgacggcctgatcgtgatgatcaacgagagcaagggcgacgccatctacagcgccgtgtacgacgtggtgagaaacagaggcaacttcggcgacgtgagcgtgagctgggtggtgagccccgacttcacccaggacgtgttccccgtgcagggcaccgtggtgttcggcgaccaggagttcagcaagaacatcaccatctacagcctgcccgacgagatccccgaggagatggaggagttcaccgtgatcctgctgaacggcaccggcggcgccaaggtgggcaacagaaccaccgccaccctgagaatcagaagaaacgacgaccccatctacttcgccgagcccagagtggtgagagtgcaggagggcgagaccgccaacttcaccgtgctgagaaacggcagcgtggacgtgacctgcatggtgcagtacgccaccaaggacggcaaggccaccgccagagagagagacttcatccccgtggagaagggcgagaccctgatcttcgaggtgggcagcagacagcagagcatcagcatcttcgtgaacgaggacggcatccccgagaccgacgagcccttctacatcatcctgctgaacagcaccggcgacaccgtggtgtaccagtacggcgtggccaccgtgatcatcgaggccaacgacgaccccaacggcatcttcagcctggagcccatcgacaaggccgtggaggagggcaagaccaacgccttctggatcctgagacacagaggctacttcggcagcgtgagcgtgagctggcagctgttccagaacgacagcgccctgcagcccggccaggagttctacgagaccagcggcaccgtgaacttcatggacggcgaggaggccaagcccatcatcctgcacgccttccccgacaagatccccgagttcaacgagttctacttcctgaagctggtgaacatcagcggcggcagccccggccccggcggccagctggccgagaccaacctgcaggtgaccgtgatggtgcccttcaacgacgaccccttcggcgtgttcatcctggaccccgagtgcctggagagagaggtggccgaggacgtgctgagcgaggacgacatgagctacatcaccaacttcaccatcctgagacagcagggcgtgttcggcgacgtgcagctgggctgggagatcctgagcagcgagttccccgccggcctgccccccatgatcgacttcctgctggtgggcatcttccccaccaccgtgcacctgcagcagcacatgagaagacaccacagcggcaccgacgccctgtacttcaccggcctggagggcgccttcggcaccgtgaaccccaagtaccaccccagcagaaacaacaccatcgccaacttcaccttcagcgcctgggtgatgcccaacgccaacaccaacggcttcatcatcgccaaggacgacggcaacggcagcatctactacggcgtgaagatccagaccaacgagagccacgtgaccctgagcctgcactacaagaccctgggcagcaacgccacctacatcgccaagaccaccgtgatgaagtacctggaggagagcgtgtggctgcacctgctgatcatcctggaggacggcatcatcgagttctacctggacggcaacgccatgcccagaggcatcaagagcctgaagggcgaggccatcaccgacggccccggcatcctgagaatcggcgccggcatcaacggcaacgacagattcaccggcctgatgcaggacgtgagaagctacgagagaaagctgaccctggaggagatctacgagctgcacgccatgcccgccaagagcgacctgcaccccatcagcggctacctggagttcagacagggcgagaccaacaagagcttcatcatcagcgccagagacgacaacgacgaggagggcgaggagctgttcatcctgaagctggtgagcgtgtacggcggcgccagaatcagcgaggagaacaccaccgccagactgaccatccagaagagcgacaacgccaacggcctgttcggcttcaccggcgcctgcatccccgagatcgccgaggagggcagcaccatcagctgcgtggtggagagaaccagaggcgccctggactacgtgcacgtgttctacaccatcagccagatcgagaccgacggcatcaactacctggtggacgacttcgccaacgccagcggcaccatcaccttcctgccctggcagagaagcgaggtgctgaacatctacgtgctggacgacgacatccccgagctgaacgagtacttcagagtgaccctggtgagcgccatccccggcgacggcaagctgggcagcacccccaccagcggcgccagcatcgaccccgagaaggagaccaccgacatcaccatcaaggccagcgaccacccctacggcctgctgcagttcagcaccggcctgcccccccagcccaaggacgccatgaccctgcccgccagcagcgtgccccacatcaccgtggaggaggaggacggcgagatcagactgctggtgatcagagcccagggcctgctgggcagagtgaccgccgagttcagaaccgtgagcctgaccgccttcagccccgaggactaccagaacgtggccggcaccctggagttccagcccggcgagagatacaagtacatcttcatcaacatcaccgacaacagcatccccgagctggagaagagcttcaaggtggagctgctgaacctggagggcggcgtggccgagctgttcagagtggacggcagcggcagcggcgacggcgacatggagttcttcctgcccaccatccacaagagagccagcctgggcgtggccagccagatcctggtgaccatcgccgccagcgaccacgcccacggcgtgttcgagttcagccccgagagcctgttcgtgagcggcaccgagcccgaggacggctacagcaccgtgaccctgaacgtgatcagacaccacggcaccctgagccccgtgaccctgcactggaacatcgacagcgaccccgacggcgacctggccttcaccagcggcaacatcaccttcgagatcggccagaccagcgccaacatcaccgtggagatcctgcccgacgaggaccccgagctggacaaggccttcagcgtgagcgtgctgagcgtgagcagcggcagcctgggcgcccacatcaacgccaccctgaccgtgctggccagcgacgacccctacggcatcttcatcttcagcgagaagaacagacccgtgaaggtggaggaggccacccagaacatcaccctgagcatcatcagactgaagggcctgatgggcaaggtgctggtgagctacgccaccctggacgacatggagaagcccccctacttcccccccaacctggccagagccacccagggcagagactacatccccgccagcggcttcgccctgttcggcgccaaccagagcgaggccaccatcgccatcagcatcctggacgacgacgagcccgagagaagcgagagcgtgttcatcgagctgctgaacagcaccctggtggccaaggtgcagagcagaagcatccccaacagccccagactgggccccaaggtggagaccatcgcccagctgatcatcatcgccaacgacgacgccttcggcaccctgcagctgagcgcccccatcgtgagagtggccgagaaccacgtgggccccatcatcaacgtgaccagaaccggcggcgccttcgccgacgtgagcgtgaagttcaaggccgtgcccatcaccgccatcgccggcgaggactacagcatcgccagcagcgacgtggtgctgctggagggcgagaccagcaaggccgtgcccatctacgtgatcaacgacatctaccccgagctggaggagagcttcctggtgcagctgatgaacgagaccaccggcggcgccagactgggcgccctgaccgaggccgtgatcatcatcgaggccagcgacgacccctacggcctgttcggcttccagatcaccaagctgatcgtggaggagcccgagttcaacagcgtgaaggtgaacctgcccatcatcagaaacagcggcaccctgggcaacgtgaccgtgcagtgggtggccaccatcaacggccagctggccaccggcgacctgagagtggtgagcggcaacgtgaccttcgcccccggcatgagcagctaccccagcgccaccaactag

SEQ ID NO: 340467 - protein, 589 aa, Artificial Sequence
  derived and/or modified sequence
MSVSVHENRKSRASSGSINIYLFHKSSYADSVLTHLNLLRQQRLFTDVLLHAGNRTFPCHRAVLAACSRYFEAMFSGGLKESQDSEVNFDNSIHPEVLELLLDYAYSSRVIINEENAESLLEAGDMLEFQDIRDACAEFLEKNLHPTNCLGMLLLSDAHQCTKLYELSWRMCLSNFQTIRKNEDFLQLPQDMVVQLLSSEELETEDERLVYESAINWISYDLKKRYCYLPELLQTVRLALLPAIYLMENVAMEELITKQRKSKEIVEEAIRCKLKILQNDGVVTSLCARPRKTGHALFLLGGQTFMCDKLYLVDQKAKEIIPKADIPSPRKEFSACAIGCKVYITGGRGSENGVSKDVWVYDTLHEEWSKAAPMLVARFGHGSAELKHCLYVVGGHTAATGCLPASPSVSLKQVEHYDPTINKWTMVAPLREGVSNAAVVSAKLKLFAFGGTSVSHDKLPKVQCYDQCENRWTVPATCPQPWRYTAAAVLGNQIFIMGGDTEFSACSAYKFNSETYQWTKVGDVTAKRMSCHAVASGNKLYVVGGYFGIQRCKTLDCYDPTLDVWNSITTVPYSLIPTAFVSTWKHLPS

SEQ ID NO: 340468 - protein, 50 aa, Artificial Sequence
  derived and/or modified sequence
MSVSVHENRKSRASSGSINIYLFHKSSYADSVLTHLNLLRQQRLFTDVLL

SEQ ID NO: 340469 - protein, 516 aa, Artificial Sequence
  derived and/or modified sequence
MFSGGLKESQDSEVNFDNSIHPEVLELLLDYAYSSRVIINEENAESLLEAGDMLEFQDIRDACAEFLEKNLHPTNCLGMLLLSDAHQCTKLYELSWRMCLSNFQTIRKNEDFLQLPQDMVVQLLSSEELETEDERLVYESAINWISYDLKKRYCYLPELLQTVRLALLPAIYLMENVAMEELITKQRKSKEIVEEAIRCKLKILQNDGVVTSLCARPRKTGHALFLLGGQTFMCDKLYLVDQKAKEIIPKADIPSPRKEFSACAIGCKVYITGGRGSENGVSKDVWVYDTLHEEWSKAAPMLVARFGHGSAELKHCLYVVGGHTAATGCLPASPSVSLKQVEHYDPTINKWTMVAPLREGVSNAAVVSAKLKLFAFGGTSVSHDKLPKVQCYDQCENRWTVPATCPQPWRYTAAAVLGNQIFIMGGDTEFSACSAYKFNSETYQWTKVGDVTAKRMSCHAVASGNKLYVVGGYFGIQRCKTLDCYDPTLDVWNSITTVPYSLIPTAFVSTWKHLPS

SEQ ID NO: 340470 - DNA, 5559 bp, Artificial Sequence
  derived and/or modified sequence
agagtccagccgggggtgccgcacccactggggagtggggagggaggacacataggaaatgcctggggctggagtctctttggctctctgccagcaagaaacttaaacgtcctggcttgctcaacccgagtgtccctaaactgtccagacttttgcccgtccattgccactatctctccccactctgggtgtcctacccaaggcgctgtctatgcgtgcccagggcctgtcctgcggatacccagctcgccccttgcagccctttttagagcatctcgcgggctctggcatcaccaagcgcacagccccgggctgcgctcccctaaggtgggtccctcagatccggggctgtccattaaccaggctggcccaaagaggcgcagacactcgaacccgggaaaacttattttattctcggttcccggggttgcagctgccagcggctgagacagtgcgtccgctttgtctctctgcactccccgcagcccccctctcccgcttcctctcccgattaactcccccgacacgctcttctctagctcctctcctcctcccactccttctcctcctcttcctcctcctacaccacaggccgcgctaatgcgcttcctccctcccccggtgtcggtctctttgcatacgcgccccctcccctccccgccgcgccacttatagcggggcgcacggcggcggggcgcagactgctctggcagccggagaggaggcggtgcggcggtggcgctgcggagacccggtccagacgcctggcggccgccggcacacaaggcgctttctagctccctcccccgagcgcacagcccgcctccttccgcggcgcctgcagtggcaggcttgctctgccctaccgtgacgcgctccggagacgctctgcgggtcctggacaccgggtccgcggcgtggggacgacagacggaggcgaacgccatcggtagccggtccgcgagccatcgttcggggcgcagtcctctccccggctggccctcctttctccggggcattcgccaccgcttccctgggctgagacgaccggttcgtcgcctccttgcccgtgaccgtcgctagaactcagttgtgcgttgcggccagtcgccactgctgagtggaaacaaaatgtcagtcagtgtgcatgagaaccgcaagtccagggccagcagcggctccattaacatctatctgtttcacaagtcctcctacgctgacagcgtcctcactcacctgaatcttttacgccagcagcgtctcttcactgacgtccttctccatgccggaaataggaccttcccttgccaccgggcagtgctggctgcatgcagtcgctactttgaggccatgttcagtggtggcctgaaagagagccaggacagtgaggtcaactttgacaattccatccacccagaagtcttggagctgctgcttgactatgcgtactcctcccgggtcatcatcaatgaagaaaatgcagaatcgctcctggaagctggtgacatgctggagtttcaagacatccgggatgcatgtgcagagttcctggaaaagaacctgcatcccaccaactgcctgggcatgctgctgctgtctgatgcacaccagtgcaccaagctgtacgaactatcttggagaatgtgtctcagcaacttccaaaccatcaggaagaatgaagatttcctccagctgccccaggacatggtagtgcaactcttgtccagtgaagagctggagacagaggatgaaaggcttgtgtacgagtctgcaattaactggatcagctatgacctgaagaagcgctattgctacctcccagaactgttgcagacagtaaggctggcacttctgccagccatctatctcatggagaatgtggccatggaggaactcatcaccaagcagagaaagagtaaggaaattgtggaagaggccatcaggtgcaaactgaaaatcctgcagaatgacggtgtggtaaccagcctctgtgcccgacctcggaaaactggccatgccctcttccttctgggaggacagactttcatgtgtgacaagttgtatctggtagaccagaaggccaaagaaatcattcccaaggctgacattcccagcccaagaaaagagtttagtgcatgtgcgattggctgcaaagtgtacattactggggggcgggggtctgaaaatggggtctcaaaagatgtctgggtttatgataccctgcacgaggagtggtccaaggctgcccccatgctggtggccaggtttggccatggctctgctgaactgaagcactgcctgtatgtggttggggggcacacggccgcaactggctgcctcccggcctccccctcagtctctctaaagcaggtagaacattatgaccccacaatcaacaaatggaccatggtggccccactccgagaaggcgttagcaacgccgcagtagtgagtgccaaacttaagttatttgctttcggaggtaccagtgtcagtcatgacaagctccccaaagttcagtgttacgatcagtgtgaaaacaggtggactgtaccggccacctgtccccagccctggcgttacacagcagcagctgtgctggggaaccagatttttattatggggggtgatacagaattctctgcctgctctgcttataaattcaacagtgagacttaccagtggaccaaggtgggagatgtgacagcaaagcgcatgagctgccatgctgtggcctctggaaacaaactctacgtggttggaggatactttggcattcagcgatgcaagactttggactgctacgatccaacattagacgtgtggaacagcatcaccactgtcccgtactcgctgattcctactgcatttgtcagcacctggaaacatctgccttcttaaatgcagtacattctaaagagagtgagcatgagctcactccatcactcgatgagataatatgagatttctacttcggagaggccaagtctaatgaagagaaaaaaaggaaaagaagttgcaagactcgaataaaatctgctgcaccttgtaaatgctctaactggacatgaaggaaaggggcgagggaggggggtgggatttttggtgcaagtagcacatggtttaaatatgaatgaacaaacctgtgatctagtccttgtcttgtaattgtggattaatgtcaatgttaatcagcccctcaaagggagagaaaagctggaccttttcccttgctgtaccatattcagcatttgatttccatgggccccaccatttatgtgtagaatttgaaatggttgtcacctctctctgaggacagagcttgaagcctccacaccagctgctgctggagattcaaagcccaactgtgggtccgagagggaagctggctgggctggctgaagaatgaagaccactggactctccgttaatctctaaggggtctgctccccaggaacgtttctgaacaatggggactttgttggtagccatttggtagatgttcttttctatttataagtgactttaaactttcccttggctgttaagaagtttgttatagatttagctatttattgttcgatgcctgcatgctgaaacaatgcctacagctgtcttcacatgtatggacgtgtgtgaatggttgtacgttttgcacattttgtggctgttgagatgtgctttgctgcacaaacatgaaaatttttgagttacaatttggagcataactggagggtgggttggggaggggtggatttttaaaatgtcaagacagggaaggatgacaaaatggaaatttaaatgacatcctagaggtagagaaaccgtggagatcgcttttctcagactcaccaacttttaatgggatttcatggggtttggttgtgctgatagggtaaggggaggctgctttctgcccttctccccactcccatctgatttacttaattcagtctcagctgctgaaatttggaaaggaccaaattgctttacagtttttttctttgtgtagtatcttgaaatcctggaaaattctatggaatagttctgtatatagggcacaagtaaaggcattgtccaaagtttatttatttatttattaccctaagaatgctttgccataaccacatttaatgggaaaaacggcagtatcacagatgtaaattaactcaccagatttactgggcctgaactcattctcttcttgctatatgatttagcaagttctagaaggtctccaagacaataattacattggcacaatgtatacttcagtgctcacccgtaggcaaatctctttttaaaaaactctttggtgcacaagtaacacatttggccacaaaacaccaaagaattgtaggcagtggcccctattgagaagttttccggtagagttggaaatcagttgtgaatacattctttgctagttggagtgcttgtttactaagcatgtgccgtcgtaggtattagtgctagtctcagataggtgcttcccctgaggtgcaggggaagaccaaagtttgcaactcgaactgctttcgtccatgtttctcacattgctgtattttagaaaataggggttaagactgataacaaccttttacattgtgactgtgtttgcattgtctaatgacagataaatccttaacatttctctccaccttagtactttagactaattgtgtttgtccgtccatgccatgaatgagtgggctgtagttgggcctaaataaatgagctgttggaagaaaagaatcacagtactttccagcagtcagtccctggttcctagatgtgttctaagcaatgcaaatgtctaattgtcccccagtgggcatagtcagtgtcgtttatattgtagcagttacagctctgtagtttatgatgcaaatctgccaagagagatgtatgtgtcactgcatggcttctgaaagcaggatgaattttctgcagctgtttcaaagttggggtctgttcttgaatcctctattaattactgtgtgtgagccagagggagctgtggtaagggttgggcccccagcctgtagggaactttctggactcccactctttgaatcgatataggcatttggtctcactacttgaccattctcaccctgtgaaacgtcccacactttgaagcaaatacaattcacagcacagtacacacaaaaaccttggcataagacagagaaggttcttcttattttgtgggctggttgctgtagaaacacataacaaagggcagccctccacttctggtataattgtgtagccccttttctttgggcttgacacctgtcttgaataagagtgattagagctgcataatgtccctctcttggctattgaccatgtggttcacgtacaaaactctgtataagttgaaggaaaatgttcatgttcatatgtacttgtttgctatgactacattttgaggttttgtaaaactgttatttttttttttttcacaatgtgaaactgaaggtcaataaattattagagattttctcttcaaaaaaaaaaaaaaaaaaaaaaaaaaaaaaaaaaaaaaaaaaa

SEQ ID NO: 340471 - DNA, 1770 bp, Artificial Sequence
  derived and/or modified sequence
atgagcgtgagtgtacacgagaacagaaagagcagggcctcaagcggcagcatcaacatctacttattccataaatccagttatgcagacagcgtgctgacccacttgaaccttctccgtcaacaaaggctgtttactgacgtgctgctccacgccggcaataggacattcccttgccaccgagcggtgctggccgcctgcagccgttattttgaagcgatgttttcagggggattaaaagaatcacaggacagcgaagttaatttcgataactcaatacatccagaggtcttggaacttctgctagactatgcatatagctctcgtgttattataaacgaagaaaacgccgagagtctgctggaggctggcgacatgttggaattccaagacatccgggacgcatgtgccgaattcctggagaagaatctgcatcccaccaattgcctgggcatgctgctgttgagcgatgctcaccagtgcacaaagctgtacgagctgtcttggcggatgtgcctcagcaacttccagacgatccgaaaaaatgaggatttcttgcagctcccccaggacatggtggtccagctcctgtcttccgaggagctggagactgaagatgaacgtcttgtctatgagagcgcgattaattggatctcttacgatctgaaaaagcgttactgctacctgcccgagctgctgcagaccgtccggctcgctttgctgcctgcaatctatctgatggaaaacgtagccatggaagagctgataaccaaacagcgcaaatcgaaagagattgtggaggaggccatcagatgtaagcttaagatcttgcagaatgacggggtggtaacgtctctgtgtgcaagaccccggaaaacaggccatgctctattcctcttgggggggcagacattcatgtgtgataagctgtacctggttgatcagaaagccaaggagattatacccaaagccgacattccctcgccacgaaaagaattctctgcatgcgccatcgggtgtaaggtgtacatcactggaggccgcggtagcgaaaacggggtgtctaaggatgtgtgggtgtacgatacactgcacgaagaatggtccaaggctgctcccatgctggtggctcgctttggccacggttctgctgagttaaagcactgcctgtacgtcgtaggagggcataccgccgcaacagggtgcctgcccgcgtccccctctgtatcactaaagcaggtcgagcactacgatcccaccattaacaaatggacaatggtcgccccactcagagagggcgtatccaacgcggcagtggtctctgccaaactcaagctcttcgcgttcggggggacctcagtgtcccatgacaaactgcccaaggtccaatgttatgaccaatgcgaaaacagatggaccgtgcccgccacatgccctcagccttggaggtacaccgccgctgccgtgttaggcaatcagattttcattatgggtggagacactgagttttctgcatgctccgcctacaaatttaatagcgagacctatcaatggactaaggtgggggacgtcaccgccaagagaatgagctgccatgctgtggctagtggtaataaactgtacgtcgtagggggttattttggaattcaaaggtgcaagactctggattgctacgacccgaccctcgacgtttggaacagcattacaactgtgccttatagcttgatccctaccgctttcgtttccacctggaagcatttaccctcctag

SEQ ID NO: 340472 - DNA, 153 bp, Artificial Sequence
  derived and/or modified sequence
atgtccgtgagtgtccacgagaatcggaaatcaagggccagctccggcagcattaacatttatcttttccataaatctagctacgccgacagcgttctcacccatcttaatcttctgaggcaacagagattgtttacagacgtcctgctgtag

SEQ ID NO: 340473 - DNA, 1770 bp, Artificial Sequence
  derived and/or modified sequence
atgtccgtatctgtgcacgagaatcgcaagagcagagcatcctccggtagtattaatatctatttgtttcacaaatcaagttacgcggattccgtccttacccacctcaacttactaagacagcagaggttgttcacagacgtactgctgcatgcgggaaaccggaccttcccgtgccatagagcggtgctagcagcgtgctcccggtactttgaggccatgtttagcggcggcttaaaggagagccaggactccgaggtgaactttgataatagtatccatcctgaggtcctcgaactgctcttggattatgcatacagcagtcgtgtgatcataaatgaggaaaacgccgagtctttgctggaggctggagatatgctggaattccaagacatcagggacgcatgcgcggagttcttagagaagaacctgcaccctactaattgcctcggcatgctcttgctcagcgacgcgcaccaatgcaccaaattgtatgagttatcctggagaatgtgtctgagcaattttcaaaccatccgtaaaaacgaagacttcctgcaactcccccaggacatggttgtacagttattatcttccgaggagctggagacggaagacgagcgtctggtgtatgaaagcgcaatcaactggatatcctacgacctgaagaagaggtactgctatctgcccgagctgctccagacagtgcgactggcgcttctgcctgccatttacttgatggaaaatgtcgctatggaagaactgatcacaaagcagcgcaagtcgaaggaaatcgtcgaagaagccatccgatgcaaactgaaaatcctccagaacgacggggtcgtaacgtcactgtgcgcacggccccggaagaccggacacgccctcttcttgctagggggccagacttttatgtgtgataaattgtacctggttgatcagaaagccaaggaaattatcccaaaagctgatattcctagtccacgaaaagagttctccgcctgtgcaatcgggtgtaaggtgtatatcaccggcggccggggctctgagaatggggtatctaaggacgtatgggtttacgataccctgcacgaagagtggagtaaagcagcaccaatgctggtggcccgattcggccacggtagcgccgaactcaaacattgcctgtatgtcgtcggcggccacacagccgccactggctgcctgcccgcctccccatcagtctctctaaaacaggttgagcactatgacccaacaataaataagtggacgatggtcgcccctttacgcgagggggtgtctaacgccgctgtggtgtccgccaagttaaaacttttcgccttcggagggacctccgtaagccatgataaattgcctaaagttcagtgttatgatcagtgcgaaaatcgatggacggtccccgcgacatgtcctcagccctggcggtataccgctgccgcagtgctgggtaatcagatctttattatggggggcgatacagagttcagcgcatgcagtgcatacaaattcaatagcgagacctaccagtggaccaaggtcggtgatgtaacggccaaacggatgtcgtgtcacgccgtggctagtggcaacaaattgtacgtggtcggcggttatttcgggatacagcgctgcaaaaccctcgattgttatgaccccacacttgatgtgtggaacagcataacaacagtgccatattctcttatccccacagccttcgtctccacctggaagcacctcccttcgtag

SEQ ID NO: 340474 - DNA, 1551 bp, Artificial Sequence
  derived and/or modified sequence
atgttcagcggaggcctgaaggagagccaggactctgaagtaaactttgacaatagcattcatcctgaggtcctggagcttctgctggattacgcttatagctcccgggttatcattaacgaagagaacgcggaaagtttgcttgaggctggagacatgctggaattccaggatatcagagatgcttgtgccgaatttctggaaaaaaaccttcaccctacaaattgtctgggcatgctcctcctctctgatgcgcatcagtgtacaaagctgtacgagttgtcatggcggatgtgcctctctaacttccagactattcggaaaaatgaggatttccttcagctcccccaggacatggttgttcagcttcttagcagtgaggaactggagacggaagacgaacggcttgtatacgagtctgcaatcaattggatttcttatgacctcaagaagagatactgttacctgccagagttgctgcaaactgtccggctggctttactgccagcgatctacctgatggaaaacgtggcgatggaggagctgatcaccaagcagaggaagagtaaggaaatcgtggaagaggcgatcaggtgcaaattgaaaatccttcagaacgatggcgtggttacctccctctgtgctcggccaagaaagacaggacatgcactgtttctccttggggggcagactttcatgtgcgataaattgtacctggtcgaccagaaagccaaggaaattataccaaaggcagacatcccaagcccgcggaaggaattttccgcttgcgctatcggctgcaaagtgtacatcaccggaggcagggggagtgagaatggcgtatccaaagacgtatgggtgtacgatacgttacacgaagaatggtcaaaggccgcacctatgctggtggccaggttcgggcatgggtccgcagagctgaagcactgtttatatgtggtgggtggccataccgccgctaccggatgcctgcccgctagcccttccgtttcgctgaagcaagtcgagcactatgatcctactattaacaagtggaccatggttgcgcctctgcgcgagggagtctctaacgcggctgtggtgagcgccaaactaaaactattcgcctttggtgggacctccgtctcacacgataagctcccaaaagtgcaatgctatgaccagtgcgagaacaggtggaccgttccagccacctgcccccaaccttggcggtacaccgcggccgcggtgctgggaaaccagatttttattatgggaggcgatacggagttctccgcttgctccgcttataaatttaactccgaaacataccagtggaccaaggtgggagacgtcacggctaaaaggatgtcttgccatgccgttgcatctggaaacaagttgtatgtcgttggcggatatttcggaatacagcgctgcaagacgttggactgctacgatcctaccttggatgtgtggaactccatcaccacagtgccatatagcctcattcccaccgcctttgtctccacatggaagcacctgcccagttag

SEQ ID NO: 340475 - DNA, 1770 bp, Artificial Sequence
  derived and/or modified sequence
atgtctgtgtctgtgcatgaaaataggaagagccgggccagcagcggcagcatcaacatctacctgttccacaagagcagctatgctgacagcgtgctgacccacctgaacctgctgcggcagcagaggctcttcacagatgtgctgctgcacgccggcaacagaaccttcccctgccacagagctgtgctggccgcctgcagccgctactttgaggccatgttcagcggcggcctgaaggagagccaggacagcgaggtgaactttgacaacagcatccaccctgaggtgctggagctgctgctggactatgcctacagcagcagggtcatcatcaatgaagaaaatgctgagagcctgctggaggccggggacatgctggagttccaggacatcagagatgcctgtgccgagttcctggagaagaacctgcaccccaccaactgcctgggcatgctgctgctgagtgatgcccaccagtgcaccaagctgtatgagctgtcctggaggatgtgcctgagcaacttccagaccatcaggaagaatgaagacttcctgcagctgccccaggacatggtggtgcagctgctgagcagcgaggagctggagacagaagatgagcggctggtgtatgaaagtgccatcaactggatctcctatgacctgaagaagcgctactgctacctgcctgagctgctgcagacagtgcggctggccctgctgcctgccatctacctgatggagaatgtggccatggaggagctgatcaccaagcagaggaagagcaaggagatcgtggaggaggccatccgctgcaagctgaagatcctgcagaatgatggagtggtgaccagcctgtgtgcccggcccaggaagacaggccacgccctcttcctgctgggcggccagaccttcatgtgtgacaagctgtacctggtggaccagaaggccaaggagatcatccccaaggctgacatccccagccccaggaaggagttcagcgcctgtgccatcggctgcaaggtgtacatcactggaggccggggctctgaaaatggagtgtccaaggatgtgtgggtgtatgacaccctgcacgaggagtggagcaaggccgcccccatgctggtggccaggtttggacatggcagcgctgagctgaagcactgcctgtatgtggtgggcggccacacagctgccaccggctgcctgcctgccagccccagcgtgtccctgaagcaggtggagcactatgaccccaccatcaacaagtggaccatggtggcccccctgcgggagggcgtgtccaatgctgctgtggtgtctgccaagctgaagctgtttgcctttggaggcacctctgtgtcccatgacaagctgcccaaggtgcagtgctatgaccagtgtgaaaatcgctggacagtgcctgccacctgcccccagccctggagatacacagctgctgctgtgctgggcaaccagatcttcatcatgggcggggacacagagttcagcgcctgcagcgcctacaagttcaacagcgagacctaccagtggaccaaggtgggagatgtgacagccaagaggatgagctgccacgctgtggccagcggcaacaagctgtatgtggtgggcggctacttcggcatccagcgctgcaagaccctggactgctatgaccccaccctggatgtgtggaacagcatcaccaccgtgccctacagcctcatccccacagcctttgtgtccacctggaagcacctgcccagctag

SEQ ID NO: 340476 - DNA, 153 bp, Artificial Sequence
  derived and/or modified sequence
atgtctgtgtctgtgcatgaaaataggaagagccgggccagcagcggcagcatcaacatctacctgttccacaagagcagctatgctgacagcgtgctgacccacctgaacctgctgcggcagcagaggctcttcacagatgtgctgctgtag

SEQ ID NO: 340477 - DNA, 1551 bp, Artificial Sequence
  derived and/or modified sequence
atgttttctgggggcctgaaggagagccaggacagcgaggtgaactttgacaacagcatccaccctgaggtgctggagctgctgctggactatgcctacagcagcagggtcatcatcaatgaggagaatgctgagagcctgctggaggccggggacatgctggagttccaggacatcagagatgcctgtgccgagttcctggagaagaacctgcaccccaccaactgcctgggcatgctgctgctgagtgatgcccaccagtgcaccaagctgtatgagctgtcctggaggatgtgcctgagcaacttccagaccatcaggaagaatgaagacttcctgcagctgccccaggacatggtggtgcagctgctgagcagcgaggagctggagacagaagatgagcggctggtgtatgagagcgccatcaactggatctcctatgacctgaagaagcgctactgctacctgcctgagctgctgcagacagtgcggctggccctgctgcctgccatctacctgatggagaatgtggccatggaggagctgatcaccaagcagaggaagagcaaggagatcgtggaggaggccatccgctgcaagctgaagatcctgcagaatgatggagtggtgaccagcctgtgtgcccggcccaggaagacaggccacgccctcttcctgctgggcggccagaccttcatgtgtgacaagctgtacctggtggaccagaaggccaaggagatcatccccaaggctgacatccccagccccaggaaggagttcagcgcctgtgccatcggctgcaaggtgtacatcaccggcggccggggctctgaaaatggagtgtccaaggatgtgtgggtgtatgacaccctgcacgaggagtggagcaaggccgcccccatgctggtggcccgcttcggccacggcagcgctgagctgaagcactgcctgtatgtggtgggcggccacacagctgccaccggctgcctgcctgccagccccagcgtgtccctgaagcaggtggagcactatgaccccaccatcaacaagtggaccatggtggcccccctgcgggagggcgtgtccaatgctgctgtggtgtctgccaagctgaagctgtttgccttcggcggcacctctgtgtcccatgacaagctgcccaaggtgcagtgctatgaccagtgtgagaaccgctggacagtgcctgccacctgcccccagccctggagatacacagctgctgctgtgctgggcaaccagatcttcatcatgggcggggacacagagttcagcgcctgcagcgcctacaagttcaacagcgagacctaccagtggaccaaggtgggagatgtgacagccaagaggatgagctgccacgctgtggccagcggcaacaagctgtatgtggtgggcggctacttcggcatccagcgctgcaagaccctggactgctatgaccccaccctggatgtgtggaacagcatcaccaccgtgccctacagcctcatccccacagcctttgtgtccacctggaagcacctgcccagctag

SEQ ID NO: 340478 - DNA, 1770 bp, Artificial Sequence
  derived and/or modified sequence
atgagcgtgagcgtgcacgagaaccggaagagccgggccagcagcggcagcattaatatctatctcttccacaagtcctcctatgccgatagcgtgctcacacacttaaacttactgcgccagcagcgcctcttcactgatgtgttgttgcatgcaggaaatcgcactttcccctgtcaccgcgccgtgctggcggcttgttcccgatactttgaggctatgttttcgggtgggctgaaagagagccaggattccgaagtgaatttcgacaacagtatacacccagaagtgctggagctgctccttgattatgcctattccagcagagtaatcatcaacgaagagaatgccgaatcactgctcgaggctggtgatatgctagagttccaagacattcgtgacgcttgcgcagagtttttggagaagaatctgcacccaaccaattgcctgggaatgttgctgttgagtgatgctcatcagtgcaccaaactgtacgagttatcgtggcgcatgtgtctgagcaactttcagacgattcgcaagaatgaggattttctgcagctgccacaggatatggtagtccagctgctgagttctgaggaactcgaaaccgaagatgaacgactcgtgtacgagtccgccattaactggatctcttacgacctaaaaaagaggtattgttacctgcccgaactgcttcagaccgttcgcctggcactcctaccagcaatttacttgatggagaatgtggccatggaagagcttatcacaaagcagcgcaagagtaaggagatcgtcgaagaggccatcaggtgcaagctgaaaatattacaaaacgacggtgtggtgaccagcttatgtgctaggccacggaagacaggccacgctctcttcctgctgggaggccagacgttcatgtgcgacaaactgtacctggtcgaccaaaaagccaaggaaatcattcccaaggctgacatcccgagcccccgcaaagaattctccgcctgtgcaataggctgtaaggtgtatataacggggggtcggggatcagagaacggcgtgtccaaggacgtttgggtctacgatactcttcatgaagagtggagcaaggctgctcctatgctggtcgcccgttttgggcacggctcagctgagctgaagcattgcttatacgtggttggcggccacacagccgcgactggttgtctgcccgcgtcaccaagcgtgtccctcaagcaggtcgagcattacgaccctacaatcaacaaatggaccatggtcgcgcccctccgcgagggtgtctctaacgcggctgttgtcagtgcaaaactgaaactgtttgcgttcgggggaaccagcgtgtcacacgacaagctgccgaaggtgcagtgctacgatcaatgcgagaacaggtggacagtccccgccacctgtccacagccctggaggtatacggctgcagcagtgcttggtaatcagattttcattatgggaggcgacaccgaattcagcgcgtgcagtgcgtacaagttcaatagcgaaacctaccagtggaccaaagtcggagatgtgactgccaagcgcatgagctgccacgcagtggcgtcaggaaataaactgtatgttgtgggcggctatttcggcattcagcggtgcaagacactcgattgctatgacccgaccctggatgtgtggaatagtatcacaacagtgccctactccctcatcccaacggccttcgtgagtacttggaagcacttgcccagctag

SEQ ID NO: 340479 - DNA, 153 bp, Artificial Sequence
  derived and/or modified sequence
atgagcgtgagcgtgcacgagaaccggaagagccgggccagcagcgggagcataaatatctatttgttccacaagtccagctacgctgattctgtcctgacccatttaaatctgctgaggcagcaacgcttgttcacagacgtcttactttag

SEQ ID NO: 340480 - DNA, 1770 bp, Artificial Sequence
  derived and/or modified sequence
atgagcgtgagcgtgcacgagaaccggaagagccgggccagcagcggcagcattaatatctacctgttccacaaatcgagctatgcagactcagtccttactcatttgaatctgcttagacagcagcgactgtttacagacgtgctgctccatgccggcaaccgcacctttccatgccaccgggcggtgttggccgcctgttccaggtatttcgaagctatgttctcggggggacttaaggaaagccaagattctgaagttaatttcgacaacagtatccaccctgaagtgctggagcttctgctcgattacgcttactcatcacgagtgatcatcaacgaggagaacgccgagtccctgttggaggcaggagatatgctggaattccaggacatcagagacgcttgcgcagagttcctggaaaagaacctgcaccccaccaattgtcttggcatgctgctgctgtccgacgctcaccaatgcacaaaactgtacgagttgtcttggagaatgtgtctgtcaaactttcagacaatacggaagaacgaagattttttgcaattaccccaggacatggtggtgcagctactcagttcagaagagctggagactgaggacgagagactcgtgtacgaaagtgccatcaattggatctcctacgatctgaaaaagaggtattgttatctgcccgagttgctgcagacagttagattggcactgttgcccgctatctacctgatggagaacgtggccatggaggagctcatcaccaagcaacgaaagtctaaggagatcgtcgaggaggccattaggtgcaagttaaagattcttcagaacgacggtgtggttacatctctgtgcgcccgcccgcgcaaaacaggtcatgccttgttcttgctaggaggacagacctttatgtgcgacaaactgtacctcgtggaccaaaaggccaaagagatcatccctaaagccgatatccctagcccacggaaggaattcagtgcctgcgccattggttgcaaggtctatatcactggggggcgggggagcgagaacggcgtatctaaggacgtatgggtatacgacactttgcatgaggaatggtccaaggctgctcctatgctcgtggcccgcttcggccacggctctgctgagctcaagcactgcctgtatgtggtcggaggccatacggccgccacgggatgtttgccagccagcccaagtgtgtctctgaagcaggtagagcattacgatccaactattaataaatggaccatggtggccccactgagagaaggggtgtccaatgccgccgtagtgagcgccaaactcaagctttttgcttttgggggcacctctgtgagccatgacaaattgcctaaggttcaatgttatgaccagtgcgagaaccgttggaccgttccagccacttgcccgcaaccctggcggtacacagctgcagccgttctggggaatcagatcttcattatggggggagacactgaattttccgcctgttcagcgtataagtttaattcagagacctaccagtggacaaaagtgggcgacgtcaccgccaagcgcatgtcttgccacgctgttgcctcagggaataagttgtatgtagtcggaggctacttcgggattcagagatgcaagaccctggactgctatgatccgactctcgatgtgtggaactccataactactgtcccttactcattgattcccacggcgttcgtgtccacgtggaaacatctccccagctag

SEQ ID NO: 340481 - DNA, 1551 bp, Artificial Sequence
  derived and/or modified sequence
atgttcagcggcggcctgaaggagagccaggacagcgaggtgaacttcgacaacagtattcatcctgaagtcctagaacttttgctagattatgcttacagctctagggtcatcatcaatgaggaaaacgcagaatccctgttggaagccggcgacatgctggagtttcaagatatcagagacgcctgtgcagagtttctggaaaagaatcttcacccgaccaactgcctcggtatgcttctgctcagtgacgcccaccagtgcacaaaactgtatgagctctcctggcgcatgtgcttgtccaacttccagactataaggaagaacgaagacttcctgcaactcccacaggatatggtggttcagctgctgagcagcgaggaactggagaccgaagatgaacggcttgtctacgaaagcgcgatcaactggatcagctatgacttgaagaagcgctattgctatctgcccgaactcctacagactgttaggctcgcactattgcccgcgatatacttgatggagaacgtcgctatggaggagctgatcactaaacagaggaagtccaaggagattgtcgaggaggccatacgctgtaagctgaagatcttacagaatgatggagtggtcacaagtctgtgcgcacgtcctcggaagacaggccacgctctgttcctgttgggaggacagacattcatgtgcgacaagctgtacctggtggaccagaaagcaaaggagataatccctaaggctgatattccaagcccacgcaaagagttttctgcctgtgctatcgggtgtaaggtttacatcactgggggccgcggcagtgaaaacggtgtctccaaagatgtctgggtgtatgatactctgcatgaggagtggagtaaagccgccccaatgctcgtggctaggttcggtcacgggagtgcagagcttaagcactgcctgtacgtcgtgggcggccacaccgctgctacaggatgcctgcctgcttcgccatccgtaagtctgaagcaagtggaacactatgatcctaccatcaataagtggaccatggtcgctccactccgggaaggcgtaagcaacgccgcggttgtcagtgcgaaactcaagttatttgccttcggcggaacatcggtctcacatgacaaactgcccaaggtgcaatgctatgatcagtgcgaaaaccgatggaccgtgccagcaacgtgtccccagccttggaggtatactgccgccgccgtgcttggcaatcagatttttatcatgggcggtgacacagaattctctgcgtgttccgcttacaagttcaactccgagacctaccagtggacgaaagttggagacgtcacagccaaaagaatgagctgccacgccgtcgcttccggcaacaagctgtacgtggtggggggatactttggaatacaaaggtgcaaaaccctcgactgttatgatcctaccctagacgtgtggaacagcattactactgttccgtactctctgatacctactgcattcgtgtcaacttggaaacatcttccctcatag

SEQ ID NO: 340482 - DNA, 1770 bp, Artificial Sequence
  derived and/or modified sequence
atgagcgtctcggtgcacgagaaccgcaagtccagagcctcatcaggtagcataaacatatacctttttcacaaatcatcatacgccgacagcgtactcacccacctgaacctgttacggcagcagagactgttcaccgatgtcctgttacacgcgggtaatagaacattcccctgtcaccgagccgtgctggcagcttgctcccgatatttcgaggccatgttctccggcggacttaaagagtctcaggactcagaagtgaactttgacaattcaatccacccggaagtactggagctgctactggactatgcatatagttcaagagtgataattaacgaggagaacgcagagtctctactagaagccggagatatgctcgaattccaggatatacgagacgcttgtgcggagtttctagaaaagaacttgcaccctaccaattgtctgggaatgctgctgctgtccgacgcacaccagtgcacaaagctctatgaactcagttggcgtatgtgtttgtccaattttcagactatacgcaagaacgaggactttctgcagctcccccaggacatggtggttcagctgttgagctccgaggaactggagactgaggatgagcgcctggtatacgagtctgccatcaactggatttcttatgacctgaaaaaaagatactgttatctcccagagctgctgcagacagtgcgactcgccctactgcccgcaatctatttgatggaaaacgtggccatggaggaactcatcacaaaacaacgcaagtctaaagaaattgtcgaagaggcaattaggtgcaagctgaagatcctacagaacgatggtgttgtgacttccctgtgcgcccgtccaaggaagaccggccatgctttattcctgttaggcggtcagaccttcatgtgcgataaactctacctggtagaccagaaggccaaggaaattattccaaaagccgacataccttcaccaagaaaggagttttcagcatgcgcaatcggatgcaaggtctacattacggggggacgcggttctgagaacggcgtgtctaaagacgtctgggtgtacgatactttgcatgaggagtggtccaaagctgccccaatgctggtcgctagatttggacatggttcggcggagctcaagcattgcttgtatgttgtgggcggacacaccgctgccaccggatgtctcccagcctctccgtccgtgagtcttaagcaggtggagcattacgaccctactataaataagtggaccatggtggcccctctgcgggagggtgtcagcaacgcagccgtggtgagcgctaagctaaagctgttcgcctttggcggtaccagcgtcagccacgataaattaccgaaagtccagtgttatgatcaatgtgaaaatcgttggacggtgcccgctacttgcccccagccttggaggtacaccgccgcagccgtgctggggaatcaaatttttatcatgggtggagacacggagttttccgcctgtagtgcctataagtttaactctgaaacctatcagtggaccaaagtaggcgacgtgactgctaaacggatgagctgccacgcagttgcttctggcaacaagctttacgtggtgggcggttacttcggaatacagcggtgcaagactctggattgttatgatccgactttggacgtatggaactccatcactactgtgccttatagcctgatacccactgcttttgtgtccacttggaaacacctgccaagttag

SEQ ID NO: 340483 - DNA, 153 bp, Artificial Sequence
  derived and/or modified sequence
atgagcgttagtgtgcatgaaaatcggaagtcccgagcaagctcagggtcaattaacatctatctgttccacaaatccagttacgccgattcggttctcacacaccttaatctgctgcgacagcaaagactgttcacagatgtccttctctag

SEQ ID NO: 340484 - DNA, 1770 bp, Artificial Sequence
  derived and/or modified sequence
atgagcgtctccgttcatgagaacagaaagagccgggcttcctcaggctcgattaatatctatttgttccataaatcgtcttatgccgacagcgtgttgacccatttgaacctcctgcggcagcagaggttattcaccgacgtcctgctgcatgctggtaacagaactttcccttgccacagagcagttttggccgcttgttctcgctattttgaagcaatgttctcgggcggtctgaaggaatcacaggatagcgaggtgaactttgacaactccatccatcctgaggtactggaactgttattagactacgcttattcaagtcgggtgataatcaacgaggaaaatgcagagtccctgctcgaggccggagatatgttggagttccaagatatcagggatgcatgcgccgagttcctggagaaaaatttgcaccctaccaactgtctgggaatgcttttattatcagatgctcaccagtgtaccaagctctatgaactatcgtggaggatgtgtctctccaattttcagactatccgcaagaatgaagactttttgcagttgcctcaagacatggtcgtgcagctcctaagtagtgaggagctagagaccgaggatgagagactcgtctacgagagcgcaattaattggatcagttatgacctcaaaaaacgctactgctacctccccgaactgttacagactgtgaggttagccctgttgccagcaatatatctaatggagaatgtggccatggaggaactaattaccaagcagaggaagtccaaggagattgtggaagaggccatcaggtgtaagctgaaaatcttgcagaacgacggagtagtgacaagtctgtgcgctcgccctagaaagacaggacacgcactctttctactgggaggccaaacattcatgtgcgataagctctatctggtcgatcagaaggccaaggagatcattccaaaagccgacatcccctcccccaggaaggagttcagcgcttgtgctatcgggtgtaaggtttacattacggggggaagaggatcagaaaatggtgtttctaaagacgtttgggtgtatgacaccctccatgaggagtggtctaaggctgctcccatgctggtagctcggtttggtcatggctccgccgaactgaagcactgtctgtatgtggtaggcggtcatactgccgctacggggtgtctcccagccagccccagcgtgagccttaaacaggtcgaacactacgacccaaccatcaataagtggaccatggtcgcgccactgagagaaggtgtgtcaaatgccgctgttgtatcagcaaaactgaaactgttcgccttcgggggaacatccgttagtcatgataaactgccaaaggtccaatgttatgatcagtgcgaaaacaggtggaccgttccagccacatgcccgcagccttggcgctatactgctgccgctgttctgggcaatcagattttcattatgggcggtgatactgaattttcagcatgtagcgcctacaagttcaactccgaaacgtatcagtggacaaaggtgggcgatgttactgcaaagaggatgtcctgtcacgccgttgcctctggaaacaaactgtacgtggtcggtggatatttcggaattcagcggtgcaagactctggactgctacgatccaaccttggacgtgtggaattccataactactgtgccttacagtcttattcctaccgcatttgtgagtacgtggaaacaccttccatcctag

SEQ ID NO: 340485 - DNA, 1551 bp, Artificial Sequence
  derived and/or modified sequence
atgttctctggaggattaaaggagtctcaggatagcgaggtaaacttcgacaacagtatccatcctgaggtgctcgagctgctgcttgattatgcttattcttctagggttatcataaacgaggagaacgctgaatcactcctcgaggcgggagatatgctcgaatttcaggatataagagatgcctgcgccgagtttcttgaaaagaacttacacccaactaattgtctggggatgctgctgctgtcagacgcacatcaatgcaccaagctgtacgaactgagttggcggatgtgtctatccaatttccagaccatacgcaagaacgaagacttcttacagctgccacaagatatggtcgtccaactgcttagctctgaggaattagagactgaggatgagcgcctagtgtatgaaagtgctattaattggatctcgtatgacttgaaaaagcgatactgttacctccctgaactgctacagactgtacgcctcgcactgctccccgcaatctatctgatggaaaatgttgcaatggaagaactgatcacaaagcagcggaaatctaaagagattgttgaggaagcaattcgttgtaagctcaaaattttacagaatgacggcgtggtcacatcactttgtgccaggcccagaaagactggacacgctttgtttcttttaggcggacagacattcatgtgcgacaaactgtacttagtcgaccagaaagctaaggagatcatccccaaagctgatatcccctctccacgaaaagagttcagtgcctgcgcaatagggtgtaaagtgtatataactggcggaagaggaagcgagaatggggtgtcaaaagacgtctgggtatatgatactttgcacgaggagtggagcaaagctgctcctatgctggtcgcgaggtttggtcacggaagcgccgagctcaaacactgcctctatgtggtcggtgggcataccgctgccaccggctgcctgccagcctctccgtccgtctcgttgaaacaggtcgagcattacgatcccaccattaataaatggacaatggtggcccctctgcgggaaggcgtgagcaatgctgcagtagtgtcggcaaagctcaaactgttcgcattcggtggaacctctgtcagtcatgacaagttgcccaaggtgcagtgctatgatcagtgtgagaaccggtggactgtcccagccacctgcccacagccctggagatacaccgccgcagctgtcttgggaaatcagatctttattatgggcggtgacacggagttctctgcttgcagtgcttataaatttaattctgaaacataccaatggacgaaggtgggcgacgtaaccgcaaagagaatgtcctgccatgctgttgcttcgggaaataaactgtatgtcgtaggcggatatttcggcattcagagatgcaaaaccttagactgctacgaccctactcttgacgtgtggaactctataacaaccgtcccttactccctgatacccacagcgttcgtctccacttggaaacaccttccctcctag

SEQ ID NO: 340486 - DNA, 1770 bp, Artificial Sequence
  derived and/or modified sequence
atgagcgtgagcgtgcacgagaacagaaagagcagagccagcagcggcagcatcaacatctacctgttccacaagagcagctacgccgacagcgtgctgacccacctgaacctgctgagacagcagagactgttcaccgacgtgctgctgcacgccggcaacagaaccttcccctgccacagagccgtgctggccgcctgcagcagatacttcgaggccatgttcagcggcggcctgaaggagagccaggacagcgaggtgaacttcgacaacagcatccaccccgaggtgctggagctgctgctggactacgcctacagcagcagagtgatcatcaacgaggagaacgccgagagcctgctggaggccggcgacatgctggagttccaggacatcagagacgcctgcgccgagttcctggagaagaacctgcaccccaccaactgcctgggcatgctgctgctgagcgacgcccaccagtgcaccaagctgtacgagctgagctggagaatgtgcctgagcaacttccagaccatcagaaagaacgaggacttcctgcagctgccccaggacatggtggtgcagctgctgagcagcgaggagctggagaccgaggacgagagactggtgtacgagagcgccatcaactggatcagctacgacctgaagaagagatactgctacctgcccgagctgctgcagaccgtgagactggccctgctgcccgccatctacctgatggagaacgtggccatggaggagctgatcaccaagcagagaaagagcaaggagatcgtggaggaggccatcagatgcaagctgaagatcctgcagaacgacggcgtggtgaccagcctgtgcgccagacccagaaagaccggccacgccctgttcctgctgggcggccagaccttcatgtgcgacaagctgtacctggtggaccagaaggccaaggagatcatccccaaggccgacatccccagccccagaaaggagttcagcgcctgcgccatcggctgcaaggtgtacatcaccggcggcagaggcagcgagaacggcgtgagcaaggacgtgtgggtgtacgacaccctgcacgaggagtggagcaaggccgcccccatgctggtggccagattcggccacggcagcgccgagctgaagcactgcctgtacgtggtgggcggccacaccgccgccaccggctgcctgcccgccagccccagcgtgagcctgaagcaggtggagcactacgaccccaccatcaacaagtggaccatggtggcccccctgagagagggcgtgagcaacgccgccgtggtgagcgccaagctgaagctgttcgccttcggcggcaccagcgtgagccacgacaagctgcccaaggtgcagtgctacgaccagtgcgagaacagatggaccgtgcccgccacctgcccccagccctggagatacaccgccgccgccgtgctgggcaaccagatcttcatcatgggcggcgacaccgagttcagcgcctgcagcgcctacaagttcaacagcgagacctaccagtggaccaaggtgggcgacgtgaccgccaagagaatgagctgccacgccgtggccagcggcaacaagctgtacgtggtgggcggctacttcggcatccagagatgcaagaccctggactgctacgaccccaccctggacgtgtggaacagcatcaccaccgtgccctacagcctgatccccaccgccttcgtgagcacctggaagcacctgcccagctag

SEQ ID NO: 340487 - DNA, 153 bp, Artificial Sequence
  derived and/or modified sequence
atgagcgtgagcgtgcacgagaacagaaagagcagagccagcagcggcagcatcaacatctacctgttccacaagagcagctacgccgacagcgtgctgacccacctgaacctgctgagacagcagagactgttcaccgacgtgctgctgtag

SEQ ID NO: 340488 - DNA, 1551 bp, Artificial Sequence
  derived and/or modified sequence
atgttcagcggcggcctgaaggagagccaggacagcgaggtgaacttcgacaacagcatccaccccgaggtgctggagctgctgctggactacgcctacagcagcagagtgatcatcaacgaggagaacgccgagagcctgctggaggccggcgacatgctggagttccaggacatcagagacgcctgcgccgagttcctggagaagaacctgcaccccaccaactgcctgggcatgctgctgctgagcgacgcccaccagtgcaccaagctgtacgagctgagctggagaatgtgcctgagcaacttccagaccatcagaaagaacgaggacttcctgcagctgccccaggacatggtggtgcagctgctgagcagcgaggagctggagaccgaggacgagagactggtgtacgagagcgccatcaactggatcagctacgacctgaagaagagatactgctacctgcccgagctgctgcagaccgtgagactggccctgctgcccgccatctacctgatggagaacgtggccatggaggagctgatcaccaagcagagaaagagcaaggagatcgtggaggaggccatcagatgcaagctgaagatcctgcagaacgacggcgtggtgaccagcctgtgcgccagacccagaaagaccggccacgccctgttcctgctgggcggccagaccttcatgtgcgacaagctgtacctggtggaccagaaggccaaggagatcatccccaaggccgacatccccagccccagaaaggagttcagcgcctgcgccatcggctgcaaggtgtacatcaccggcggcagaggcagcgagaacggcgtgagcaaggacgtgtgggtgtacgacaccctgcacgaggagtggagcaaggccgcccccatgctggtggccagattcggccacggcagcgccgagctgaagcactgcctgtacgtggtgggcggccacaccgccgccaccggctgcctgcccgccagccccagcgtgagcctgaagcaggtggagcactacgaccccaccatcaacaagtggaccatggtggcccccctgagagagggcgtgagcaacgccgccgtggtgagcgccaagctgaagctgttcgccttcggcggcaccagcgtgagccacgacaagctgcccaaggtgcagtgctacgaccagtgcgagaacagatggaccgtgcccgccacctgcccccagccctggagatacaccgccgccgccgtgctgggcaaccagatcttcatcatgggcggcgacaccgagttcagcgcctgcagcgcctacaagttcaacagcgagacctaccagtggaccaaggtgggcgacgtgaccgccaagagaatgagctgccacgccgtggccagcggcaacaagctgtacgtggtgggcggctacttcggcatccagagatgcaagaccctggactgctacgaccccaccctggacgtgtggaacagcatcaccaccgtgccctacagcctgatccccaccgccttcgtgagcacctggaagcacctgcccagctag

SEQ ID NO: 340489 - DNA, 5517 bp, Artificial Sequence
  derived and/or modified sequence
agagtccagccgggggtgccgcacccactggggagtggggagggaggacacataggaaatgcctggggctggagtctctttggctctctgccagcaagaaacttaaacgtcctggcttgctcaacccgagtgtccctaaactgtccagacttttgcccgtccattgccactatctctccccactctgggtgtcctacccaaggcgctgtctatgcgtgcccagggcctgtcctgcggatacccagctcgccccttgcagccctttttagagcatctcgcgggctctggcatcaccaagcgcacagccccgggctgcgctcccctaaggtgggtccctcagatccggggctgtccattaaccaggctggcccaaagaggcgcagacactcgaacccgggaaaacttattttattctcggttcccggggttgcagctgccagcggctgagacagtgcgtccgctttgtctctctgcactccccgcagcccccctctcccgcttcctctcccgattaactcccccgacacgctcttctctagctcctctcctcctcccactccttctcctcctcttcctcctcctacaccacaggccgcgctaatgcgcttcctccctcccccggtgtcggtctctttgcatacgcgccccctcccctccccgccgcgccacttatagcggggcgcacggcggcggggcgcagactgctctggcagccggagaggaggcggtgcggcggtggcgctgcggagacccggtccagacgcctggcggccgccggcacacaaggcgctttctagctccctcccccgagcgcacagcccgcctccttccgcggcgcctgcagtggcaggcttgctctgccctaccgtgacgcgctccggagacgctctgcgggtcctggacaccgggtccgcggcgtggggacgacagacggaggcgaacgccatcggtagccggtccgcgagccatcgttcggggcgcagtcctctccccggctggccctcctttctccggggcattcgccaccgcttccctgggctgagacgaccggttcgtcgcctccttgcccgtgaccgtcgctagaactcagttgtgcgttgcggccagtcgccactgctgagtggaaacaaaatgtcagtcagtgtgcatgagaaccgcaagtccagggccagcagcggctccattaacatctatctgtttcacaagtcctcctacgctgacagcgtcctcactcacctgaatcttttacgccagcagcgtctcttcactgacgtccttctccatgccggaaataggaccttcccttgccaccgggcagtgctggctgcatgcagtcgctactttgaggccatgttcagtggtggcctgaaagagagccaggacagtgaggtcaactttgacaattccatccacccagaagtcttggagctgctgcttgactatgcgtactcctcccgggtcatcatcaatgaagaaaatgcagaatcgctcctggaagctggtgacatgctggagtttcaagacatccgggatgcatgtgcagagttcctggaaaagaacctgcatcccaccaactgcctgggcatgctgctgctgtctgatgcacaccagtgcaccaagctgtacgaactatcttggagaatgtgtctcagcaacttccaaaccatcaggaagaatgaagatttcctccagctgccccaggacatggtagtgcaactcttgtccagtgaagagctggagacagaggatgaaaggcttgtgtacgagtctgcaattaactggatcagctatgacctgaagaagcgctattgctacctcccagaactgttgcagacagtaaggctggcacttctgccagccatctatctcatggagaatgtggccatggaggaactcatcaccaagcagagaaagagtaaggaaattgtggaagaggccatcaggtgcaaactgaaaatcctgcagaatgacggtgtggtaaccagcctctgtgcccgacctcggaaaactggccatgccctcttccttctgggaggacagactttcatgtgtgacaagttgtatctggtagaccagaaggccaaagaaatcattcccaaggctgacattcccagcccaagaaaagagtttagtgcatgtgcgattggctgcaaagtgtacattactggggggcgggggtctgaaaatggggtctcaaaagatgtctgggtttatgataccctgcacgaggagtggtccaaggctgcccccatgctggtggccaggtttggccatggctctgctgaactgaagcactgcctgtatgtggttggggggcacacggccgcaactggctgcctcccggcctccccctcagtctctctaaagcaggtagaacattatgaccccacaatcaacaaatggaccatggtggccccactccgagaaggcgttagcaacgccgcagtagtgagtgccaaacttaagttatttgctttcggaggtaccagtgtcagtcatgacaagctccccaaagttcagtgttacgatcagtgtgaaaacaggtggactgtaccggccacctgtccccagccctggcgttacacagcagcagctgtgctggggaaccagatttttattatggggggtgatacagaattctctgcctgctctgcttataaattcaacagtgagacttaccagtggaccaaggtgggagatgtgacagcaaagcgcatgagctgccatgctgtggcctctggaaacaaactctacgtggttggaggatactttggcattcagcgatgcaagactttggactgctacgatccaacattagacgtgtggaacagcatcaccactgtcccgtactcgctgattcctactgcatttgtcagcacctggaaacatctgccttcttaaatgcagtacattctaaagagagtgagcatgagctcactccatcactcgatgagataatatgagatttctacttcggagaggccaagtctaatgaagagaaaaaaaggaaaagaagttgcaagactcgaataaaatctgctgcaccttgtaaatgctctaactggacatgaaggaaaggggcgagggaggggggtgggatttttggtgcaagtagcacatggtttaaatatgaatgaacaaacctgtgatctagtccttgtcttgtaattgtggattaatgtcaatgttaatcagcccctcaaagggagagaaaagctggaccttttcccttgctgtaccatattcagcatttgatttccatgggccccaccatttatgtgtagaatttgaaatggttgtcacctctctctgaggacagagcttgaagcctccacaccagctgctgctggagattcaaagcccaactgtgggtccgagagggaagctggctgggctggctgaagaatgaagaccactggactctccgttaatctctaaggggtctgctccccaggaacgtttctgaacaatggggactttgttggtagccatttggtagatgttcttttctatttataagtgactttaaactttcccttggctgttaagaagtttgttatagatttagctatttattgttcgatgcctgcatgctgaaacaatgcctacagctgtcttcacatgtatggacgtgtgtgaatggttgtacgttttgcacattttgtggctgttgagatgtgctttgctgcacaaacatgaaaatttttgagttacaatttggagcataactggagggtgggttggggaggggtggatttttaaaatgtcaagacagggaaggatgacaaaatggaaatttaaatgacatcctagaggtagagaaaccgtggagatcgcttttctcagactcaccaacttttaatgggatttcatggggtttggttgtgctgatagggtaaggggaggctgctttctgcccttctccccactcccatctgatttacttaattcagtctcagctgctgaaatttggaaaggaccaaattgctttacagtttttttctttgtgtagtatcttgaaatcctggaaaattctatggaatagttctgtatatagggcacaagtaaaggcattgtccaaagtttatttatttatttattaccctaagaatgctttgccataaccacatttaatgggaaaaacggcagtatcacagatgtaaattaactcaccagatttactgggcctgaactcattctcttcttgctatatgatttagcaagttctagaaggtctccaagacaataattacattggcacaatgtatacttcagtgctcacccgtaggcaaatctctttttaaaaaactctttggtgcacaagtaacacatttggccacaaaacaccaaagaattgtaggcagtggcccctattgagaagttttccggtagagttggaaatcagttgtgaatacattctttgctagttggagtgcttgtttactaagcatgtgccgtcgtaggtattagtgctagtctcagataggtgcttcccctgaggtgcaggggaagaccaaagtttgcaactcgaactgctttcgtccatgtttctcacattgctgtattttagaaaataggggttaagactgataacaaccttttacattgtgactgtgtttgcattgtctaatgacagataaatccttaacatttctctccaccttagtactttagactaattgtgtttgtccgtccatgccatgaatgagtgggctgtagttgggcctaaataaatgagctgttggaagaaaagaatcacagtactttccagcagtcagtccctggttcctagatgtgttctaagcaatgcaaatgtctaattgtcccccagtgggcatagtcagtgtcgtttatattgtagcagttacagctctgtagtttatgatgcaaatctgccaagagagatgtatgtgtcactgcatggcttctgaaagcaggatgaattttctgcagctgtttcaaagttggggtctgttcttgaatcctctattaattactgtgtgtgagccagagggagctgtggtaagggttgggcccccagcctgtagggaactttctggactcccactctttgaatcgatataggcatttggtctcactacttgaccattctcaccctgtgaaacgtcccacactttgaagcaaatacaattcacagcacagtacacacaaaaaccttggcataagacagagaaggttcttcttattttgtgggctggttgctgtagaaacacataacaaagggcagccctccacttctggtataattgtgtagccccttttctttgggcttgacacctgtcttgaataagagtgattagagctgcataatgtccctctcttggctattgaccatgtggttcacgtacaaaactctgtataagttgaaggaaaatgttcatgttcatatgtacttgtttgctatgactacattttgaggttttgtaaaactgttatttttttttttttcacaatgtgaaactgaaggtcaataaattattagagattttctcttca

SEQ ID NO: 340490 - DNA, 1405 bp, Artificial Sequence
  derived and/or modified sequence
agagtccagccgggggtgccgcacccactggggagtggggagggaggacacataggaaatgcctggggctggagtctctttggctctctgccagcaagaaacttaaacgtcctggcttgctcaacccgagtgtccctaaactgtccagacttttgcccgtccattgccactatctctccccactctgggtgtcctacccaaggcgctgtctatgcgtgcccagggcctgtcctgcggatacccagctcgccccttgcagccctttttagagcatctcgcgggctctggcatcaccaagcgcacagccccgggctgcgctcccctaaggtgggtccctcagatccggggctgtccattaaccaggctggcccaaagaggcgcagacactcgaacccgggaaaacttattttattctcggttcccggggttgcagctgccagcggctgagacagtgcgtccgctttgtctctctgcactccccgcagcccccctctcccgcttcctctcccgattaactcccccgacacgctcttctctagctcctctcctcctcccactccttctcctcctcttcctcctcctacaccacaggccgcgctaatgcgcttcctccctcccccggtgtcggtctctttgcatacgcgccccctcccctccccgccgcgccacttatagcggggcgcacggcggcggggcgcagactgctctggcagccggagaggaggcggtgcggcggtggcgctgcggagacccggtccagacgcctggcggccgccggcacacaaggcgctttctagctccctcccccgagcgcacagcccgcctccttccgcggcgcctgcagtggcaggcttgctctgccctaccgtgacgcgctccggagacgctctgcgggtcctggacaccgggtccgcggcgtggggacgacagacggaggcgaacgccatcggtagccggtccgcgagccatcgttcggggcgcagtcctctccccggctggccctcctttctccggggcattcgccaccgcttccctgggctgagacgaccggttcgtcgcctccttgcccgtgaccgtcgctagaactcagttgtgcgttgcggccagtcgccactgctctggttttccaagaattgatataaagcgggaagaacagaaaacagcagtcataagtatgctactcaaaatattcttctttttatgtgccaaatcctcacattggaagctgtcccgagcaagacaggagtggaaacaaaatgtcagtcagtgtgcatgagaaccgcaagtccagggccagcagcggctccattaacatctatctgtttcacaagtcctcctacgctgacagcgtcctcactcacctgaatcttttacgccagcagcgtctcttcactgacgtccttct

SEQ ID NO: 340491 - DNA, 2024 bp, Artificial Sequence
  derived and/or modified sequence
cggcacacaaggcgctttctagctggccctcctttctccggggcattcgccaccgcttccctgggctgagacgaccggttcgtcgcctccttgcccgtgaccgtcgctagaactcagttgtgcgttgcggccagtcgccactgctgagtggaaacaaaatgtcagtcagtgtgcatgagaaccgcaagtccagggccagcagcggctccattaacatctatctgtttcacaagtcctcctacgctgacagcgtcctcactcacctgaatcttttacgccagcagcgtctcttcactgacgtccttctccatgccggaaataggaccttcccttgccaccgggcagtgctggctgcatgcagtcgctactttgaggccatgttcagtggtggcctgaaagagagccaggacagtgaggtcaactttgacaattccatccacccagaagtcttggagctgctgcttgactatgcgtactcctcccgggtcatcatcaatgaagaaaatgcagaatcgctcctggaagctggtgacatgctggagtttcaagacatccgggatgcatgtgcagagttcctggaaaagaacctgcatcccaccaactgcctgggcatgctgctgctgtctgatgcacaccagtgcaccaagctgtacgaactatcttggagaatgtgtctcagcaacttccaaaccatcaggaagaatgaagatttcctccagctgccccaggacatggtagtgcaactcttgtccagtgaagagctggagacagaggatgaaaggcttgtgtacgagtctgcaattaactggatcagctatgacctgaagaagcgctattgctacctcccagaactgttgcagacagtaaggctggcacttctgccagccatctatctcatggagaatgtggccatggaggaactcatcaccaagcagagaaagagtaaggaaattgtggaagaggccatcaggtgcaaactgaaaatcctgcagaatgacggtgtggtaaccagcctctgtgcccgacctcggaaaactggccatgccctcttccttctgggaggacagactttcatgtgtgacaagttgtatctggtagaccagaaggccaaagaaatcattcccaaggctgacattcccagcccaagaaaagagtttagtgcatgtgcgattggctgcaaagtgtacattactggggggcgggggtctgaaaatggggtctcaaaagatgtctgggtttatgataccctgcacgaggagtggtccaaggctgcccccatgctggtggccaggtttggccatggctctgctgaactgaagcactgcctgtatgtggttggggggcacacggccgcaactggctgcctcccggcctccccctcagtctctctaaagcaggtagaacattatgaccccacaatcaacaaatggaccatggtggccccactccgagaaggcgttagcaacgccgcagtagtgagtgccaaacttaagttatttgctttcggaggtaccagtgtcagtcatgacaagctccccaaagttcagtgttacgatcagtgtgaaaacaggtggactgtaccggccacctgtccccagccctggcgttacacagcagcagctgtgctggggaaccagatttttattatggggggtgatacagaattctctgcctgctctgcttataaattcaacagtgagacttaccagtggaccaaggtgggagatgtgacagcaaagcgcatgagctgccatgctgtggcctctggaaacaaactctacgtggttggaggatactttggcattcagcgatgcaagactttggactgctacgatccaacattagacgtgtggaacagcatcaccactgtcccgtactcgctgattcctactgcatttgtcagcacctggaaacatctgccttcttaaatgcagtacattctaaagagagtgagcatgagctcactccatcactcgatgagataatatgagatttctacttcggagaggccaagtctaatgaag

SEQ ID NO: 340492 - DNA, 5381 bp, Artificial Sequence
  derived and/or modified sequence
agagtccagccgggggtgccgcacccactggggagtggggagggaggacacataggaaatgcctggggctggagtctctttggctctctgccagcaagaaacttaaacgtcctggcttgctcaacccgagtgtccctaaactgtccagacttttgcccgtccattgccactatctctccccactctgggtgtcctacccaaggcgctgtctatgcgtgcccagggcctgtcctgcggatacccagctcgccccttgcagccctttttagagcatctcgcgggctctggcatcaccaagcgcacagccccgggctgcgctcccctaaggtgggtccctcagatccggggctgtccattaaccaggctggcccaaagaggcgcagacactcgaacccgggaaaacttattttattctcggttcccggggttgcagctgccagcggctgagacagtgcgtccgctttgtctctctgcactccccgcagcccccctctcccgcttcctctcccgattaactcccccgacacgctcttctctagctcctctcctcctcccactccttctcctcctcttcctcctcctacaccacaggccgcgctaatgcgcttcctccctcccccggtgtcggtctctttgcatacgcgccccctcccctccccgccgcgccacttatagcggggcgcacggcggcggggcgcagactgctctggcagccggagaggaggcggtgcggcggtggcgctgcggagacccggtccagacgcctggcggccgccggcacacaaggcgctttctagctccctcccccgagcgcacagcccgcctccttccgcggcgcctgcagtggcaggcttgctctgccctaccgtgacgcgctccggagacgctctgcgggtcctggacaccgggtccgcggcgtggggacgacagacggaggcgaacgccatcggtagccggtccgcgagccatcgttcggggcgcagtcctctccccggctggccctcctttctccggggcattcgccaccgcttccctgggctgagacgaccggttcgtcgcctccttgcccgtgaccgtcgctagaactcagttgtgcgttgcggccagtcgccactgctcagcgtctcttcactgacgtccttctccatgccggaaataggaccttcccttgccaccgggcagtgctggctgcatgcagtcgctactttgaggccatgttcagtggtggcctgaaagagagccaggacagtgaggtcaactttgacaattccatccacccagaagtcttggagctgctgcttgactatgcgtactcctcccgggtcatcatcaatgaagaaaatgcagaatcgctcctggaagctggtgacatgctggagtttcaagacatccgggatgcatgtgcagagttcctggaaaagaacctgcatcccaccaactgcctgggcatgctgctgctgtctgatgcacaccagtgcaccaagctgtacgaactatcttggagaatgtgtctcagcaacttccaaaccatcaggaagaatgaagatttcctccagctgccccaggacatggtagtgcaactcttgtccagtgaagagctggagacagaggatgaaaggcttgtgtacgagtctgcaattaactggatcagctatgacctgaagaagcgctattgctacctcccagaactgttgcagacagtaaggctggcacttctgccagccatctatctcatggagaatgtggccatggaggaactcatcaccaagcagagaaagagtaaggaaattgtggaagaggccatcaggtgcaaactgaaaatcctgcagaatgacggtgtggtaaccagcctctgtgcccgacctcggaaaactggccatgccctcttccttctgggaggacagactttcatgtgtgacaagttgtatctggtagaccagaaggccaaagaaatcattcccaaggctgacattcccagcccaagaaaagagtttagtgcatgtgcgattggctgcaaagtgtacattactggggggcgggggtctgaaaatggggtctcaaaagatgtctgggtttatgataccctgcacgaggagtggtccaaggctgcccccatgctggtggccaggtttggccatggctctgctgaactgaagcactgcctgtatgtggttggggggcacacggccgcaactggctgcctcccggcctccccctcagtctctctaaagcaggtagaacattatgaccccacaatcaacaaatggaccatggtggccccactccgagaaggcgttagcaacgccgcagtagtgagtgccaaacttaagttatttgctttcggaggtaccagtgtcagtcatgacaagctccccaaagttcagtgttacgatcagtgtgaaaacaggtggactgtaccggccacctgtccccagccctggcgttacacagcagcagctgtgctggggaaccagatttttattatggggggtgatacagaattctctgcctgctctgcttataaattcaacagtgagacttaccagtggaccaaggtgggagatgtgacagcaaagcgcatgagctgccatgctgtggcctctggaaacaaactctacgtggttggaggatactttggcattcagcgatgcaagactttggactgctacgatccaacattagacgtgtggaacagcatcaccactgtcccgtactcgctgattcctactgcatttgtcagcacctggaaacatctgccttcttaaatgcagtacattctaaagagagtgagcatgagctcactccatcactcgatgagataatatgagatttctacttcggagaggccaagtctaatgaagagaaaaaaaggaaaagaagttgcaagactcgaataaaatctgctgcaccttgtaaatgctctaactggacatgaaggaaaggggcgagggaggggggtgggatttttggtgcaagtagcacatggtttaaatatgaatgaacaaacctgtgatctagtccttgtcttgtaattgtggattaatgtcaatgttaatcagcccctcaaagggagagaaaagctggaccttttcccttgctgtaccatattcagcatttgatttccatgggccccaccatttatgtgtagaatttgaaatggttgtcacctctctctgaggacagagcttgaagcctccacaccagctgctgctggagattcaaagcccaactgtgggtccgagagggaagctggctgggctggctgaagaatgaagaccactggactctccgttaatctctaaggggtctgctccccaggaacgtttctgaacaatggggactttgttggtagccatttggtagatgttcttttctatttataagtgactttaaactttcccttggctgttaagaagtttgttatagatttagctatttattgttcgatgcctgcatgctgaaacaatgcctacagctgtcttcacatgtatggacgtgtgtgaatggttgtacgttttgcacattttgtggctgttgagatgtgctttgctgcacaaacatgaaaatttttgagttacaatttggagcataactggagggtgggttggggaggggtggatttttaaaatgtcaagacagggaaggatgacaaaatggaaatttaaatgacatcctagaggtagagaaaccgtggagatcgcttttctcagactcaccaacttttaatgggatttcatggggtttggttgtgctgatagggtaaggggaggctgctttctgcccttctccccactcccatctgatttacttaattcagtctcagctgctgaaatttggaaaggaccaaattgctttacagtttttttctttgtgtagtatcttgaaatcctggaaaattctatggaatagttctgtatatagggcacaagtaaaggcattgtccaaagtttatttatttatttattaccctaagaatgctttgccataaccacatttaatgggaaaaacggcagtatcacagatgtaaattaactcaccagatttactgggcctgaactcattctcttcttgctatatgatttagcaagttctagaaggtctccaagacaataattacattggcacaatgtatacttcagtgctcacccgtaggcaaatctctttttaaaaaactctttggtgcacaagtaacacatttggccacaaaacaccaaagaattgtaggcagtggcccctattgagaagttttccggtagagttggaaatcagttgtgaatacattctttgctagttggagtgcttgtttactaagcatgtgccgtcgtaggtattagtgctagtctcagataggtgcttcccctgaggtgcaggggaagaccaaagtttgcaactcgaactgctttcgtccatgtttctcacattgctgtattttagaaaataggggttaagactgataacaaccttttacattgtgactgtgtttgcattgtctaatgacagataaatccttaacatttctctccaccttagtactttagactaattgtgtttgtccgtccatgccatgaatgagtgggctgtagttgggcctaaataaatgagctgttggaagaaaagaatcacagtactttccagcagtcagtccctggttcctagatgtgttctaagcaatgcaaatgtctaattgtcccccagtgggcatagtcagtgtcgtttatattgtagcagttacagctctgtagtttatgatgcaaatctgccaagagagatgtatgtgtcactgcatggcttctgaaagcaggatgaattttctgcagctgtttcaaagttggggtctgttcttgaatcctctattaattactgtgtgtgagccagagggagctgtggtaagggttgggcccccagcctgtagggaactttctggactcccactctttgaatcgatataggcatttggtctcactacttgaccattctcaccctgtgaaacgtcccacactttgaagcaaatacaattcacagcacagtacacacaaaaaccttggcataagacagagaaggttcttcttattttgtgggctggttgctgtagaaacacataacaaagggcagccctccacttctggtataattgtgtagccccttttctttgggcttgacacctgtcttgaataagagtgattagagctgcataatgtccctctcttggctattgaccatgtggttcacgtacaaaactctgtataagttgaaggaaaatgttcatgttcatatgtacttgtttgctatgactacattttgaggttttgtaaaactgttatttttttttttttcacaatgtgaaactgaaggtcaataaattattagagattttctcttca

SEQ ID NO: 340493 - DNA, 192 bp, Artificial Sequence
  derived and/or modified sequence
atgttcgccatgaagaccaaggccgccctggccatctggtgccccggctacagcgagacccagatcaacgccacccaggccatgaagaagagaagaaagagaaaggtgaccaccaacaagtgcctggagcaggtgagccagctgcagggcctgtggagaagattcaacagacccctgctgaagcagcagtag

SEQ ID NO: 340494 - DNA, 192 bp, Artificial Sequence
  derived and/or modified sequence
atgttcgccatgaagactaaagctgctttagcaatatggtgtcctggatacagcgagactcagatcaatgctacccaggccatgaagaaacgcaggaaacgcaaggttacaaccaacaagtgcctggagcaggtgagccagctgcaggggctctggaggcgtttcaacagaccgttgctcaaacagcaatag

SEQ ID NO: 340495 - DNA, 192 bp, Artificial Sequence
  derived and/or modified sequence
atgtttgccatgaagaccaaggccgccctggccatctggtgccccggctacagcgagacccagatcaatgccacccaggccatgaagaagaggaggaagaggaaggtgaccaccaacaagtgcctggagcaggtgtcccagctgcagggcctgtggaggcgcttcaaccggcccctgctgaagcagcagtag

SEQ ID NO: 340496 - DNA, 192 bp, Artificial Sequence
  derived and/or modified sequence
atgttcgccatgaagaccaaggccgccctggccatctggtgccccggctactccgagacacagattaacgcgactcaagcaatgaagaagaggagaaagcgaaaggtgaccaccaacaagtgcctcgaacaggtgagccaattacagggcttgtggagacggtttaatcgcccattgcttaaacagcagtag

SEQ ID NO: 340497 - DNA, 192 bp, Artificial Sequence
  derived and/or modified sequence
atgttcgctatgaagacaaaagccgctctagctatttggtgtcccggttactccgagacccagatcaatgctacgcaagccatgaaaaagagaagaaagaggaaagtcacgactaacaaatgcctggaacaagtgagccagctgcagggcctctggcgtaggttcaaccggccactgctgaagcagcagtag

SEQ ID NO: 340498 - protein, 350 aa, Artificial Sequence
  derived and/or modified sequence
MPITINDVPPCISQLLDNEESWDFNIFELEAITHKRPLVYLGLKVFSRFGVCEFLNCSETTLRAWFQVIEANYHSSNAYHNSTHAADVLHATAFFLGKERVKGSLDQLDEVAALIAATVHDVDHPGRTNSFLCNAGSELAVLYNDTAVLESHHTALAFQLTVKDTKCNIFKNIDRNHYRTLRQAIIDMVLATEMTKHFEHVNKFVNSINKPMAAEIEGSDCECNPAGKNFPENQILIKRMMIKCADVANPCRPLDLCIEWAGRISEEYFAQTDEEKRQGLPVVMPVFDRNTCSIPKSQISFIDYFITDMFDAWDAFAHLPALMQHLADNYKHWKTLDDLKCKSLRLPSDS

SEQ ID NO: 340499 - DNA, 1053 bp, Artificial Sequence
  derived and/or modified sequence
atgcccatcactattaacgatgtcccgccctgtatcagccaactgctggacaacgaggagagctgggatttcaatatcttcgagctagaggccataacacataaaaggcccttagtgtacctgggactaaaagtgttttccaggttcggcgtttgtgaatttctgaactgtagcgagactacgctgagggcatggtttcaggtgatcgaagcaaactaccattcatccaatgcctatcataactccacccacgctgccgacgtgttgcatgctacagccttcttcctgggaaaggagagggttaagggtagtttggatcagttagacgaagtggccgcgttaatcgccgcaaccgtgcacgatgtggaccatcctgggaggaccaactcattcctctgtaatgccggatccgagcttgccgtactgtataatgacaccgcagtcctggagtctcaccacaccgctctagccttccaactcactgtgaaggacacaaaatgcaatatttttaagaacatcgatagaaatcattacaggacattaaggcaggctataattgacatggtgctggcaaccgaaatgaccaagcacttcgagcacgtgaataaatttgtcaacagcataaataagcccatggcagccgagattgagggctctgactgcgaatgcaaccccgccggaaagaatttcccggagaaccagatcctaatcaaacggatgatgatcaagtgcgcggatgttgccaacccatgtagaccactggacctttgcattgaatgggcaggcaggatcagtgaggagtatttcgctcagacagatgaggagaaaagacaaggtctgcctgtggttatgccagtgtttgatagaaacacctgctcaatccccaaatcacagattagctttatcgattattttatcaccgacatgttcgatgcatgggatgcatttgcccatctcccagcactgatgcaacacctcgctgataactacaaacactggaagaccctcgatgacctgaaatgcaagtccttacgtctgccttccgactcttag

SEQ ID NO: 340500 - DNA, 1053 bp, Artificial Sequence
  derived and/or modified sequence
atgcccatcaccatcaatgatgtgcccccctgcatcagccagctgctggacaatgaggagagctgggacttcaacatctttgagctggaggccatcacccacaagaggcccctggtgtacctgggcctgaaggtgttcagcagatttggagtgtgtgagttcctgaactgcagcgagaccaccctgcgggcctggttccaggtgattgaggccaactaccacagcagcaatgcctaccacaacagcacccatgctgctgatgtgctgcacgccacagccttcttcctgggcaaggagcgggtgaagggcagcctggaccagctggatgaggtggccgccctgattgctgccaccgtgcatgatgtggaccaccctggccgcaccaacagcttcctgtgcaatgccggcagcgagctggccgtgctgtacaatgacacagctgtgctggagagccaccacacagccctggccttccagctgactgtgaaggacaccaagtgcaacatcttcaagaacatcgacaggaaccactaccgcaccctgcggcaggccatcatcgacatggtgctggccacagagatgaccaagcactttgagcacgtgaacaagtttgtgaacagcatcaacaagcccatggctgctgagattgagggcagtgactgtgagtgcaacccagctgggaagaacttccctgagaaccagatcctgatcaagaggatgatgatcaagtgtgctgatgtggccaacccctgccggcccctggacctgtgcatcgagtgggccggccgcatcagcgaggagtactttgcccagacagatgaggagaagaggcagggcctgcctgtggtgatgcctgtgtttgacaggaacacctgcagcatccccaagagccagatctccttcatcgactacttcatcacagacatgtttgatgcctgggatgcctttgcccacctgcctgccctgatgcagcacctggccgacaactacaagcactggaagaccctggatgacctgaagtgcaagagcctgcggctgcccagcgacagctag

SEQ ID NO: 340501 - DNA, 1053 bp, Artificial Sequence
  derived and/or modified sequence
atgcccatcaccatcaacgacgtgcccccctgcatcagccagctgctggacaacgaggagtcttgggatttcaatatatttgagttggaagccatcactcacaagcgcccactagtctacttaggattaaaggtgttctcacggtttggcgtgtgcgaatttctcaactgttccgaaacaacacttcgcgcctggtttcaggttattgaggccaattatcacagttccaatgcctaccacaacagcacccacgccgccgacgtactccacgcgacagccttcttcctcggaaaggagcgcgtaaagggaagcctggaccaactggacgaagtggctgctttgattgccgcgactgtccacgatgttgatcacccaggaagaactaattcttttctgtgtaacgcgggttccgaactggctgtcttgtataatgacacagccgtgttagaatcccaccatacagcactcgcgtttcagctaactgttaaagatactaagtgcaatatttttaagaatattgacaggaatcactacaggaccctgcgacaggctattattgacatggtgctggctaccgaaatgacgaagcactttgagcacgtaaataagttcgtgaactccattaataaaccgatggctgcagaaatagagggatcggactgtgaatgtaacccagcggggaagaactttcctgagaaccagatactgattaaacggatgatgattaagtgcgcagacgtggccaatccttgcagacctctggacctgtgcatcgagtgggctggtcggatctctgaggaatatttcgcccaaacagacgaggagaagcgacaaggccttcctgtggtgatgcccgtattcgacagaaacacatgtagcatccccaaaagtcagattagcttcatagattacttcataaccgacatgtttgacgcttgggacgctttcgcccacctcccagccctgatgcagcatctggcagataactacaagcactggaaaacccttgatgacctgaaatgcaagtctctgcggcttcctagcgactcctag

SEQ ID NO: 340502 - DNA, 3474 bp, Artificial Sequence
  derived and/or modified sequence
gtggcatgctggtgggcatagcttatggggaggtgcttctgccctgttctacctagtcctcaatttggccccatgtccgagtcccttctcctacctcactgccataccatcgtgggtttcctctccagagaatgctgtgaggaaccagtgagtgattccacctcaattttatgtggttttggggaagcggagcgagagaagagcaagtaaaaccaagaatctcttgccatacacacgttacaggcaggacaattgtggctgttgttacttctgtatttactcagtttttaaaattaagctcttggcctaaagatccaacatgtaacttcaggggagtccttcattaattaatactactttaaaccttagcacacatcgtctgggaatgacaaataagcatttctttttttttaaatttaattttattattattatactttaagttttagggtacatgtgcacaacgtgcaggtttgttacatatgtatacatgtgccatgttggtgtgcatttctaaatgacttttaagcaaagatctagatgattgaggtactcagagatcaaaggtggagggaaggaaactgagattcaggaacacttggggactagttcaagagccaggatatggccaagcattggaatttcgtccactctcttaacgctgcatctccaaggacctcaagcccagaaactcttctttaaaaggacggcttgagaagactgtcaggaaacgagtatgtgtttactaagaatgtgcaccagagtcacagtcaccttgcaatgccaataaccatcaatgatgttcccccttgtatctctcaattacttgataatgaggagagttgggacttcaacatctttgaattggaagccattacgcataaaaggccattggtttatctgggcttaaaggtcttctctcggtttggagtatgtgaatttttaaactgttctgaaaccactcttcgggcctggttccaagtgatcgaagccaactaccactcttccaatgcctaccacaactccacccatgctgccgacgtcctgcacgccaccgctttctttcttggaaaggaaagagtaaagggaagcctcgatcagttggatgaggtggcagccctcattgctgccacagtccatgacgtggatcacccgggaaggaccaactctttcctctgcaatgcaggcagtgagcttgctgtgctctacaatgacactgctgttctggagagtcaccacaccgccctggccttccagctcacggtcaaggacaccaaatgcaacattttcaagaatattgacaggaaccattatcgaacgctgcgccaggctattattgacatggttttggcaacagagatgacaaaacactttgaacatgtgaataagtttgtgaacagcatcaacaagccaatggcagctgagattgaaggcagcgactgtgaatgcaaccctgctgggaagaacttccctgaaaaccaaatcctgatcaaacgcatgatgattaagtgtgctgacgtggccaacccatgccgccccttggacctgtgcattgaatgggctgggaggatctctgaggagtattttgcacagactgatgaagagaagagacagggactacctgtggtgatgccagtgtttgaccggaatacctgtagcatccccaagtctcagatctctttcattgactacttcataacagacatgtttgatgcttgggatgcctttgcacatctgccagccctgatgcaacatttggctgacaactacaaacactggaagacactagatgacctaaagtgcaaaagtttgaggcttccatctgacagctaaagccaagccacagagggggcctcttgaccgacaaaggacactgtgaatcacagtagcgtaaacgagaggccttcctttctaatgacaatgacaggtattggtgaaggagctaatgtttaatatttgaccttgaatcattcaagtccccaaatttcattcttagaaagttatgttccatgaagaaaaatatatgttcttttgaatacttaatgacagaacaaatacttggcaaactcctttgctctgctgtcatcctgtgtacccttgtcaatccatggagctggttcactgtaactagcaggccacaggaagcaaagccttggtgcctgtgagctcatctcccaggatggtgactaagtagcttagctagtgatcagctcatcctttaccataaaagtcatcattgctgtttagcttgactgttttcctcaagaacatcgatctgaaggattcataaggagcttatctgaacagatttatctaagaaaaaaaaaaaacgacataaaataagtgaaacaactaggaccaaattacagataaactagttagcttcacagcctctatggctacatggttcttctggccgatggtatgacacctaagttagaacacagccttggctggtgggtgccctctctagactggtatcagcagcctgtgtaacccctttcctgtaaaaggggttcatcttaacaaagtcatccatgatgagggaaaaagtggcatttcatttttggggaatccatgagcttcctttatttctggctcacagaggcagccacgaggcactacaccaagtattatataaaagccattaaatttgaatgcccttggacaagcttttcttaaaaaaaaaaaaaaaaagtttatatacatgtttaaaatttttattaaaatccaaattttctgggtgtaagcccatgcagtatgttgtgccatgcaccatctatacgtaatattttgggaggggataggggaagtttcaaggttcagatatttttaaccagtctatatttgaaatcatgccattagctttaacaatgttaaaattgtgtggtgtaaatatatcagaaaataggcatatggggaggcagtaaatactattttaagctattaattgtatgctaaaagcttctaaagcacaagtgcatatttttatactgctcttttcacaactccctgtgatctacataaagtcagactcgagattttcctttctcttttaccagctgatccttcctatgtattataaatattagactccgtaaacaaacttcatttttctttctctgtacttcatgctgcatttttaaaaggtataaacaaacagagactgaattaattgaatcagtaattacttttttccaatacaaattggaatgcagaatacttggaacttgtacatggggaaaaaatgacttatcactacataatgtgccaatgtttttttctatgttttgtaccaaaaatggaaaaatatgacaattccatgcaaagaaatgtatctaaattatttttgttagatgataagagaacttgcttggtcaggacagcagccagctttgtattgtaatgctatattatgtaaatgtgatgaaaatgtttttgtgaagtacttgtaactaaattcctacagccatt

SEQ ID NO: 340503 - DNA, 1053 bp, Artificial Sequence
  derived and/or modified sequence
atgcccatcacaattaacgatgtgcccccttgcatttcgcagctgctggacaatgaggagtcctgggattttaacatctttgagttggaggctataacccataagcgccctctcgtgtatctaggcctaaaggtcttttctcgttttggggtgtgcgagttccttaattgtagcgaaaccactctgcgcgcttggtttcaggtgatcgaggccaactatcactcgtcaaacgcttaccacaatagcactcacgcagctgatgttctacacgcaactgcttttttcttgggtaaagaaagagtgaaaggctctttagaccagttggatgaggttgctgccctcattgctgctaccgtgcacgacgtcgaccacccgggtcggaccaactccttcctatgtaacgcaggttctgaactggctgtgctctacaacgacacagccgttctggaatcacatcacactgccctggccttccagctgaccgtgaaggacaccaaatgtaatatttttaagaacatcgatagaaaccattaccgtacactgaggcaggccatcattgacatggtgctggcaaccgaaatgactaaacacttcgagcacgtcaataaatttgtgaactcaatcaacaagcctatggccgctgagatagagggcagtgactgcgaatgcaatcctgctggcaagaacttccccgaaaaccaaattctgataaagcggatgatgatcaagtgtgctgacgttgccaacccatgtcgacccttggatttgtgcatcgagtgggccggtcggatttctgaggagtattttgcccagactgacgaggaaaagcggcagggacttcctgttgtgatgccggtctttgatcgcaacacttgcagcattccaaagtctcagatttcgtttatcgattacttcataaccgacatgtttgatgcatgggatgcctttgcccacctacctgcccttatgcagcacctggcagataactataaacactggaaaacactggatgatctgaagtgcaagagccttaggctacctagcgatagttag

SEQ ID NO: 340504 - DNA, 1053 bp, Artificial Sequence
  derived and/or modified sequence
atgcccatcaccatcaacgacgtgcccccctgcatcagccagctgctggacaacgaggagagctgggacttcaacatcttcgagctggaggccatcacccacaagagacccctggtgtacctgggcctgaaggtgttcagcagattcggcgtgtgcgagttcctgaactgcagcgagaccaccctgagagcctggttccaggtgatcgaggccaactaccacagcagcaacgcctaccacaacagcacccacgccgccgacgtgctgcacgccaccgccttcttcctgggcaaggagagagtgaagggcagcctggaccagctggacgaggtggccgccctgatcgccgccaccgtgcacgacgtggaccaccccggcagaaccaacagcttcctgtgcaacgccggcagcgagctggccgtgctgtacaacgacaccgccgtgctggagagccaccacaccgccctggccttccagctgaccgtgaaggacaccaagtgcaacatcttcaagaacatcgacagaaaccactacagaaccctgagacaggccatcatcgacatggtgctggccaccgagatgaccaagcacttcgagcacgtgaacaagttcgtgaacagcatcaacaagcccatggccgccgagatcgagggcagcgactgcgagtgcaaccccgccggcaagaacttccccgagaaccagatcctgatcaagagaatgatgatcaagtgcgccgacgtggccaacccctgcagacccctggacctgtgcatcgagtgggccggcagaatcagcgaggagtacttcgcccagaccgacgaggagaagagacagggcctgcccgtggtgatgcccgtgttcgacagaaacacctgcagcatccccaagagccagatcagcttcatcgactacttcatcaccgacatgttcgacgcctgggacgccttcgcccacctgcccgccctgatgcagcacctggccgacaactacaagcactggaagaccctggacgacctgaagtgcaagagcctgagactgcccagcgacagctag

SEQ ID NO: 340505 - protein, 167 aa, Artificial Sequence
  derived and/or modified sequence
MKLWVSALLMAWFGVLSCVQAEFFTSIGHMTDLIYAEKELVQSLKEYILVEEAKLSKIKSWANKMEALTSKSAADAEGYLAHPVNAYKLVKRLNTDWPALEDLVLQDSAAGFIANLSVQRQFFPTDEDEIGAAKALMRLQDTYRLDPGTISRGELPGTKYQAMLSVD

SEQ ID NO: 340506 - protein, 101 aa, Artificial Sequence
  derived and/or modified sequence
MKLWVSALLMAWFGVLSCVQAEFFTSIGHMTDLIYAEKELVQSLKEYILVEEAKLSKIKSWANKMEALTSKSAADAEGYLAHPVNAYKLVKRLNTDWPALE

SEQ ID NO: 340507 - protein, 204 aa, Artificial Sequence
  derived and/or modified sequence
MKLWVSALLMAWFGVLSCVQAEFFTSIGHMTDLIYAEKELVQSLKEYILVEEAKLSKIKSWANKMEALTSKSAADAEGYLAHPVNAYKLVKRLNTDWPALEDLVLQDSAAGFIANLSVQRQFFPTDEDEIGAAKALMRLQDTYRLDPGTISRGELPGTKYQAMLSVDDCFGMGRSAYNEGDYYHTVLWMEQVLKQLDAGEEATT

SEQ ID NO: 340508 - protein, 114 aa, Artificial Sequence
  derived and/or modified sequence
MKLWVSALLMAWFGVLSCVQAEFFTSIGHMTDLIYAEKELVQSLKEYILVEEAKLSKIKSWANKMEALTSKSAADAEGYLAHPVNAYKLVKRLNTDWPALEDLVLQDSAAGFIA

SEQ ID NO: 340509 - protein, 147 aa, Artificial Sequence
  derived and/or modified sequence
MKLWVSALLMAWFGVLSCVQAEFFTSIGHMTDLIYAEKELVQSLKEYILVEEAKLSKIKSWANKMEALTSKSAADAEGYLAHPVNAYKLVKRLNTDWPALEDLVLQDSAAGFIANLSVQRQFFPTDEDEIGAAKALMRLQDTYRLDP

SEQ ID NO: 340510 - protein, 184 aa, Artificial Sequence
  derived and/or modified sequence
MKLWVSALLMAWFGVLSCVQAEFFTSIGHMTDLIYAEKELVQSLKEYILVEEAKLSKIKSWANKMEALTSKSAADAEGYLAHPVNAYKLVKRLNTDWPALEDLVLQDSAAGFIANLSVQRQFFPTDEDEIGAAKALMRLQDTYRLDPGTISRGELPGTKYQAMLSVDDCFGMGRSAYNEGDYYH

SEQ ID NO: 340511 - protein, 153 aa, Artificial Sequence
  derived and/or modified sequence
MKLWVSALLMAWFGVLSCVQAEFFTSIGHMTDLIYAEKELVQSLKEYILVEEAKLSKIKSWANKMEALTSKSAADAEGYLAHPVNAYKLVKRLNTDWPALEDLVLQDSAAGFIANLSVQRQFFPTDEDEIGAAKALMRLQDTYRLDPGTISRG

SEQ ID NO: 340512 - DNA, 504 bp, Artificial Sequence
  derived and/or modified sequence
atgaagctgtgggtaagtgcactgctaatggcttggttcggagtgcttagttgcgtccaggccgaattttttacctcaattggtcacatgaccgacctaatctacgcggagaaggagctggtgcaaagcctgaaggagtatatccttgtcgaggaggctaagctcagcaagattaagagctgggccaataaaatggaagcactgacctcaaagtctgcagccgatgccgaaggttacttggcccatccagtgaatgcatataagctggtgaaacgcctgaatacggattggcccgccctggaagatctggtgctacaggattccgctgccggattcatagcaaatctgtctgttcagagacagttcttccctaccgacgaagacgagatcggggctgccaaggccttaatgagactacaagatacctaccgtctcgaccccgggaccatatctcgtggcgaactaccaggaaccaagtatcaggccatgctcagcgtggactag

SEQ ID NO: 340513 - DNA, 306 bp, Artificial Sequence
  derived and/or modified sequence
atgaagctatgggtgagtgccctactgatggcttggtttggagtgttgtcatgtgttcaggcggagttttttacatcaattgggcatatgacagatctcatatacgcagaaaaagagcttgtgcaaagcctgaaagaatatatcctggtcgaggaggccaaacttagcaaaatcaagtcttgggccaataagatggaggctttgacctcaaagagtgcagccgacgccgaagggtacctggctcaccccgtcaatgcttacaagctggtcaagagacttaacacagactggcccgcactggaatag

SEQ ID NO: 340514 - DNA, 615 bp, Artificial Sequence
  derived and/or modified sequence
atgaaactgtgggtgagcgccctcctcatggcctggttcggcgtgttatcatgtgtccaggctgaattttttacaagcatcgggcatatgacagacctgatctacgctgaaaaggagcttgtgcagtcacttaaggaatatatactggtggaggaggccaaactcagtaagatcaaatcctgggccaacaagatggaggcactgacaagtaaatccgctgccgacgcagaaggatacttggcacatcccgtgaatgcatataagctagttaagcggctgaacaccgattggcccgctcttgaggacctggtgctccaagacagtgctgctggcttcattgcaaacctctccgtgcagcgtcagttttttccgacagacgaagatgagatcggagcagccaaagctttgatgagactgcaggacacgtaccgcctggaccctggcaccatctcacggggcgaactgcccggtactaaataccaggctatgttgagcgtggacgactgtttcgggatgggccgaagcgcatacaatgagggggactattatcacacagtcctctggatggaacaagttctgaaacaattagatgccggggaagaggctacaacctag

SEQ ID NO: 340515 - DNA, 345 bp, Artificial Sequence
  derived and/or modified sequence
atgaagctctgggtaagcgcgctgctgatggcctggtttggagtgctgagttgtgttcaagcagagtttttcacctcaatcgggcacatgacggatcttatctacgccgagaaagagttagtccagagcctcaaggagtatatcttagtggaagaggctaagcttagtaaaatcaagtcctgggctaataaaatggaggccctaaccagtaagtctgccgctgacgccgaaggttacctggctcaccctgtcaatgcctacaagttggtcaaacgcctgaataccgactggccagctctcgaggatctggtgttacaggacagtgctgctgggttcatcgcatag

SEQ ID NO: 340516 - DNA, 444 bp, Artificial Sequence
  derived and/or modified sequence
atgaagctctgggtctctgcattgctaatggcctggtttggggtgctcagctgtgtacaggcagagttctttacgagcattggccacatgactgacctgatatacgctgagaaggaactcgttcagtcgctgaaggaatatatcctggtcgaggaggccaaactttcaaagattaaaagctgggcaaataaaatggaggcactcacttccaaatcagcggctgatgcggaaggctacctcgcacatcctgttaatgcctataaactggtcaagcgcctgaacacagattggccagccctggaagacctggtcctgcaggactccgcggccgggtttattgccaaccttagcgtgcaacggcaattcttcccaacagacgaggacgaaattggcgcagcgaaggccctgatgaggctccaggacacttataggctggacccctag

SEQ ID NO: 340517 - DNA, 153 bp, Artificial Sequence
  derived and/or modified sequence
atgaagttgtgggtgtccgccttattaatggcctggtttggagtgttatcatgcgtgcaggctgagttttttacatccattggccatatgaccgacttaatctatgcggagaaggagctagttcagagcctgaaggagtatattctggtctag

SEQ ID NO: 340518 - DNA, 555 bp, Artificial Sequence
  derived and/or modified sequence
atgaagttatgggtctcggctctgctgatggcttggtttggagtgttgtcgtgcgtacaggccgagtttttcacctccatcgggcacatgacagatctgatctacgctgagaaggagctggttcagagcctcaaggaatatattctggtggaggaggccaaactctctaaaataaagtcatgggccaacaagatggaggcccttacctccaagagcgccgccgacgcagagggctacttagcccatccagtcaatgcttataagctggtgaagcgtctgaacactgactggccagcgctagaggatcttgttctccaggattccgctgctggtttcattgccaatctatcagtgcagcggcagttctttccgacagacgaggatgaaatcggagccgccaaagccttgatgaggctgcaagacacctaccgcctggatcccggcaccatttctcgaggcgaactgccaggtactaaatatcaggctatgctgtctgtcgacgattgtttcggcatgggcagatcagcatataacgagggggactattatcactag

SEQ ID NO: 340519 - DNA, 462 bp, Artificial Sequence
  derived and/or modified sequence
atgaaattatgggtgtccgcactcctcatggcctggtttggggtgctgtcatgcgttcaggctgaattctttactagcattgggcacatgactgatttaatctatgcagaaaaggagctggtgcagtctctaaaagagtatattcttgttgaggaggctaaactctcgaagatcaaaagttgggctaacaagatggaagcactgacctcgaagagcgccgccgatgccgagggatatttggcccaccccgtcaatgcctataaattggtgaagcgcctaaacactgactggcccgccttggaagacctcgtactccaggatagcgccgcgggattcatcgccaacctgtccgtccagcgtcagttttttccaacagatgaagacgaaattggagcagccaaggctctgatgagactgcaggacacatatcggttagaccccggaaccatttcccggggatag

SEQ ID NO: 340520 - DNA, 504 bp, Artificial Sequence
  derived and/or modified sequence
atgaagctgtgggtgtctgccctgctgatggcctggtttggagtgctgagctgtgtgcaggccgagttcttcaccagcatcggccacatgacagacctgatctatgcagagaaggagctggtgcagagcctgaaggagtacatcctggtggaggaggccaagctgagcaagatcaagtcctgggccaacaagatggaggccctgaccagcaagtctgctgctgatgctgagggctacctggcccaccctgtgaatgcctacaagctggtgaagaggctgaacacagactggccagccctggaggacctggtgctgcaggacagcgctgctggcttcatcgccaacctgtctgtgcagaggcagttcttccccacagatgaagatgagatcggggccgccaaggccctgatgaggctgcaggacacctaccgcctggaccccggcaccatcagcagaggagagctgcccggcaccaagtaccaggccatgctgtctgtggactag

SEQ ID NO: 340521 - DNA, 306 bp, Artificial Sequence
  derived and/or modified sequence
atgaagctgtgggtgtctgccctgctgatggcctggtttggagtgctgagctgtgtgcaggccgagttcttcaccagcatcggccacatgacagacctgatctatgcagagaaggagctggtgcagagcctgaaggagtacatcctggtggaggaggccaagctgagcaagatcaagtcctgggccaacaagatggaggccctgaccagcaagtctgctgctgatgctgagggctacctggcccaccctgtgaatgcctacaagctggtgaagaggctgaacacagactggccagccctggagtag

SEQ ID NO: 340522 - DNA, 615 bp, Artificial Sequence
  derived and/or modified sequence
atgaagctgtgggtgtctgccctgctgatggcctggtttggagtgctgagctgtgtgcaggccgagttcttcaccagcatcggccacatgacagacctgatctatgcagagaaggagctggtgcagagcctgaaggagtacatcctggtggaggaggccaagctgagcaagatcaagtcctgggccaacaagatggaggccctgaccagcaagtctgctgctgatgctgagggctacctggcccaccctgtgaatgcctacaagctggtgaagaggctgaacacagactggccagccctggaggacctggtgctgcaggacagcgctgctggcttcatcgccaacctgtctgtgcagaggcagttcttccccacagatgaagatgagatcggggccgccaaggccctgatgaggctgcaggacacctaccgcctggaccccggcaccatcagcagaggagagctgcccggcaccaagtaccaggccatgctgtctgtggatgactgcttcggcatgggccgcagcgcctacaatgaaggagactactaccacacagtgctgtggatggagcaggtgctgaagcagctggatgctggggaggaggccaccacctag

SEQ ID NO: 340523 - DNA, 345 bp, Artificial Sequence
  derived and/or modified sequence
atgaagctgtgggtgtctgccctgctgatggcctggtttggagtgctgagctgtgtgcaggccgagttcttcaccagcatcggccacatgacagacctgatctatgcagagaaggagctggtgcagagcctgaaggagtacatcctggtggaggaggccaagctgagcaagatcaagtcctgggccaacaagatggaggccctgaccagcaagtctgctgctgatgctgagggctacctggcccaccctgtgaatgcctacaagctggtgaagaggctgaacacagactggccagccctggaggacctggtgctgcaggacagcgctgctggcttcatcgcctag

SEQ ID NO: 340524 - DNA, 444 bp, Artificial Sequence
  derived and/or modified sequence
atgaagctgtgggtgtctgccctgctgatggcctggtttggagtgctgagctgtgtgcaggccgagttcttcaccagcatcggccacatgacagacctgatctatgcagagaaggagctggtgcagagcctgaaggagtacatcctggtggaggaggccaagctgagcaagatcaagtcctgggccaacaagatggaggccctgaccagcaagtctgctgctgatgctgagggctacctggcccaccctgtgaatgcctacaagctggtgaagaggctgaacacagactggccagccctggaggacctggtgctgcaggacagcgctgctggcttcatcgccaacctgtctgtgcagaggcagttcttccccacagatgaagatgagatcggggccgccaaggccctgatgaggctgcaggacacctaccgcctggacccctag

SEQ ID NO: 340525 - DNA, 153 bp, Artificial Sequence
  derived and/or modified sequence
atgaagctgtgggtgtctgccctgctgatggcctggtttggagtgctgagctgtgtgcaggccgagttcttcaccagcatcggccacatgacagacctgatctatgcagagaaggagctggtgcagagcctgaaggagtacatcctggtgtag

SEQ ID NO: 340526 - DNA, 555 bp, Artificial Sequence
  derived and/or modified sequence
atgaagctgtgggtgtctgccctgctgatggcctggtttggagtgctgagctgtgtgcaggccgagttcttcaccagcatcggccacatgacagacctgatctatgcagagaaggagctggtgcagagcctgaaggagtacatcctggtggaggaggccaagctgagcaagatcaagtcctgggccaacaagatggaggccctgaccagcaagtctgctgctgatgctgagggctacctggcccaccctgtgaatgcctacaagctggtgaagaggctgaacacagactggccagccctggaggacctggtgctgcaggacagcgctgctggcttcatcgccaacctgtctgtgcagaggcagttcttccccacagatgaagatgagatcggggccgccaaggccctgatgaggctgcaggacacctaccgcctggaccccggcaccatcagcagaggagagctgcccggcaccaagtaccaggccatgctgtctgtggatgactgcttcggcatgggccgcagcgcctacaatgaaggagactactaccactag

SEQ ID NO: 340527 - DNA, 462 bp, Artificial Sequence
  derived and/or modified sequence
atgaagctgtgggtgtctgccctgctgatggcctggtttggagtgctgagctgtgtgcaggccgagttcttcaccagcatcggccacatgacagacctgatctatgcagagaaggagctggtgcagagcctgaaggagtacatcctggtggaggaggccaagctgagcaagatcaagtcctgggccaacaagatggaggccctgaccagcaagtctgctgctgatgctgagggctacctggcccaccctgtgaatgcctacaagctggtgaagaggctgaacacagactggccagccctggaggacctggtgctgcaggacagcgctgctggcttcatcgccaacctgtctgtgcagaggcagttcttccccacagatgaagatgagatcggggccgccaaggccctgatgaggctgcaggacacctaccgcctggaccccggcaccatcagccggggctag

SEQ ID NO: 340528 - DNA, 504 bp, Artificial Sequence
  derived and/or modified sequence
atgaagctgtgggtgagcgccctgctgatggcctggttcggcgtgctcagctgcgtgcaggccgagtttttcacctccatcggccatatgacagatcttatttatgctgaaaaggagttggttcagagcctgaaggagtacatcctcgtggaagaagcgaagctctctaaaataaagagctgggcaaacaaaatggaagccctcacttccaaaagcgcagccgatgctgaaggctacctcgctcacccggttaatgcgtacaagctggtgaagaggctgaatacggactggcctgccctggaagacctggtgctgcaggactcggctgcaggcttcatcgctaacctcagcgtccaacgtcagttttttccaacagatgaggacgagattggggctgccaaagctctgatgcgccttcaagatacgtacagacttgatccaggcactatcagcaggggggagctccctgggacaaagtatcaggctatgctgtctgttgattag

SEQ ID NO: 340529 - DNA, 306 bp, Artificial Sequence
  derived and/or modified sequence
atgaagctgtgggtgagcgccctgctgatggcctggttcggcgtgctgagctgcgtacaggcagagttctttactagcataggacatatgaccgatctgatctacgccgagaaggagcttgtgcagtcactcaaggagtacatcctggtggaagaggctaaattgtcaaagattaagtcatgggcaaacaagatggaggcgttgacttcgaagtccgccgcagacgccgagggctacttggcacacccagtgaatgcctataaactcgtcaagcgattgaatacagattggccagccctagagtag

SEQ ID NO: 340530 - DNA, 615 bp, Artificial Sequence
  derived and/or modified sequence
atgaagctgtgggtgagcgccctgctgatggcctggttcggcgtgctgtcttgcgtgcaggccgagtttttcacctctatcggacatatgacggatctcatatacgccgagaaagagttggttcagtcattgaaggaatatattctggtggaggaagcgaagttatccaagattaaatcctgggcgaataagatggaggctttaaccagcaagtccgctgccgacgcggaaggctacctggcacaccccgtgaatgcttacaaactcgtgaaaagacttaacacagattggcccgccctggaggacctggtcctccaagattcagcggccgggtttattgcgaacctgagcgtacagagacagttctttcccactgatgaagatgagattggggccgctaaagcactgatgaggctgcaggacacctacagactggatcccggcacaatctcccggggtgagttaccgggcacgaaatatcaggcaatgctttctgtagacgattgctttggtatgggcaggtccgcttataatgaaggagactattaccataccgtgctttggatggaacaagtgctgaaacagctagacgcaggcgaggaggctacaacctag

SEQ ID NO: 340531 - DNA, 345 bp, Artificial Sequence
  derived and/or modified sequence
atgaagctgtgggtgagcgccctgctgatggcctggttcggcgtgttgtcctgcgtccaggccgagtttttcacgagcatcggacacatgaccgatctgatctacgctgagaaggagctggtgcagagcctcaaggagtacatacttgttgaggaggccaagctgtcaaagattaagagctgggccaacaaaatggaagctctgacatctaaatctgcggctgacgccgaagggtatctcgcacaccctgtgaacgcatataaactcgtcaagcgactgaatacggactggcccgccctggaagacctggtcctccaagacagtgccgcgggatttatcgcctag

SEQ ID NO: 340532 - DNA, 444 bp, Artificial Sequence
  derived and/or modified sequence
atgaagctgtgggtgagcgccctgctgatggcctggttcggcgtgcttagttgcgtccaagccgaattcttcacttctattggacacatgaccgatctgatctatgctgagaaagaactcgtacagagcctcaaagagtatatactggttgaggaagcaaagctgagcaagatcaagtcttgggccaacaagatggaggctctaacgtcgaaatctgccgctgatgctgaggggtatctggcccatcccgtgaatgcttacaagctggtgaagagactgaatacagactggcccgccctagaggacctcgtcctccaggatagtgccgcgggatttatagctaaccttagtgtgcaacgtcagttttttccaaccgatgaagatgagatcggggctgccaaggccctgatgcgcctgcaggacacatacaggcttgatccctag

SEQ ID NO: 340533 - DNA, 153 bp, Artificial Sequence
  derived and/or modified sequence
atgaagctgtgggtgagcgccctgctgatggcctggttcggcgtgctaagctgtgtccaggctgaattctttacttcaattggacatatgacagatttgatctacgccgagaaggagctggtgcagtccctaaaagagtacattctggtgtag

SEQ ID NO: 340534 - DNA, 555 bp, Artificial Sequence
  derived and/or modified sequence
atgaagctgtgggtgagcgccctgctgatggcctggttcggcgtgctgagctgtgttcaggcagagttcttcacttccatcggtcatatgacagatctcatctacgcggagaaggagctggtccagtccttgaaggagtatattctggtggaggaagctaagctgagtaagatcaaatcgtgggctaacaagatggaggcactaacatcgaaatccgcggccgacgctgaaggatatctcgcccaccctgtgaacgcatacaagttggtaaaaaggcttaataccgactggcctgccctggaagaccttgtgctccaggattctgccgcgggcttcatcgccaacctgtcggtccagagacaattctttcctactgacgaggacgaaatcggcgctgccaaagccctaatgcggttacaagatacttaccggctggaccccggtactatatcaagaggcgagctgccaggtaccaaatatcaggccatgctctccgtcgacgactgttttggtatgggccgatctgcttacaatgagggggattactatcactag

SEQ ID NO: 340535 - DNA, 462 bp, Artificial Sequence
  derived and/or modified sequence
atgaagctgtgggtgagcgccctgctgatggcctggttcggcgtgctctcctgtgtgcaggctgaatttttcaccagcattggccacatgaccgacctcatttatgcagaaaaagagctggtccagtctctcaaggaatatatcttggtcgaggaggcaaagttatctaagattaagtcttgggcgaacaaaatggaagcactgacctctaaatctgcggcggacgccgagggataccttgcccaccccgttaatgcctataagctggttaaaagactgaacaccgactggccggctcttgaggatctcgtcctgcaagactctgccgcaggttttattgctaatctgagcgtgcagaggcagtttttccccaccgatgaagatgaaatcggagccgccaaggcccttatgcgcctccaggatacttaccgactcgatccgggtacgatttccaggggttag

SEQ ID NO: 340536 - DNA, 504 bp, Artificial Sequence
  derived and/or modified sequence
atgaagctgtgggtgtccgctctgctgatggcctggttcggcgtactcagctgcgttcaggccgaattctttaccagcattggacacatgacagatctgatctatgccgaaaaagagctagtgcaaagtctgaaggagtatatacttgtcgaagaggccaagctgagcaagatcaagtcgtgggccaacaagatggaggcactgacttcgaaatccgccgctgatgctgaaggatacctggctcaccctgtcaatgcttataagctagtgaagcggttgaataccgattggccagctctcgaggatttggtgctgcaggattcagctgcagggtttatcgccaacctaagtgtccagcgacagttctttcccacagacgaagacgaaataggcgcagctaaggccctgatgagactgcaggatacatatcggttggatcctggtaccatatcacgcggagaattgccgggaactaaataccaggccatgctgtctgttgactag

SEQ ID NO: 340537 - DNA, 306 bp, Artificial Sequence
  derived and/or modified sequence
atgaagttatgggtgtccgccttgctgatggcgtggttcggggtactttcatgcgtacaggccgagttttttacttccattgggcatatgaccgacctgatctatgcagaaaaagagctcgtccaaagcctgaaggaatacatccttgtcgaagaagctaagctaagtaaaataaagagttgggcgaacaaaatggaggcattgaccagcaaaagtgcagccgacgccgagggctatctggcacatcctgtgaacgcttataagctggtgaaacgactcaatacagactggcctgctttggaatag

SEQ ID NO: 340538 - DNA, 615 bp, Artificial Sequence
  derived and/or modified sequence
atgaagctgtgggtctcagcccttctaatggcttggttcggggtcttgtcttgcgttcaggctgagttctttacctcaatcggacatatgaccgatttgatttatgccgaaaaagaacttgtccagtctctgaaggaatatatcctggtcgaggaagcaaagctgtccaaaataaagtcatgggctaacaagatggaggcgctcacctccaaatccgcagcagatgcagagggatacctggctcatccggtgaatgcctataagctcgtgaagaggctgaacacagactggcccgctctggaggatcttgtgctgcaggactcggccgcaggtttcatagccaacctgtccgtgcagcgccagttctttcccaccgatgaagacgagataggtgctgcaaaggctttgatgcggctccaagacacatatcgccttgaccccggaaccattagcagaggtgagttacccggtactaaataccaagctatgctgtcagtggacgattgcttcggcatgggtcgctcagcgtacaacgaaggagattactatcacactgtcctctggatggagcaagtgctaaaacagttagacgccggtgaagaggctactacctag

SEQ ID NO: 340539 - DNA, 345 bp, Artificial Sequence
  derived and/or modified sequence
atgaagctgtgggtgtccgcgctgttaatggcatggtttggggttctgagttgtgtgcaagcggaattttttacgagcattggccacatgaccgacctcatatacgcagaaaaagagctggtccagagcttaaaagaatacatcttagtggaggaggcaaaactctctaaaattaaatcttgggcaaataaaatggaggccctgacctccaagtccgcagcagatgctgaaggctacctggcacaccctgtgaacgcctataaactggttaagagactaaacacagattggccagcccttgaggatttggttctccaagattccgctgccggattcatagcctag

SEQ ID NO: 340540 - DNA, 444 bp, Artificial Sequence
  derived and/or modified sequence
atgaagctgtgggtcagtgccctactgatggcctggttcggggtattgagctgtgtccaggccgagttcttcaccagcatcggccatatgacagatctgatatacgccgaaaaggagcttgtccagtcactgaaggagtatattctggtggaagaagccaagctatcgaagatcaaaagctgggccaacaaaatggaggcgcttaccagcaagtcggccgcagatgccgagggctacttggctcaccctgttaacgcctacaagttagttaaaaggctaaacaccgattggccagcattagaggacctggtgctgcaggacagtgctgcaggattcattgccaacctatcagtgcagagacagtttttcccaactgatgaggatgagatcggcgcagccaaggcactgatgcgtcttcaggacacataccggctagacccctag

SEQ ID NO: 340541 - DNA, 153 bp, Artificial Sequence
  derived and/or modified sequence
atgaaactgtgggtatcagccctactgatggcgtggttcggagtgctgagttgtgtgcaagctgagtttttcacaagcattggccacatgacagacctgatctacgcggaaaaggaactcgttcagtctctcaaagaatatatcttggtttag

SEQ ID NO: 340542 - DNA, 555 bp, Artificial Sequence
  derived and/or modified sequence
atgaagctgtgggttagcgcactgctgatggcctggttcggagtactctcgtgtgtccaagcagagttcttcacctccataggacacatgacagatctgatttatgcggagaaggagctggtccaatccctcaaggaatacatcctggtagaagaagcgaagttgagtaagatcaagtcctgggcaaacaaaatggaggccttgacatctaagtctgcagccgacgccgaaggctacttggctcacccagtgaatgcatataaattggtgaagaggttgaatacagattggcccgctctcgaggacctggttctgcaggattctgctgccggatttatcgccaacttgtcagtccagcgacagttctttcccacagatgaagatgaaattggggcagctaaggctctgatgaggctgcaggatacctaccggctggatcccggtactatctccagaggagaactgcccggaacaaagtatcaggccatgctgtccgtggacgactgtttcggaatgggcagatccgcctataatgagggagactattaccattag

SEQ ID NO: 340543 - DNA, 462 bp, Artificial Sequence
  derived and/or modified sequence
atgaaactgtgggttagcgcccttctcatggcatggtttggggtcctcagctgtgtgcaagcggaattctttacaagcataggacatatgacggatctaatctatgccgagaaagaattagtacagagcttgaaggaatatatcctcgtcgaagaagccaagctttcaaaaatcaagtcctgggctaataaaatggaggccctgacctccaagagtgccgctgacgctgagggataccttgctcatccagtcaacgcttacaaactggtgaaaaggctgaacaccgactggcctgcattagaggatctcgtgctacaagattccgccgcagggttcattgccaatctgagcgtgcagaggcagtttttcccaacagatgaggacgagataggcgcagccaaggccctaatgaggctgcaagacacgtacagactggacccaggcacaatttctcgcggttag

SEQ ID NO: 340544 - DNA, 568 bp, Artificial Sequence
  derived and/or modified sequence
gcatttgggttgcagctgggagcttggcagagattctgcctgatgagacacttccctctgtgaccatgaaactctgggtgtctgcattgctgatggcctggtttggtgtcctgagctgtgtgcaggccgaattcttcacctctattgggcacatgactgacctgatttatgcagagaaagagctggtgcagtctctgaaagagtacatccttgtggaggaagccaagctttccaagattaagagctgggccaacaaaatggaagccttgactagcaagtcagctgctgatgctgagggctacctggctcaccctgtgaatgcctacaaactggtgaagcggctaaacacagactggcctgcgctggaggaccttgtcctgcaggactcagctgcaggttttatcgccaacctctctgtgcagcggcagttcttccccactgatgaggacgagataggagctgccaaagccctgatgagacttcaggacacatacaggctggacccaggcacaatttccagaggggaacttccaggaaccaagtaccaggcaatgctgagtgtggatga

SEQ ID NO: 340545 - DNA, 582 bp, Artificial Sequence
  derived and/or modified sequence
cgtaatgaccaatgtttgacccctagatgccaagatattcatcagcaagatctttaaacaatgcctgtagaatagaaaactcttcataaagatgcttatttaacctctccagtggtcacgagtcttggcaagaaagtctgaagacgggaccagctgcacatgttttaccctaagagcttgctatataaaggatactttctggaaggctggttggtgtgaggattcagtcttgcagccactcgagacatcacttctgttcacacttccctctgtgaccatgaaactctgggtgtctgcattgctgatggcctggtttggtgtcctgagctgtgtgcaggccgaattcttcacctctattgggcacatgactgacctgatttatgcagagaaagagctggtgcagtctctgaaagagtacatccttgtggaggaagccaagctttccaagattaagagctgggccaacaaaatggaagccttgactagcaagtcagctgctgatgctgagggctacctggctcaccctgtgaatgcctacaaactggtgaagcggctaaacacagactggcctgcgctggagga

SEQ ID NO: 340546 - DNA, 1023 bp, Artificial Sequence
  derived and/or modified sequence
tccaggtgagcgccccgcccgctcagccgccagatcaaccttagcgctggggcgcgggctggggtcgccaggcggtgcgttctgcccgcgcggggctgagagttaggggccggggccggatccggggccgggggtcgcgccgctagccgccagcagcgcagtccgggccgccaccctgcaccctccgccctgtttctgcacccgtctgggttcttgtgccgccgcccgcaagccttcccgagctcagggtggtgagctgcggagacccgtgataattcgttaactaattcaacaaacgggacccttctgtgtgccagaaaccgcaagcagttgctaacccagtgggacaggcggattggaagagcgggaaggtcctggcccagagcagtgtgacacttccctctgtgaccatgaaactctgggtgtctgcattgctgatggcctggtttggtgtcctgagctgtgtgcaggccgaattcttcacctctattgggcacatgactgacctgatttatgcagagaaagagctggtgcagtctctgaaagagtacatccttgtggaggaagccaagctttccaagattaagagctgggccaacaaaatggaagccttgactagcaagtcagctgctgatgctgagggctacctggctcaccctgtgaatgcctacaaactggtgaagcggctaaacacagactggcctgcgctggaggaccttgtcctgcaggactcagctgcaggttttatcgccaacctctctgtgcagcggcagttcttccccactgatgaggacgagataggagctgccaaagccctgatgagacttcaggacacatacaggctggacccaggcacaatttccagaggggaacttccaggaaccaagtaccaggcaatgctgagtgtggatgactgctttgggatgggccgctcggcctacaatgaaggggactattatcatacggtgttgtggatggagcaggtgctaaagcagcttgatgccggggaggaggccaccacaa

SEQ ID NO: 340547 - DNA, 568 bp, Artificial Sequence
  derived and/or modified sequence
gacgccgcgggaggttctggaaacgccgggagctgcgagtgtccagctgcggagacccgtgataattcgttaactaattcaacaaacgggacccttctgtgtgccagaaaccgcaagcagttgctaacccagtgggacaggcggattggaagagcgggaaggtcctggcccagagcagtgtgtgattgtcattgaatgcctttcagacacttccctctgtgaccatgaaactctgggtgtctgcattgctgatggcctggtttggtgtcctgagctgtgtgcaggccgaattcttcacctctattgggcacatgactgacctgatttatgcagagaaagagctggtgcagtctctgaaagagtacatccttgtggaggaagccaagctttccaagattaagagctgggccaacaaaatggaagccttgactagcaagtcagctgctgatgctgagggctacctggctcaccctgtgaatgcctacaaactggtgaagcggctaaacacagactggcctgcgctggaggaccttgtcctgcaggactcagctgcaggttttatcgccaa

SEQ ID NO: 340548 - DNA, 751 bp, Artificial Sequence
  derived and/or modified sequence
tattggctaagcccgttctgcaccctcccaagggctgggagtcctaggtcttgtccgggcagggtccagcttggagcccattagatgggccattggatcagaaagtcttttctcccccagacatccttgtggaaccagcgttgtttttccttggcagctgcggagacccgtgataattcgttaactaattcaacaaacgggacccttctgtgtgccagaaaccgcaagcagttgctaacccagtgggacaggcggattggaagagcgggaaggtcctggcccagagcagtgtgacacttccctctgtgaccatgaaactctgggtgtctgcattgctgatggcctggtttggtgtcctgagctgtgtgcaggccgaattcttcacctctattgggcacatgactgacctgatttatgcagagaaagagctggtgcagtctctgaaagagtacatccttgtggaggaagccaagctttccaagattaagagctgggccaacaaaatggaagccttgactagcaagtcagctgctgatgctgagggctacctggctcaccctgtgaatgcctacaaactggtgaagcggctaaacacagactggcctgcgctggaggaccttgtcctgcaggactcagctgcaggttttatcgccaacctctctgtgcagcggcagttcttccccactgatgaggacgagataggagctgccaaagccctgatgagacttcaggacacatacaggctggaccc

SEQ ID NO: 340549 - DNA, 427 bp, Artificial Sequence
  derived and/or modified sequence
aggcagggaaatccgtcagcctccagggacgctctccctacagccccggcgaggggatcgggtcgtggcgacctctccagacgcccaggggctgggcaggagggcgggccaaggcccgcagctgcggagacccgtgataattcgttaactaattcaacaaacgggacccttctgtgtgccagaaaccgcaagcagttgctaacccagtgggacaggcggattggaagagcgggaaggtcctggcccagagcagtgtgacacttccctctgtgaccatgaaactctgggtgtctgcattgctgatggcctggtttggtgtcctgagctgtgtgcaggccgaattcttcacctctattgggcacatgactgacctgatttatgcagagaaagagctggtgcagtctctgaaagagtacatccttgtgga

SEQ ID NO: 340550 - DNA, 866 bp, Artificial Sequence
  derived and/or modified sequence
ctcactgcagcctcgaactcctgggctcaaggggtcctcccacctcagccttctgagtagtttggactataggtgcatgccgccacagctggctattttttttttcatttttattttttctagagagggggtctcgctatgttgcccagtggtcacgagtcttggcaagaaagtctgaagacgggaccagctgcacatgttttaccctaagagcttgctatataaaggatactttctggaaggctggttggtgtgaggattcagtcttgcagccactcgagacatcacttctgttcacacttccctctgtgaccatgaaactctgggtgtctgcattgctgatggcctggtttggtgtcctgagctgtgtgcaggccgaattcttcacctctattgggcacatgactgacctgatttatgcagagaaagagctggtgcagtctctgaaagagtacatccttgtggaggaagccaagctttccaagattaagagctgggccaacaaaatggaagccttgactagcaagtcagctgctgatgctgagggctacctggctcaccctgtgaatgcctacaaactggtgaagcggctaaacacagactggcctgcgctggaggaccttgtcctgcaggactcagctgcaggttttatcgccaacctctctgtgcagcggcagttcttccccactgatgaggacgagataggagctgccaaagccctgatgagacttcaggacacatacaggctggacccaggcacaatttccagaggggaacttccaggaaccaagtaccaggcaatgctgagtgtggatgactgctttgggatgggccgctcggcctacaatgaaggggactattatcat

SEQ ID NO: 340551 - DNA, 819 bp, Artificial Sequence
  derived and/or modified sequence
gggcgacgccgcgggaggttctggaaacgccgggagctgcgagtgtccagctgcggagacccgtgataattcgttaactaattcaacaaacgggacccttctgtgtgccagaaaccgcaagcagttgctaacccagtgggacaggcggattggaagagcgggaaggtcctggcccagagcagtgtggtgagcgctgtgctggaagggaatgcgggcagtgggtacttggtagagcactgactgcctccggccagaggacttcccggaggaggtgacccatgagctggagtggtcagaggaaggctggcaaaagggcatcgtggacagaggaacagcctatacacttccctctgtgaccatgaaactctgggtgtctgcattgctgatggcctggtttggtgtcctgagctgtgtgcaggccgaattcttcacctctattgggcacatgactgacctgatttatgcagagaaagagctggtgcagtctctgaaagagtacatccttgtggaggaagccaagctttccaagattaagagctgggccaacaaaatggaagccttgactagcaagtcagctgctgatgctgagggctacctggctcaccctgtgaatgcctacaaactggtgaagcggctaaacacagactggcctgcgctggaggaccttgtcctgcaggactcagctgcaggttttatcgccaacctctctgtgcagcggcagttcttccccactgatgaggacgagataggagctgccaaagccctgatgagacttcaggacacatacaggctggacccaggcacaatttccagagggga

SEQ ID NO: 340552 - DNA, 504 bp, Artificial Sequence
  derived and/or modified sequence
atgaagctgtgggtgagcgccctgctgatggcctggttcggcgtgctgagctgcgtgcaggccgagttcttcaccagcatcggccacatgaccgacctgatctacgccgagaaggagctggtgcagagcctgaaggagtacatcctggtggaggaggccaagctgagcaagatcaagagctgggccaacaagatggaggccctgaccagcaagagcgccgccgacgccgagggctacctggcccaccccgtgaacgcctacaagctggtgaagagactgaacaccgactggcccgccctggaggacctggtgctgcaggacagcgccgccggcttcatcgccaacctgagcgtgcagagacagttcttccccaccgacgaggacgagatcggcgccgccaaggccctgatgagactgcaggacacctacagactggaccccggcaccatcagcagaggcgagctgcccggcaccaagtaccaggccatgctgagcgtggactag

SEQ ID NO: 340553 - DNA, 306 bp, Artificial Sequence
  derived and/or modified sequence
atgaagctgtgggtgagcgccctgctgatggcctggttcggcgtgctgagctgcgtgcaggccgagttcttcaccagcatcggccacatgaccgacctgatctacgccgagaaggagctggtgcagagcctgaaggagtacatcctggtggaggaggccaagctgagcaagatcaagagctgggccaacaagatggaggccctgaccagcaagagcgccgccgacgccgagggctacctggcccaccccgtgaacgcctacaagctggtgaagagactgaacaccgactggcccgccctggagtag

SEQ ID NO: 340554 - DNA, 615 bp, Artificial Sequence
  derived and/or modified sequence
atgaagctgtgggtgagcgccctgctgatggcctggttcggcgtgctgagctgcgtgcaggccgagttcttcaccagcatcggccacatgaccgacctgatctacgccgagaaggagctggtgcagagcctgaaggagtacatcctggtggaggaggccaagctgagcaagatcaagagctgggccaacaagatggaggccctgaccagcaagagcgccgccgacgccgagggctacctggcccaccccgtgaacgcctacaagctggtgaagagactgaacaccgactggcccgccctggaggacctggtgctgcaggacagcgccgccggcttcatcgccaacctgagcgtgcagagacagttcttccccaccgacgaggacgagatcggcgccgccaaggccctgatgagactgcaggacacctacagactggaccccggcaccatcagcagaggcgagctgcccggcaccaagtaccaggccatgctgagcgtggacgactgcttcggcatgggcagaagcgcctacaacgagggcgactactaccacaccgtgctgtggatggagcaggtgctgaagcagctggacgccggcgaggaggccaccacctag

SEQ ID NO: 340555 - DNA, 345 bp, Artificial Sequence
  derived and/or modified sequence
atgaagctgtgggtgagcgccctgctgatggcctggttcggcgtgctgagctgcgtgcaggccgagttcttcaccagcatcggccacatgaccgacctgatctacgccgagaaggagctggtgcagagcctgaaggagtacatcctggtggaggaggccaagctgagcaagatcaagagctgggccaacaagatggaggccctgaccagcaagagcgccgccgacgccgagggctacctggcccaccccgtgaacgcctacaagctggtgaagagactgaacaccgactggcccgccctggaggacctggtgctgcaggacagcgccgccggcttcatcgcctag

SEQ ID NO: 340556 - DNA, 444 bp, Artificial Sequence
  derived and/or modified sequence
atgaagctgtgggtgagcgccctgctgatggcctggttcggcgtgctgagctgcgtgcaggccgagttcttcaccagcatcggccacatgaccgacctgatctacgccgagaaggagctggtgcagagcctgaaggagtacatcctggtggaggaggccaagctgagcaagatcaagagctgggccaacaagatggaggccctgaccagcaagagcgccgccgacgccgagggctacctggcccaccccgtgaacgcctacaagctggtgaagagactgaacaccgactggcccgccctggaggacctggtgctgcaggacagcgccgccggcttcatcgccaacctgagcgtgcagagacagttcttccccaccgacgaggacgagatcggcgccgccaaggccctgatgagactgcaggacacctacagactggacccctag

SEQ ID NO: 340557 - DNA, 153 bp, Artificial Sequence
  derived and/or modified sequence
atgaagctgtgggtgagcgccctgctgatggcctggttcggcgtgctgagctgcgtgcaggccgagttcttcaccagcatcggccacatgaccgacctgatctacgccgagaaggagctggtgcagagcctgaaggagtacatcctggtgtag

SEQ ID NO: 340558 - DNA, 555 bp, Artificial Sequence
  derived and/or modified sequence
atgaagctgtgggtgagcgccctgctgatggcctggttcggcgtgctgagctgcgtgcaggccgagttcttcaccagcatcggccacatgaccgacctgatctacgccgagaaggagctggtgcagagcctgaaggagtacatcctggtggaggaggccaagctgagcaagatcaagagctgggccaacaagatggaggccctgaccagcaagagcgccgccgacgccgagggctacctggcccaccccgtgaacgcctacaagctggtgaagagactgaacaccgactggcccgccctggaggacctggtgctgcaggacagcgccgccggcttcatcgccaacctgagcgtgcagagacagttcttccccaccgacgaggacgagatcggcgccgccaaggccctgatgagactgcaggacacctacagactggaccccggcaccatcagcagaggcgagctgcccggcaccaagtaccaggccatgctgagcgtggacgactgcttcggcatgggcagaagcgcctacaacgagggcgactactaccactag

SEQ ID NO: 340559 - DNA, 462 bp, Artificial Sequence
  derived and/or modified sequence
atgaagctgtgggtgagcgccctgctgatggcctggttcggcgtgctgagctgcgtgcaggccgagttcttcaccagcatcggccacatgaccgacctgatctacgccgagaaggagctggtgcagagcctgaaggagtacatcctggtggaggaggccaagctgagcaagatcaagagctgggccaacaagatggaggccctgaccagcaagagcgccgccgacgccgagggctacctggcccaccccgtgaacgcctacaagctggtgaagagactgaacaccgactggcccgccctggaggacctggtgctgcaggacagcgccgccggcttcatcgccaacctgagcgtgcagagacagttcttccccaccgacgaggacgagatcggcgccgccaaggccctgatgagactgcaggacacctacagactggaccccggcaccatcagcagaggctag

SEQ ID NO: 340560 - protein, 224 aa, Artificial Sequence
  derived and/or modified sequence
MRLWKARVLKLVLKTAKDSRLGLNSKWLSLKLGDAGNPRSLAIRFILTNYNKLSIQSWFSLRRVEIISNNSIQAVFNPTGVYAPSGYSYRCQRVGSLQQDQALLLPSDTDDGSSLWEVTFIDFQIQGFAIKGGRFTKAQDCASSFSPAFLIGLAMSLILLLVLAYALHMLIYLRYLDQQYDLIASPAHFSQLKARDTAEEKELLRSQGAECYKLRSQQISKIYV

SEQ ID NO: 340561 - DNA, 675 bp, Artificial Sequence
  derived and/or modified sequence
atgagactgtggaaggccagagtgctgaagctggtgctgaagaccgccaaggacagcagactgggcctgaacagcaagtggctgagcctgaagctgggcgacgccggcaaccccagaagcctggccatcagattcatcctgaccaactacaacaagctgagcatccagagctggttcagcctgagaagagtggagatcatcagcaacaacagcatccaggccgtgttcaaccccaccggcgtgtacgcccccagcggctacagctacagatgccagagagtgggcagcctgcagcaggaccaggccctgctgctgcccagcgacaccgacgacggcagcagcctgtgggaggtgaccttcatcgacttccagatccagggcttcgccatcaagggcggcagattcaccaaggcccaggactgcgccagcagcttcagccccgccttcctgatcggcctggccatgagcctgatcctgctgctggtgctggcctacgccctgcacatgctgatctacctgagatacctggaccagcagtacgacctgatcgccagccccgcccacttcagccagctgaaggccagagacaccgccgaggagaaggagctgctgagaagccagggcgccgagtgctacaagctgagaagccagcagatcagcaagatctacgtgtag

SEQ ID NO: 340562 - DNA, 675 bp, Artificial Sequence
  derived and/or modified sequence
atgcggctctggaaagcccgggtgctaaagctggttcttaagaccgccaaagacagccgattgggattaaactcaaagtggctctcgctgaaattgggcgatgccggaaatccacggtcattagccataagattcatcctcacaaattacaacaaactgtcaattcagtcctggttcagcctccgacgggttgagatcatttctaacaattctattcaggcagtgtttaatcccacaggagtgtatgcaccttccgggtactcttaccggtgccagcgcgtgggctctctgcaacaagaccaggcccttttattgcctagcgatactgatgacggtagttctctgtgggaggttacttttattgactttcagatccaaggatttgcaatcaagggcgggaggtttaccaaggcccaggactgtgcctcatcattcagccctgcatttcttatcggacttgcgatgtccctcatcctgctgctggtcctggcttacgcactgcacatgcttatctacctccgctatctggaccaacaatacgatctgatcgcatccccagcacacttctcacagctgaaggctagggatacagctgaagaaaaagagctcctccggagccagggggccgagtgctataaattgaggtcccagcagatctcaaagatttacgtctag

SEQ ID NO: 340563 - DNA, 675 bp, Artificial Sequence
  derived and/or modified sequence
atgcggctgtggaaggcaagagtcctgaaattagtacttaaaaccgccaaggatagtcggctgggactcaactccaagtggctgagcctgaaactgggtgacgccgggaatccgagaagtctggccatccggttcattctgacaaattataataaactcagtatccagtcctggtttagtctgaggagggtggagatcatcagtaacaattcaatccaggctgtgttcaacccaacaggtgtttacgctcccagcggctacagctaccgctgtcagagggtcggctcactgcagcaagatcaggccctcttactaccctcagataccgatgacggcagcagcctctgggaggtaactttcattgacttccagattcagggcttcgccattaaagggggccgcttcaccaaggctcaggattgtgcctcctccttcagtcccgcttttttgattggtctggccatgagccttatcctgctcttggtgttggcgtacgctctacacatgcttatctacctgcgttatttggatcaacagtacgatctcatcgcatcacccgcccacttttcacagctcaaagccagggacacagctgaggagaaagagcttctacgttcccagggggccgagtgttacaagctgcggtcccaacagattagcaagatctatgtctag

SEQ ID NO: 340564 - DNA, 675 bp, Artificial Sequence
  derived and/or modified sequence
atgaggctgtggaaggcccgggtgctgaagctggtgctgaagacagccaaggacagccggctgggcctgaacagcaagtggctgagcctgaagctgggagatgctggcaaccccaggagcctggccatccgcttcatcctgaccaactacaacaagctgagcatccagagctggttcagcctgcggcgggtggagatcatcagcaacaacagcatccaggccgtgttcaaccccactggagtgtatgcccccagcggctacagctaccgctgccagagggtgggcagcctgcagcaggaccaggccctgctgctgcccagcgacacagatgatggcagcagcctgtgggaggtgaccttcatcgacttccagatccagggctttgccatcaagggcggccgcttcaccaaggcccaggactgtgccagcagcttctccccagccttcctgattggcctggccatgagcctcatcctgctgctggtgctggcctatgccctgcacatgctgatctacctgcgctacctggaccagcagtatgacctgattgccagccctgcccacttcagccagctgaaggcccgggacacagctgaggagaaggagctgctgcggagccagggcgctgagtgctacaagctgcggagccagcagatcagcaagatctacgtgtag

SEQ ID NO: 340565 - DNA, 675 bp, Artificial Sequence
  derived and/or modified sequence
atgcggctgtggaaggcccgggtgctgaagctggtgctgaagaccgccaaagatagtagactggggctcaattctaaatggctttctctgaaattaggggacgccggcaacccacgatctctcgcaattcgcttcatcctgactaactacaacaaactttcgatccaatcttggttcagcttgagacgagtggagattattagcaacaacagcattcaggcggtatttaatcccacaggtgtgtacgccccaagtggatattcctatcgctgccaacgtgtcggcagtttacagcaggatcaggccctgctgttgccctcagacaccgatgatgggagcagcctctgggaagtgactttcatcgacttccagatccagggttttgcaatcaagggcggcaggttcaccaaagcccaggattgtgcctcttccttcagccctgcattcctgataggcctggccatgagcctgatcttgttgctggtactggcatatgctctgcatatgctgatctacttgcgctacctggatcagcagtacgacctgattgcctcacccgcccactttagtcagctgaaagctagagataccgcagaagaaaaagagctgctcagaagtcaaggtgcagaatgttacaaacttcgctcacaacagatatccaagatctatgtttag

SEQ ID NO: 340566 - DNA, 675 bp, Artificial Sequence
  derived and/or modified sequence
atgcggctgtggaaggcccgggtgctgaagctggtgctgaagaccgccaaagatagtcgtctgggccttaatagtaaatggctttcactgaagcttggggacgcaggcaatcctaggagcctggctatccggttcattctgaccaattacaataagctttcaattcagagttggttttcattgagacgggtagagataattagcaataactctattcaggccgtgttcaaccccactggtgtgtacgccccctctggctatagttacagatgccagcgcgtggggagtctgcagcaggaccaagctctcctcctgcctagcgacacagacgatggctctagcctttgggaggtcacctttatcgatttccaaatccaaggttttgccattaagggcggacggtttacgaaggcacaggattgcgcttcatcatttagtccggccttcctgataggtttagccatgtctctaatccttctgctggttctggcatatgccctccatatgttaatttatctgcggtatcttgatcagcagtacgacttgattgcttcgccagcccacttctcacagctgaaagcccgtgacactgcagaggaaaaagagcttctgcggtcccagggcgcagaatgctacaagcttagatcccagcaaataagtaagatatatgtttag

SEQ ID NO: 340567 - DNA, 675 bp, Artificial Sequence
  derived and/or modified sequence
atgcgcctgtggaaggccagggtccttaaactggtgctgaagaccgcgaaggactcaaggctgggtttgaattccaaatggctgtcgcttaagctgggcgatgccggtaacccaagaagccttgctatcagattcatccttaccaactacaacaagctgtctattcagagttggttctccctcagaagagtggaaattatatcaaataacagcatccaggccgtgttcaaccccaccggcgtttatgcccctagcggctatagctatcgctgtcagagggtcggctctctgcagcaggaccaggctctcttgctgcccagcgatacagacgatgggtccagcctctgggaggtaacattcattgacttccagatccagggtttcgcaatcaaaggaggcagatttactaaagctcaagactgtgcgtcttccttttcgcccgcatttctgattggccttgccatgagtttgatcctgctgctcgtgctggcctatgcgttgcacatgttgatatacctgaggtatctggatcagcagtacgacctgatcgcctctccagcccacttttcacaacttaaggcacgggacacagccgaggagaaagaactgctgagatcccaaggagctgagtgctacaagttgaggagtcagcagatctccaaaatttatgtgtag

SEQ ID NO: 340568 - DNA, 675 bp, Artificial Sequence
  derived and/or modified sequence
atgcgactctggaaggcgagggttctcaagctcgtcctgaagactgccaaagactctcgtctaggtctgaactccaaatggctttccctgaagctgggcgatgccggaaaccccagatcgttagctatacgctttattctgaccaactacaacaagttatcaatccagtcatggtttagtctgcgcagggtggagataatctcaaacaattctatccaggcagtgttcaatcccaccggagtgtacgcccctagcggctactcctaccggtgtcagcgtgtcggctcactgcaacaggatcaagccctactcttaccatccgacactgatgatgggagttcactctgggaagtgacgttcatcgacttccaaatccagggctttgcaatcaaggggggacgcttcactaaggctcaagactgcgccagtagcttttctcccgcatttctcatcggcctagcaatgagtctcatcctcctgcttgttttggcttacgccctgcacatgctgatttatctgaggtaccttgaccagcagtacgacctgatcgcatcccctgcgcatttctcccaactgaaggcgcgagacaccgccgaagaaaaggagctgctcaggtcccagggggctgaatgttataaactgcgtagccaacagatttctaagatttacgtctag

SEQ ID NO: 340569 - DNA, 2106 bp, Artificial Sequence
  derived and/or modified sequence
taaattaaataattaaatagatgatttttacatactgtagagctatagagaaaatatagctggatgggtgatagtgacttggggatgggggtggctactctggatagggtagtttaaggtgacatctctgtgcagatgtagaatgggctagtgctttctaagaactgaaagatcagtgaagaaggggagcatagtgactgaggagtagtgtggcattagatggggtctgagagttacacaggaacatgtggagcctgtaggccatggtaaagcctttttctactcttctggtgatttaaagccattgtaaagttttgagcttgggagtaggtagcaaaataagatttatatttttatggggttactctggctgttgagaggagaaaaagacatgaatctgggaggccacttgggaagcaaggccatcagtgaagagaaagagtgggagaaaaaggtttgaggagagaaggtataggactttcactaaccttggaccatatatttgccaggaagaatgtaagttctccaacatcttcaaataaagaagtggttatgaggaatgatcagaataatggagatatgaaaccattccagaatttcacaacaataccaatcacacaggctctcaactacaatctgagcaaagaagggcatttagaaaaagaaccttggaatgcattcagccatcatggcccagttaatgtctccatcaatggaattccttgcattctcttctgggccaaaagaataatgattaaatttaagaatcaaacctggctggaccttacagacgagccatttggtcagaaggtaactgtggaccctgacaactcaaattgcagtgaagaaagtgctagaaaaaaaaagtaggctcctttgtataggaccctgacacacatctttgaggaagtatttactgtctaaaataaaggaacaagtcagaagttaacttcaaaaattgttggctgggcatggtggctcacgcctgtaatcccagcacttcgggaggccaagggagtggatcacctgaggtcaggagttggagacaagcctggccaacatggtgaaacctcgtctctactaaaatacaaaaattagccgggcgtggtggcaggtgcctgtaatcccagctactcaggaggctgagacaggagaattgcttgaacctgggaggtggaggttgtggtgagctgagatcgcgccattgctctccagcttgggtgacagagtgagtgagactccatctcaaaaaaaaaaaattgttatattttcccggcagttttcttctgaacctttttgctaattgtcggaataacttgtagaaaatgagactttggaaagcaagggttctcaaactcgttttgaaaacagcaaaggattccaggcttggtctcaactccaaatggttgtctttgaagcttggtgatgctggaaaccccagaagtcttgctataagattcatccttaccaattacaacaagttgtccatccagagttggtttagtttgcgccgagtcgagatcatttccaacaattcaatccaagcagtctttaacccaactggcgtatatgctccctctggttactcctaccgctgccaacgcgtgggcagcctgcagcaggaccaggccctcttgctgcccagcgacacggatgatgggtcgagcctgtgggaggtcacttttattgatttccagatccaaggttttgccatcaaggggggacgatttaccaaagcccaagactgcgcctcctccttctcgccagcttttctgatcggcctggcaatgtccctgatcctgctgctggtgttggcctatgccctgcacatgctcatctacctgcggtatctggaccaacaatatgatctcatcgcctctcctgcccacttctcgcagctgaaagctcgagacacagccgaagagaaggagctgctgaggagccagggggctgaatgctataaactgagaagccaacagatcagcaaaatctatgtttagcagcacaggctggcccccaccatgtccacagtgggctccgaaagttgtctctgttctgtgctatttgacttgtgaattacagattttcaccaaatggcttgattac

SEQ ID NO: 340570 - DNA, 758 bp, Artificial Sequence
  derived and/or modified sequence
tcccggcagttttcttctgaacctttttgctaattgtcggaataacttgtagaaaatgagactttggaaagcaagggttctcaaactcgttttgaaaacagcaaaggattccaggcttggtctcaactccaaatggttgtctttgaagcttggtgatgctggaaaccccagaagtcttgctataagattcatccttaccaattacaacaagttgtccatccagagttggtttagtttgcgccgagtcgagatcatttccaacaattcaatccaagcagtctttaacccaactggcgtatatgctccctctggttactcctaccgctgccaacgcgtgggcagcctgcagcaggaccaggccctcttgctgcccagcgacacggatgatgggtcgagcctgtgggaggtcacttttattgatttccagatccaaggttttgccatcaaggggggacgatttaccaaagcccaagactgcgcctcctccttctcgccagcttttctgatcggcctggcaatgtccctgatcctgctgctggtgttggcctatgccctgcacatgctcatctacctgcggtatctggaccaacaatatgatctcatcgcctctcctgcccacttctcgcagctgaaagctcgagacacagccgaagagaaggagctgctgaggagccagggggctgaatgctataaactgagaagccaacagatcagcaaaatctatgtttagcagcacaggctggcccccaccatgtcca

SEQ ID NO: 340571 - protein, 135 aa, Artificial Sequence
  derived and/or modified sequence
MEAPEYLDLDEIDFSDDISYSVTSLKTIPELCRRCDTQNEDRSVSSSSWNCGISTLITNTQKPTGIADVYSKFRPVKRVSPLKHQPETLENNESDDQKNQKVVEYQKGGESDLGPQPQELGPGDGVGGPPGKSSE

SEQ ID NO: 340572 - protein, 588 aa, Artificial Sequence
  derived and/or modified sequence
MEAPEYLDLDEIDFSDDISDNRSQGNRLQKLGLEDTDREDAMGFGSHRAKLTVVAALGACHCPENEYSVTSLKTIPELCRRCDTQNEDRSVSSSSWNCGISTLITNTQKPTGIADVYSKFRPVKRVSPLKHQPETLENNESDDQKNQKVVEYQKGGESDLGPQPQELGPGDGVGGPPGKSSEPSTSLGELEHYDLDMDEILDVPYIKSSQQLASFTKVTSEKRILGLCTTINGLSGKACSTGSSESSSSNMAPFCVLSPVKSPHLRKASAVIHDQHKLSTEETEISPPLVKCGSAYEPENQSKDFLNKTFSDPHGRKVEKTTPDCQLRAFHLQSSAAESKPEEQVSGLNRTSSQGPEERSEYLKKVKSILNIVKEGQISLLPHLAADNLDKIHDENGNNLLHIAASQGHAECLQHLTSLMGEDCLNERNTEKLTPAGLAIKNGQLECVRWMVSETEAIAELSCSKDFPSLIHYAGCYGQEKILLWLLQFMQEQGISLDEVDQDGNSAVHVASQHGYLGCIQTRLKIQGTWNGSETCLFTHHFSSYPPISSGLQCQGQEGVLFIPDQVGAATNKQVLFQNQLPETKSSY

SEQ ID NO: 340573 - protein, 603 aa, Artificial Sequence
  derived and/or modified sequence
MTYLIQSHHSRRSQNCAEDVIRKTKTDQNGQLECVRWMVSETEAIAELSCSKDFPSLIHYAGCYGQEKILLWLLQFMQEQGISLDEVDQDGNSAVHVASQHGYLGCIQTLVEYGANVTMQNHAGEKPSQSAERQGHTLCSRYLVVVETCMSLASQVVKLTKQLKEQTVERVTLQNQLQQFLEAQKSEGKSLPSSPSSPSSPASRKSQWKSPDADDDSVAKSKPGVQEGIQVLGSLSASSRARPKAKDEDSDKILRQLLGKEISENVCTQEKLSLEFQDAQASSRNSKKIPLEKRELKLARLRQLMQRSLSESDTDSNNSEDPKTTPVRKADRPRPQPIVESVESMDSAESLHLMIKKHTLASGGRRFPFSIKASKSLDGHSPSPTSESSEPDLESQYPGSGSIPPNQPSGDPQQPSPDSTAAQKVATSPKSALKSPSSKRRTSQNLKLRVTFEEPVVQMEQPSLELNGEKDKDKGRTLQRTSTSNESGDQLKRPFGAFRSIMETLSGNQNNNNNYQAANQLKTSTLPLTSLGRKTDAKGNPASSASKGKNKAEMYSSCINLSSNMLIEEHLCNDTRHNDINRKMKKSYSIKHIAEPESKELFL

SEQ ID NO: 340574 - protein, 381 aa, Artificial Sequence
  derived and/or modified sequence
MKLTLVMTYLIQSHHSRRSQNCAEDVIRKTKTDQNGQLECVRWMVSETEAIAELSCSKDFPSLIHYAGCYGQEKILLWLLQFMQEQGISLDEVDQDGNSAVHVASQHGYLGCIQTLVEYGANVTMQNHAGEKPSQSAERQGHTLCSRYLVVVETCMSLASQVVKLTKQLKEQTVERVTLQNQLQQFLEAQKSEGKSLPSSPSSPSSPASRKSQWKSPDADDDSVAKSKPGVQEGIQVLGSLSASSRARPKAKDEDSDKILRQLLGKEISENVCTQEKLSLEFQDAQASSRNSKKIPLEKRELKLARLRQLMQRSLSESDTDSNNSEDPKTTPVRKADRPRPQPIVESVESMDSAGFLSASRPPNPWMATAHLPPQRAANQT

SEQ ID NO: 340575 - DNA, 1146 bp, Artificial Sequence
  derived and/or modified sequence
atgaagctgaccctggtgatgacctacctgatccagagccaccacagcagaagaagccagaactgcgccgaggacgtgatcagaaagaccaagaccgaccagaacggccagctggagtgcgtgagatggatggtgagcgagaccgaggccatcgccgagctgagctgcagcaaggacttccccagcctgatccactacgccggctgctacggccaggagaagatcctgctgtggctgctgcagttcatgcaggagcagggcatcagcctggacgaggtggaccaggacggcaacagcgccgtgcacgtggccagccagcacggctacctgggctgcatccagaccctggtggagtacggcgccaacgtgaccatgcagaaccacgccggcgagaagcccagccagagcgccgagagacagggccacaccctgtgcagcagatacctggtggtggtggagacctgcatgagcctggccagccaggtggtgaagctgaccaagcagctgaaggagcagaccgtggagagagtgaccctgcagaaccagctgcagcagttcctggaggcccagaagagcgagggcaagagcctgcccagcagccccagcagccccagcagccccgccagcagaaagagccagtggaagagccccgacgccgacgacgacagcgtggccaagagcaagcccggcgtgcaggagggcatccaggtgctgggcagcctgagcgccagcagcagagccagacccaaggccaaggacgaggacagcgacaagatcctgagacagctgctgggcaaggagatcagcgagaacgtgtgcacccaggagaagctgagcctggagttccaggacgcccaggccagcagcagaaacagcaagaagatccccctggagaagagagagctgaagctggccagactgagacagctgatgcagagaagcctgagcgagagcgacaccgacagcaacaacagcgaggaccccaagaccacccccgtgagaaaggccgacagacccagaccccagcccatcgtggagagcgtggagagcatggacagcgccggcttcctgagcgccagcagaccccccaacccctggatggccaccgcccacctgcccccccagagagccgccaaccagacctag

SEQ ID NO: 340576 - DNA, 1146 bp, Artificial Sequence
  derived and/or modified sequence
atgaagcttaccctcgttatgacatatttgattcagtcccaccatagccgtcgcagccagaactgtgcagaagacgttattcgcaaaaccaagactgatcagaatggacaactcgagtgcgtcaggtggatggtctccgagaccgaggctattgcagagttgtcatgtagcaaggacttccctagtctgattcactatgcggggtgctatggtcaagagaaaatacttctatggcttttacagttcatgcaggagcagggaatttcgctagatgaggtcgatcaggacggcaacagtgcagtgcacgtggctagccaacatggatatctgggctgtatccagacactagttgaatacggtgcaaacgtgaccatgcagaaccatgcgggagagaaaccttcccagagcgctgaacgccagggacacacgctctgttcacgttacttagtggtcgtcgagacctgtatgagcctggcatctcaggtggtgaaattgactaagcaattgaaggaacaaactgtggaaagagtcaccctgcagaaccagctacagcagtttctcgaagcccagaagtccgaggggaagtctctcccttcttccccaagttctccttcgtctcctgcctcacggaagtcccagtggaagtccccggatgctgacgatgactctgtagccaagagtaaacctggagtccaagaaggcattcaggttctgggcagcctaagcgcaagctcgagggcccgacccaaggccaaagatgaagattccgataagattctccgccagcttttgggtaaggaaatttccgaaaatgtctgtacacaggaaaaactgtccctggaatttcaggacgcccaggcaagcagccgcaattctaagaaaataccgcttgaaaaacgagagctgaagctggcgagacttcgacaattgatgcagcggtctctttccgagagtgacacggacagtaataacagcgaggatcccaaaaccacccccgtccgcaaagccgatcgaccaagacctcagccaattgtggagtcagtggagagcatggattctgccggcttcctgtccgcctcaagaccacctaacccttggatggcaacggcacatctcccaccacagagggctgcaaaccagacatag

SEQ ID NO: 340577 - DNA, 1146 bp, Artificial Sequence
  derived and/or modified sequence
atgaagctgaccctggtgatgacctacctgatccagagccaccacagcagaagaagccagaactgtgccgaggatgtgatcaggaagaccaagacagaccagaatggccagctggagtgtgtgcgctggatggtgtctgaaacagaggccatcgccgagctgagctgcagcaaggacttccccagcctcatccactacgccggctgctacggccaggagaagatcctgctgtggctgctgcagttcatgcaggagcagggcatcagcctggatgaggtggaccaggacggcaacagcgctgtgcacgtggccagccagcacggctacctgggctgcatccagaccctggtggagtatggagccaacgtgaccatgcagaaccacgccggggagaagcccagccagagcgctgagcggcagggccacaccctgtgcagccgctacctggtggtggtggagacctgcatgagcctggccagccaggtggtgaagctgaccaagcagctgaaggagcagacagtggagcgggtgaccctgcagaaccagctgcagcagttcctggaggcccagaagtctgagggcaagagcctgcccagcagccccagcagccccagcagccctgccagcaggaagagccagtggaagagcccagatgctgatgatgattctgtggccaagagcaagccaggagtgcaggagggcatccaggtgctgggcagcctgagcgccagcagccgggcccggcccaaggccaaggatgaggacagcgacaagatcctgcggcagctgctgggcaaggagatcagtgaaaatgtgtgcacccaggagaagctgagcctggagttccaggatgcccaggccagcagcaggaacagcaagaagatccccctggagaagcgggagctgaagctggcccggctgcggcagctgatgcagaggagcctgtctgagagtgacacagacagcaacaacagcgaggaccccaagaccacccctgtgaggaaggctgaccggccccggccccagcccatcgtggagagcgtggagagcatggattctgctggcttcctgagcgccagccggccccccaacccctggatggccacagcccacctgcccccccagagagctgccaaccagacctag

SEQ ID NO: 340578 - DNA, 1146 bp, Artificial Sequence
  derived and/or modified sequence
atgaagctgaccctggtgatgacctacctgatccagagccaccacagtcggaggtctcagaattgtgcagaagatgtaatccggaagaccaaaaccgaccagaatggacagctcgagtgtgtgcgctggatggtgtctgagacggaagctatcgctgagttatcgtgtagtaaggactttccgagcctgatccattacgccggatgttacggacaggagaagatattgttatggctgctgcagttcatgcaagaacaagggatatcactcgacgaggtcgaccaagacggaaattctgcagtccatgtggcatcacagcacggttatctgggctgcattcagaccctggtcgaatatggtgctaatgtgactatgcagaaccacgccggtgaaaagcccagccagagcgccgaacgtcaggggcacaccctgtgtagccgttatcttgttgtggtggaaacatgtatgtctctggcatctcaggtggtcaaactgaccaagcagttgaaagagcaaacggtggaacgtgtaacgttgcagaaccaattgcagcagttcctcgaggctcagaaaagtgagggtaagtcgctccctagttctcctagctcgccatcatctccagcatctcgcaagagtcaatggaagtcaccagacgctgacgatgacagcgtggcgaagtccaaacccggcgttcaggagggtatacaggtgctaggctcactctcggccagctcacgcgcgcgacccaaagccaaagatgaggacagcgacaagatccttcgccaacttttaggaaaagaaatctctgagaatgtgtgtacgcaggagaaactcagcctggagttccaggatgctcaggcttcctcgcgtaacagcaaaaaaattcctctggagaagagggaactgaaactcgccagactgcggcaactcatgcagcggtcccttagcgaatctgatacagacagcaacaactccgaagaccctaagactacccccgtccggaaggcggacaggccaaggccacagccaattgtagagagcgttgaaagcatggactccgccggtttcctgtccgcgagtcgtccaccaaatccttggatggcaactgcccatcttccaccgcaaagggccgccaaccaaacctag

SEQ ID NO: 340579 - DNA, 1146 bp, Artificial Sequence
  derived and/or modified sequence
atgaaattgacgttggtcatgacttatctgattcaatctcatcacagtagaaggagtcagaattgcgcagaggacgtgatccggaaaacgaaaaccgatcagaatggacagctggaatgtgtcagatggatggtttcagagacagaagcgattgcagagctctcctgctccaaggactttccttcgttaatacactatgcagggtgttacggccaagagaaaatcttgctctggctgttgcagttcatgcaagagcagggcatcagcctggatgaggttgatcaggacggtaactccgccgtgcacgtggcaagtcagcacggctatctgggatgtatacagactctggtggaatatggagccaacgtgacgatgcagaatcatgccggagagaaaccaagtcagagtgccgaaagacaggggcacacgctgtgtagccggtacctggtcgtcgtagagacttgtatgtctttagcaagccaggtcgtcaaacttactaaacagctcaaggaacagactgttgagagagttacgctccagaaccagcttcagcagtttctcgaagctcagaagagtgagggcaagtcactaccctcatctccctcctctccaagctcccccgcatcacggaagagtcagtggaaatcgcctgatgctgatgatgattccgttgccaaatccaaacccggtgttcaagagggaatccaggtgctaggctctctctcagcctcatccagggctagacccaaagccaaggatgaggactccgataaaatcctccggcagctgttggggaaggaaataagcgagaatgtttgtacgcaagagaaattgtctctcgaatttcaagacgcccaggcttcctcacgtaattctaaaaaaatccccctagaaaaacgggagcttaaacttgcaaggctgcgccagttaatgcagcggtctctgagcgagagtgacaccgactcaaataacagcgaagaccccaagaccacaccggtgcgcaaggcagatcgaccccgaccgcagccgatagttgagagcgttgagagcatggactctgcagggtttttatccgcttcccggcctcccaatccatggatggccaccgcacatctgccacctcagcgcgctgccaatcaaacctag

SEQ ID NO: 340580 - DNA, 2588 bp, Artificial Sequence
  derived and/or modified sequence
cgcccgcggccgggccgcattgtgacgtagcggggccgcggcagcgcctccaccgcccgcctacttcggctgaggctgttctgctcctgccgctgcggtccgtcggtcggtcagtcagtcccttcgcgctcctgagccgccggcgcgccgggcgccccgggaatttataagtatttgaccgtactcaaaatgtgcaaggaagaataatggaagcccctgaataccttgatttggatgaaattgactttagtgatgacatatcttattcagtcacatcactcaagacgatcccagaactgtgccgaagatgtgatacgcaaaacgaagacagatcagaatggtcagttggagtgcgtacgctggatggtgagcgaaacagaagccattgcagaactgagttgttctaaggattttccaagccttattcattacgcaggttgctatggccaggaaaagattcttctgtggcttcttcagtttatgcaagaacagggcatctcgttggatgaagtagaccaggatggcaacagtgccgttcacgtagcctcacagcatggctaccttggatgcatacagaccttggttgaatatggagcaaatgtcaccatgcagaaccacgctggggaaaagccctcccagagcgccgagcggcaggggcacaccctgtgctccaggtacctggtggtggtggagacctgcatgtcgctggcctctcaagtggtgaagttaaccaagcagctaaaggaacaaacagtagaacgtgtcacgctgcagaaccaactccaacaatttctagaagcccagaaatcagagggcaagtcactcccttcttcacccagttcaccatcctcacctgcctccagaaagtcccagtggaaatctccagatgcagatgatgattctgtagccaaaagcaagccaggagtccaagaggggattcaggttcttggaagcctgtcagcctccagccgggctagacccaaagcaaaagatgaagattctgataaaatcttacgccagttattgggaaaggaaatctcagaaaatgtctgcacccaggaaaaactgtccttggaattccaggatgctcaggcttcctctagaaattctaaaaagatcccactggagaagagggaactgaagttagccaggctgagacagctgatgcagaggtcactgagtgagtctgacacagactccaacaactctgaggaccccaagactaccccagtgaggaaggctgaccgaccaaggccgcagcccattgtagaaagcgtagagagtatggacagcgcagaaagcctgcacctgatgattaagaaacacaccttggcatcagggggacgcaggtttcctttcagcatcaaggcctccaaatccctggatggccacagcccatctcccacctcagagagcagcgaaccagacttagaatcccagtatccaggctcagggagtattcctccaaaccagccctctggtgaccctcagcagcccagccctgacagtactgctgcccagaaagttgccacaagtcccaagagtgccctcaagtctccatcttccaagcgtaggacatctcagaacttaaaactgagagttacctttgaggagcctgtggtgcagatggagcagcctagccttgaactgaatggagaaaaagacaaagataagggcaggactctccagcggacctccacaagtaacgaatcgggggatcaactgaaaaggccttttggagcctttcgatctatcatggagacactaagtggcaaccaaaacaataataataactaccaggcagccaaccagctgaaaacctctacattgcccttgacctcacttgggaggaagacagatgccaagggaaaccctgccagctccgctagcaaaggaaagaataaggcagaaatgtacagcagctgcatcaatctttcctctaacatgctgattgaagagcatctgtgtaacgacacacggcataatgacatcaatagaaaaatgaagaaatcctacagcataaagcacattgctgagccagagtcaaaagaactcttcttgtaaatcactttttaaattttctctcactgatgccctttggaaattattggaaatttctggactatcctctttggaaagagaaccatgaaaacaatgcctcaccagcagaagaacagaatatcaggatgccttaaatttatagtagtagactgtaaaagattcattttggggtgatatctgtatatataacttgtttttttaaaagatgccgtttaaaagcatgattgggaaaatgtatgttttttaagagtagattgattcaccctacccacaggacattcaccaagccactgataccattttatatttcatcaattgcatgagtatttgctaatgttgattgaacctccctttccccataatgtgggcagatttggctcagctccttcatgagatcaggtcagtggtattgtttctgtcaagagtgttttttctgtcatttctactttttgtataaaggaaataaaacaatgttaacagccacctataagcttggggcacctactttctaacaaatctgtgatgtt

SEQ ID NO: 340581 - DNA, 1474 bp, Artificial Sequence
  derived and/or modified sequence
agtgctgttctgcgtcccaggctggtccgcgtggatttcagaggggaatgtttctctcttggccttgtctcttggcgatgactttcatctgcaggtggaatttataagtatttgaccgtactcaaaatgtgcaaggaagaataatggaagcccctgaataccttgatttggatgaaattgactttagtgatgacatatcttattcagtcacatcactcaagacgatcccagaactgtgccgaagatgtgatacgcaaaacgaagacagatcagaatggtcagttggagtgcgtacgctggatggtgagcgaaacagaagccattgcagaactgagttgttctaaggattttccaagccttattcattacgcaggttgctatggccaggaaaagattcttctgtggcttcttcagtttatgcaagaacagggcatctcgttggatgaagtagaccaggatggcaacagtgccgttcacgtagcctcacagcatggctaccttggatgcatacagaccttggttgaatatggagcaaatgtcaccatgcagaaccacgctggggaaaagccctcccagagcgccgagcggcaggggcacaccctgtgctccaggtacctggtggtggtggagacctgcatgtcgctggcctctcaagtggtgaagttaaccaagcagctaaaggaacaaacagtagaacgtgtcacgctgcagaaccaactccaacaatttctagaagcccagaaatcagagggcaagtcactcccttcttcacccagttcaccatcctcacctgcctccagaaagtcccagtggaaatctccagatgcagatgatgattctgtagccaaaagcaagccaggagtccaagaggggattcaggttcttggaagcctgtcagcctccagccgggctagacccaaagcaaaagatgaagattctgataaaatcttacgccagttattgggaaaggaaatctcagaaaatgtctgcacccaggaaaaactgtccttggaattccaggatgctcaggcttcctctagaaattctaaaaagatcccactggagaagagggaactgaagttagccaggctgagacagctgatgcagaggtcactgagtgagtctgacacagactccaacaactctgaggaccccaagactaccccagtgaggaaggctgaccgaccaaggccgcagcccattgtagaaagcgtagagagtatggacagcgcaggtttcctttcagcatcaaggcctccaaatccctggatggccacagcccatctcccacctcagagagcagcgaaccagacttagaatcccagtatccaggctcagggagtattcctccaaaccagccctctggtgaccctcagcagcccagccctgacagtactgctgcccagaaagttgccacaagtcccaagagtgccctcaagtctccatcttccaagcgtaggacatctcagaactt

SEQ ID NO: 340582 - DNA, 780 bp, Artificial Sequence
  derived and/or modified sequence
atgggacgcgagtcgagacattacaggaagcggtctgctagtagaggacgcagcgggagtcggtcgagaagccggtcaccaagcgataaaagatccaagcggggggacgacaggaggagccgctccagggatagagatcggcgacgggaaagaagtaggagtagggataaacgtcggtctcgatctcgcgatcgcaagaggttaagaagatccagatctagggaaagggatcggtctcgcgagagaaggaggtcacgtagccgtgaccgccgccggtctcgctctcgttcccgtggacgtagaagtagatcttccagtcccggtaacaagagcaaaaagacggagaacaggagcaggtccaaggaaaagacagacgggggcgagagtagcaaagaaaagaaaaaagacaaggatgataaggaggacgagaaagaaaaggatgcgggaaatttcgatcagaacaaattggaagaggaaatgagaaagcgcaaggagcgggttgaaaagtggcgcgaggaacagagaaaaaaggctatggaaaacattggagagcttaagaaggagatcgaagaaatgaaacagggtaagaagtggagtcttgaggatgacgacgatgacgaagacgaccccgctgaagccgagaaggaaggtaatgagatggaaggcgaagaacttgatcccctggatgcatatatggaggaggtcaaagaggaggtaaagaagttcaatatgcggagcgttaaagcggtctccaagaaaaagaagaaaaagaagaagtag

SEQ ID NO: 340583 - DNA, 780 bp, Artificial Sequence
  derived and/or modified sequence
atgggccgggagagccgccactacaggaagaggtctgccagccggggccgcagcggcagccgcagccgcagccgcagccccagcgacaagaggagcaagagaggagatgaccggcgcagccgcagccgggaccgggacagaagaagagagaggagccgcagccgggacaagaggaggagccgcagccgggacaggaagaggctgcggcgcagccgcagccgggagcgggacaggagccgggagaggagaagaagccgcagccgggacagaagaagaagccgcagccgcagccggggccgccgcagccgcagcagcagccctggcaacaagagcaagaagacagaaaatagaagccgcagcaaggagaagacagatggaggagagagcagcaaggagaagaagaaggacaaggatgacaaggaggatgagaaggagaaggatgctggcaactttgaccagaacaagctggaggaggagatgaggaagaggaaggagcgggtggagaagtggagggaggagcagaggaagaaggccatggagaacatcggggagctgaagaaggagattgaggagatgaagcagggcaagaagtggagcctggaggatgatgatgatgatgaagatgatcctgctgaggccgagaaggagggcaatgagatggagggggaggagctggaccccctggatgcctacatggaggaggtgaaggaggaggtgaagaagttcaacatgaggtctgtgaaggctgtgtccaagaagaagaagaagaagaagaagtag

SEQ ID NO: 340584 - DNA, 780 bp, Artificial Sequence
  derived and/or modified sequence
atgggccgggagagccggcactaccggaagcggagcgccagccggggtcggagcggcagccggtctagatccaggagccctagcgataaaagaagtaaacgtggggatgacaggcgatccagaagcagggaccgcgatcgtcgcagggaaagatcaagatcccgagacaaaaggaggtcaaggtctagggacaggaagcgtctccgacggagtaggtcacgcgagcgggatcgctccagggagcggaggcggagtcgatcccgcgacagaaggagatcccgatcacggtcaagaggacgtaggagccgatcatcttctcccgggaacaaaagcaagaagacggagaaccgatcacggagcaaggaaaagacagacggcggcgagtcttccaaggagaaaaaaaaagacaaggacgataaggaagacgagaaggagaaggatgcaggcaacttcgaccagaataaactggaggaggaaatgcgaaagcgtaaggagcgcgtcgagaaatggagggaggaacagcggaagaaggcgatggagaatatcggagagcttaagaaagagatcgaagaaatgaagcagggcaaaaagtggtcactggaagatgacgacgacgacgaagatgacccggccgaagctgaaaaggaaggcaacgagatggagggagaagagctcgatccattagacgcctacatggaggaagtgaaggaagaagtgaaaaaattcaacatgcgcagcgtgaaggccgtttccaaaaaaaaaaagaagaagaagaagtag

SEQ ID NO: 340585 - DNA, 780 bp, Artificial Sequence
  derived and/or modified sequence
atgggacgggaatcccggcactatcgaaagcgctcagcctcgaggggaaggtccgggagccggtcacgctccaggagcccatccgataagcgcagcaaacgcggagatgaccgccgaagccggtcacgcgatagggaccggagacgcgaacgcagtaggtccagagataagagaaggtctcgctcacgtgaccgcaaaaggcttcgcagaagccggagcagggaaagggatcggtctcgagagcggcgacgtagccgatcacgtgatcggagaaggagtcgaagtcgctcacgcggtcggagaagccgatcctcctcacctgggaataaaagcaagaagactgagaatcgctcgcgctcaaaagagaagaccgacggcggagagtcaagcaaagaaaagaagaaggacaaggacgacaaggaggacgaaaaagagaaggatgcgggaaattttgatcaaaataaactcgaagaagagatgaggaaacggaaggaacgagttgaaaagtggcgggaggaacagcgcaagaaggcaatggaaaatatcggagaactgaagaaggagattgaggagatgaaacaggggaagaagtggtcattggaagatgatgacgacgacgaagatgatcctgccgaagcggagaaagaaggtaacgagatggagggcgaggagctagatcctcttgacgcatatatggaagaggttaaagaggaggtgaagaaatttaacatgcggagcgtgaaagcagttagtaaaaagaagaaaaaaaagaagaagtag

SEQ ID NO: 340586 - DNA, 921 bp, Artificial Sequence
  derived and/or modified sequence
cgctgggatggccgccacagctgtaggtgctgctagtgtttagcgctggtctttgccgggcgttgagggcagctcagcctccttgtttgtccggttcgcctgtgcgtggtactcaagggcaccagtattcccgcggtcggcagcatgggtcgggagtcacgccactatcgaaaacgatcggcatcccggggtcgctctggaagtcggtctagaagtcgctcaccctcagacaaaagaagtaaacgtggagatgacagacggtctagaagtagagatagagataggaggagagagaggtctcgtagcagggataaaagaagatctcggtcaagggacaggaagcgtctgagacgttccagaagtagagagagagacagaagccgagagcgaagaagatctcgaagtagagacaggagacgctcaaggagtagaagccggggccggcgatcccgatcctccagtcctggaaataaaagcaagaaaactgagaatagatctaggtccaaagagaaaactgatggtggggaaagttctaaagagaagaaaaaagacaaagatgacaaggaggatgaaaaagaaaaagatgctggcaactttgaccagaataagctggaagaagaaatgagaaagcgaaaagaaagagtagaaaaatggcgagaagagcaacgtaaaaaggctatggaaaacataggagaactgaaaaaggaaatcgaagagatgaaacaagggaaaaagtggagtttagaggacgatgatgatgacgaagatgatcctgcagaagctgaaaaggagggaaatgaaatggagggtgaggagttagatccattagatgcttacatggaagaagtgaaagaggaagtaaaaaaatttaacatgagaagtgtaaaagccgtctcaaaaaaaaaaaaaaaaaaaaaaaaa

SEQ ID NO: 340587 - DNA, 780 bp, Artificial Sequence
  derived and/or modified sequence
atgggcagagagagcagacactacagaaagagaagcgccagcagaggcagaagcggcagcagaagcagaagcagaagccccagcgacaagagaagcaagagaggcgacgacagaagaagcagaagcagagacagagacagaagaagagagagaagcagaagcagagacaagagaagaagcagaagcagagacagaaagagactgagaagaagcagaagcagagagagagacagaagcagagagagaagaagaagcagaagcagagacagaagaagaagcagaagcagaagcagaggcagaagaagcagaagcagcagccccggcaacaagagcaagaagaccgagaacagaagcagaagcaaggagaagaccgacggcggcgagagcagcaaggagaagaagaaggacaaggacgacaaggaggacgagaaggagaaggacgccggcaacttcgaccagaacaagctggaggaggagatgagaaagagaaaggagagagtggagaagtggagagaggagcagagaaagaaggccatggagaacatcggcgagctgaagaaggagatcgaggagatgaagcagggcaagaagtggagcctggaggacgacgacgacgacgaggacgaccccgccgaggccgagaaggagggcaacgagatggagggcgaggagctggaccccctggacgcctacatggaggaggtgaaggaggaggtgaagaagttcaacatgagaagcgtgaaggccgtgagcaagaagaagaagaagaagaagaagtag

SEQ ID NO: 340588 - protein, 430 aa, Artificial Sequence
  derived and/or modified sequence
MSTELFSSTREEGSSGSGPSFRSNQRKMLNLLLERDTSFTVCPDVPRTPVGKFLGDSANLSILSGSPGFFRTSGSAFSWDAQLLCSTPNGLDRGHRKRDAMCSSSANKENDNGNLVDSEMKYLGSPITTVPKLDKNPNLGEDQAEEISDELMEFSLKDQEAKVSRSGLYRSPSMPENLNRPRLKQVEKFKDNTIPDKVKKKYFSGQGKLRKGLCLKKTVSLCDITITQMLEEDSNQGHLIGDFSKVCALPTVSGKHQDLKYVNPETVAALLSGKFQGLIEKFYVIDCRYPYEYLGGHIQGALNLYSQEELFNFFLKKPIVPLDTQKRIIIVFHCEFSSERGPRMCRCLREEDRSLNQYPALYYPELYILKGGYRDFFPEYMELCEPQSYCPMHHQDHKTELLRCRSQSKVQEGERQLREQIALLVKDMSP

SEQ ID NO: 340589 - DNA, 1059 bp, Artificial Sequence
  derived and/or modified sequence
agaggcgagcggggataggttactgggctggcggaaggtttgaatggtcaacgcctgcggctgttgatattcttgctcagaggccgtaactttggccttctgctcagggaagactctgagtccgacgttggcctacccagtcggaaggcagagctgcaatctagttaactacctcctttcccctagatttcctttcattctgctcaagtcttcgcctgtgtccgatccctatctactttctctcctcttgtaggcaagcctcagactccaggcttgaggttttgtttttctcctggtgagaattcgaagaccatgtctacggaactcttctcatccacaagagaggaaggaagctctggctcaggacccagttttaggtctaatcaaaggaaaatgttaaacctgctcctggagagagacacttcctttaccgtctgtccagatgtccctagaactccagtgggcaaatttcttggtgattctgcaaacctaagcattttgtctggaggaaccccaaaacgttgcctcgatctttcgaatcttagcagtggggagataactgccactcagcttaccacttctgcagaccttgatgaaactggtcacctggattcttcaggacttcaggaagtgcatttagctgggatgaatcatgaccagcacctaatgaaatgtagcccagcacagcttctttgtagcactccgaatggtttggaccgtggccatagaaagagagatgcaatgtgtagttcatctgcaaataaagaaaatgacaatggaaacttggtggacagtgaaatgaaatatttgggcagtcccattactactgttccaaaattggataaaaatccaaacctaggagaagaccaggcagaagagatttcagatgaattaatggagttttccctgaaagatcaagaagcaaaggtgagcagaagtggcctatatcgctccccgtcgatgccagagaacttgaacaggccaagactgaagcaggtggaaaaattcaaggacaacacaataccagataaagttaaaaaaaagtatttttctggccaa

SEQ ID NO: 340590 - DNA, 1896 bp, Artificial Sequence
  derived and/or modified sequence
ggtcaacgcctgcggctgttgatattcttgctcagaggccgtaactttggccttctgctcagggaagactctgagtccgacgttggcctacccagtcggaaggcagagctgcaatctagttaactacctcctttcccctagatttcctttcattctgctcaagtcttcgcctgtgtccgatccctatctactttctctcctcttgtaggcaagcctcagactccaggcttgagctaggttttgtttttctcctggtgagaattcgaagaccatgtctacggaactcttctcatccacaagagaggaaggaagctctggctcaggacccagttttaggtctaatcaaaggaaaatgttaaacctgctcctggagagagacacttcctttaccgtctgtccagatgtccctagaactccagtgggcaaatttcttggtgattctgcaaacctaagcattttgtctgggtcacctggattcttcaggacttcaggaagtgcatttagctgggatgacaatggaaacttggtggacagtgaaatgaaatatttgggcagtcccattactactgttccaaaattggataaaaatccaaacctaggagaagaccaggcagaagagatttcagatgaattaatggagttttccctgaaagatcaagaagcaaaggtgagcagaagtggcctatatcgctccccgtcgatgccagagaacttgaacaggccaagactgaagcaggtggaaaaattcaaggacaacacaataccagataaagttaaaaaaaagtatttttctggccaaggaaagctcaggaagggcttatgtttaaagaagacagtctctctgtgtgacattactatcactcagatgctggaggaagattctaaccaggggcacctgattggtgatttttccaaggtatgtgcgctgccaaccgtgtcagggaaacaccaagatctgaagtatgtcaacccagaaacagtggctgccttactgtcggggaagttccagggtctgattgagaagttttatgtcattgattgtcgctatccatatgagtatctgggaggacacatccagggagccttaaacttatatagtcaggaagaactgtttaacttctttctgaagaagcccatcgtccctttggacacccagaagagaataatcatcgtgttccactgtgaattctcctcagagaggggcccccgaatgtgccgctgtctgcgtgaagaggacaggtctctgaaccagtatcctgcattgtactacccagagctatatatccttaaaggcggctacagagacttctttccagaatatatggaactgtgtgaaccacagagctactgccctatgcatcatcaggaccacaagactgagttgctgaggtgtcgaagccagagcaaagtgcaggaaggggagcggcagctgcgggagcagattgcccttctggtgaaggacatgagcccatgataacattccagccactggctgctaacaagtcaccaaaagacactgcagaaaccctgagcagaaagaggccttctggatggccaaacccaagattattaaaagatgtctctgcaaaccaacaggctaccaacttgtatccaggcctgggaatggattaggtttcagcagagctgaaagctggtggcagagtcctggagctggctctataaggcagccttgagttgcatagagatttgtattggttcagggaactctggcattccttttcccaactcctcatgtcttctcacaagccagccaactctttctctctgggcttcgggctatgcaagagcgttgtctaccttctttctttgtattttccttctttgtttccccctctttcttttttaaaaatggaaaaataaacactacagaatgag

SEQ ID NO: 340591 - DNA, 1556 bp, Artificial Sequence
  derived and/or modified sequence
agaggccgtaactttggccttctgctcagggaagactctgagtccgacgttggcctacccagtcggaaggcagagctgcaatctagttaactacctcctttcccctagatttcctttcattctgctcaagtcttcgcctgtgtccgatccctatctactttctctcctcttgtaggcaagcctcagactccaggcttgaggttttgtttttctcctggtgagaattcgaagaccatgtctacggaactcttctcatccacaagagaggaaggaagctctggctcaggacccagttttaggtctaatcaaaggaaaatgttaaacctgctcctggagagagacacttcctttaccgtctgtccagatgtccctagaactccagtgggcaaatttcttggtgattctgcaaacctaagcattttgtctgggtcacctggattcttcaggacttcaggaagtgcatttagctgggatgacaatggaaacttggtggacagtgaaatgaaatatttgggcagtcccattactactgttccaaaattggataaaaatccaaacctaggagaagaccaggcagaagagatttcagatgaattaatggagttttccctgaaagatcaagaagcaaaggtgagcagaagtggcctatatcgctccccgtcgatgccagagaacttgaacaggccaagactgaagcaggtggaaaaattcaaggacaacacaataccagataaagttaaaaaaaagtatttttctggccaaggaaagctcaggaagggcttatgtttaaagaagacagtctctctgtgtgacattactatcactcagatgctggaggaagattctaaccaggggcacctgattggtgatttttccaaggtatgtgcgctgccaaccgtgtcagggaaacaccaagatctgaagtatgtcaacccagaaacagtggctgccttactgtcggggaagttccagggtctgattgagaagttttatgtcattgattgtcgctatccatatgagtatctgggaggacacatccagggagccttaaacttatatagtcaggaagaactgtttaacttctttctgaagaagcccatcgtccctttggacacccagaagagaataatcatcgtgttccactgtgaattctcctcagagaggggcccccgaatgtgccgctgtctgcgtgaagaggacaggtctctgaaccagtatcctgcattgtactacccagagctatatatccttaaaggcggctacagagacttctttccagaatatatggaactgtgtgaaccacagagctactgccctatgcatcatcaggaccacaagactgagttgctgaggtgtcgaagccagagcaaagtgcaggaaggggagcggcagctgcgggagcagattgcccttctggtgaaggacatgagcccatgataacattccagccactggctgctaacaagtcaccaaaagacactgcagaaaccctgagcagaaagaggccttctggatggccaaacccaagattattaaaagatgtctctgcaaaccaa

SEQ ID NO: 340592 - DNA, 1809 bp, Artificial Sequence
  derived and/or modified sequence
atgcgcgctcaggaggacctggaaggcagaacccaacacgaaacaacgagggaccccagtacaccgctcccaacggagccaaagtttgatatgctttataagatcgaagatgtcccaccgtggtatctttgtattctattgggttttcagcactacctgacatgtttcagtgggacaatagcagttccttttctccttgctgaggcattgtgcgtgggacacgaccagcatatggtgtcccagctaatcggcaccatttttacttgtgtgggcatcaccacactgattcagactacggttggcataaggctgccattgtttcaggcttcggcgtttgcctttctggtgcctgcaaaggctatactggccctcgagcggtggaagtgccctcccgaggaggagatatatggcaattggagcttgcctctcaatacctctcacatttggcaccccaggatccgggaagtcggccttcacgtgcaaggtgccataatggttagttcggttgtggaggtcgtgattggactgcttggactgcccggagctctgctcaattatatcggacccctcacagtgacgccaactgtgtctttaattggactcagcgtgtttcaagccgctggcgatagggctggttcccactggggtattagtgcctgctctatcctcctgattatcctgtttagccagtacctaaggaatctgacattccttctgcccgtgtatcgatggggtaagggattgacactgctacggatccaaatcttcaaaatgtttcccattatgctggccataatgaccgtctggctcttgtgttatgtgctcacactcactgatgtgctgcctactgatccaaaggcatacggcttccaggcaaggacagacgcccgcggggatatcatggctatcgcaccctggattcggattccctacccatgtcagtgggggctgcccaccgtcacagcggcggctgtccttgggatgttcagcgcaacgctggcgggcatcatcgaaagcatcggagactattatgcatgtgcacggctcgccggcgctcctcctccaccagtgcacgctatcaacaggggcatattcactgagggaatttgctgtattatcgcagggctgctgggaactgggaacgggtccaccagcagttcaccaaacatcggcgtcttaggcatcaccaaggtgggctcccggagggttgtccagtacggggctgcaattatgcttgttttagggaccatcggaaaatttactgccctttttagttcgctgcccgacccgatcctcggcgggatgttttgcaccctgtttggaatgattacagccgtcggactgtctaacctacagttcgtggatatgaacagcagtcggaatctctttgtgctgggcttttccatgtttttcgggctgacactcccaaactacctagaaagtaaccccggcgccattaataccgggattctcgaagtcgaccagattttaatcgtgttactcacaactgaaatgttcgtgggcggctgtcttgccttcatcctcgacaatactgtccccggctcccccgaggaaaggggcttgatccagtggaaagcaggggcccacgctaactccgatatgagttctagtctgaagtcttatgattttccaattggcatgggaattgttaaacggattaccttcctgaagtacattcctatttgtcctgtgtttaagggattctcttcttcaagcaaggatcagattgctatcccggaagacacccctgagaacacagagactgcttccgtgtgtacaaaagtgtag

SEQ ID NO: 340593 - DNA, 1809 bp, Artificial Sequence
  derived and/or modified sequence
atgagggcccaggaggacctggagggccgcacccagcacgagaccacccgggaccccagcacccccctgcccacagagcccaagtttgacatgctgtacaagattgaagatgtgcccccctggtacctgtgcatcctgctgggcttccagcactacctgacctgcttcagcggcaccatcgctgtgcccttcctgctggccgaggccctgtgtgtgggccatgaccagcacatggtgtcccagctgattggcaccatcttcacctgtgtgggcatcaccaccctcatccagaccaccgtgggcatccggctgcccctcttccaggccagcgcctttgccttcctggtgcctgccaaggccatcctggccctggagcgctggaagtgccccccagaggaggagatctacggcaactggagcctgcccctgaacaccagccacatctggcacccccgcatccgggaggtgggcctgcacgtgcagggcgccatcatggtgtcctctgtggtggaggtggtgattggcctgctgggcctgcccggggccctgctgaactacatcggccccctgactgtgacccccaccgtgtccctgattggcctgagcgtcttccaggccgccggggacagagctggcagccactggggcatcagcgcctgcagcatcctgctgatcatcctcttcagccagtacctgaggaacctgaccttcctgctgcctgtgtaccgctggggcaagggcctgaccctgctgcgcatccagatcttcaagatgttccccatcatgctggccatcatgacagtgtggctgctgtgctacgtgctgaccctgacagatgtgctgcccacagaccccaaggcctacggcttccaggccaggacagatgcccggggggacatcatggccatcgccccctggatccgcatcccctacccctgccagtggggcctgcccaccgtgacagctgctgctgtgctgggcatgttcagcgccaccctggccggcatcatcgagagcatcggggactactatgcctgtgcccggctggccggggcccctcctcctcctgtgcacgccatcaacagaggcatcttcacagagggcatctgctgcatcatcgccggcctgctgggcactggaaatggcagcaccagcagcagccccaacatcggcgtgctgggcatcaccaaggtgggcagcagaagagtggtgcagtacggggccgccatcatgctggtgctgggcaccatcggcaagttcaccgccctcttcagcagcctgcctgaccccatcctgggcggcatgttctgcaccctgtttggcatgatcacagctgtgggcctgagcaacctgcagtttgtggacatgaacagcagcaggaacctgtttgtgctgggcttctccatgttcttcggcctgaccctgcccaactacctggagagcaaccctggggccatcaacacaggcatcctggaggtggaccagatcctgattgtgctgctgaccacagagatgtttgtgggcggctgcctggccttcatcctggacaacacagtgcccggcagccctgaggagcggggcctcatccagtggaaggccggggcccacgccaacagcgacatgagcagcagcctgaagagctatgacttccccatcggcatgggcatcgtgaagaggatcaccttcctgaagtacatccccatctgccctgtgttcaagggcttcagcagcagcagcaaggaccagatcgccatccctgaggacaccccagaaaatacagaaacagcctctgtgtgcaccaaggtgtag

SEQ ID NO: 340594 - DNA, 1809 bp, Artificial Sequence
  derived and/or modified sequence
atgcgggcccaggaggacctggagggccggacccagcacgagaccacacgggatccctcaacaccactaccaaccgagcctaagttcgacatgttgtacaagattgaggacgtaccgccctggtacctctgtattttgctggggtttcagcactacctgacttgcttttccggtactattgccgttccttttctgctcgcagaagcactgtgcgtcggacacgatcagcatatggtgagccagttaatcggaacgatattcacgtgcgtgggtattacaactctgatccaaacgaccgtggggataagacttccattatttcaggcctccgcattcgccttcttggttcccgcaaaagctatcctcgcgttggagagatggaaatgccccccagaggaggagatttatggtaattggagcttgccgctgaacacatcacatatatggcatcccaggatccgcgaggtgggtctgcacgtacagggcgctatcatggtgagctcagtggttgaggtcgtaatagggctgttggggcttcctggggcactgttgaactacatcgggccacttaccgtgacccccacagtgtctctcattgggctttccgtattccaagctgcaggcgatagagcgggctcacattggggaatctctgcgtgctcaattctcctaataatccttttttcccagtaccttaggaatttgacctttcttcttccagtataccgctgggggaagggactcaccctgctcaggattcagatattcaagatgttccctatcatgctggccatcatgaccgtctggctattatgctatgtcctgacactaacagacgtgctccctactgacccaaaagcatacggcttccaagcgaggacagacgcccgaggagacatcatggccatcgcaccctggattagaattccttacccttgccaatggggcctgcccaccgtgaccgccgctgcagtactcggcatgttctctgctaccctcgcagggatcattgaatcaatcggagattattacgcctgcgctaggctagcaggcgctccccccccacccgtgcacgctatcaaccgcggtattttcaccgaaggtatttgctgtattatcgccgggttgctcggaactggcaatggaagtactagttccagtccaaatataggggtccttggcattacgaaggttggttcacgcagggttgtacagtatggagccgcaatcatgctggtcctgggcacgattgggaagtttacggcactcttctcctcccttccagatccaatcctgggggggatgttttgtactttattcggcatgatcaccgctgtcggcctctctaatctgcagttcgtggacatgaactcatcacggaacttgtttgtgctcgggttcagcatgttttttggtctcacactccctaattacttagagtccaacccaggggcgatcaacacgggcatccttgaagtggaccagatattaatagtgttgctgaccacagaaatgtttgtcggggggtgtctggcattcatcctcgacaacacagtgcctggcagcccagaggagagggggttgatccagtggaaggctggagcacatgcgaactccgatatgtcctcgtccctgaaatcctacgatttcccaatcggtatgggtatagtgaagcgcatcaccttcctgaagtatatccccatttgccccgtgttcaagggcttttcgtccagtagcaaggatcaaatcgccatccccgaggatacgccagaaaatacagagacagcaagtgtgtgtaccaaagtgtag

SEQ ID NO: 340595 - DNA, 1809 bp, Artificial Sequence
  derived and/or modified sequence
atgcgggcacaggaagatttagaagggaggactcagcacgaaaccacgagagaccccagcaccccactcccaacagagccgaagtttgacatgctgtataagatagaagacgtgcccccatggtacctctgtattctgctcgggttccagcattacctaacctgcttctccggtactatcgcagtcccctttttactggccgaagctctgtgtgtgggccacgaccagcatatggtaagccaattgatcggtaccatcttcacctgcgtgggcatcactactctcatccagactactgtcggcatccgccttcctctcttccaagcttccgctttcgctttcctcgtgcctgcaaaagctatcttggcactggagcgttggaagtgtcccccagaagaggaaatttacggcaattggtctttacctctgaacaccagccacatctggcatcccagaatacgcgaggtggggctgcatgtccagggcgctattatggtatcctccgtcgtggaggtggtgattggactgctcggactcccaggcgctctccttaattacatcggccctctcactgtgacaccgacggtttctttgatcggtctatcagtttttcaggcagccggtgacagggctggctcacactggggcatctctgcctgcagtatcttgttgatcattctgttttctcagtatctgcggaatctgacgtttttactacctgtctacaggtggggaaagggacttacacttctgcgcatccagatatttaaaatgtttcctattatgctggcgataatgacagtgtggttgctttgttatgttttaaccctaaccgacgtgctgcccaccgaccctaaagcgtatggctttcaggctcgaactgacgcccgaggcgacatcatggctattgctccctggattcgtataccctatccctgccagtggggtctcccaacagtgactgctgctgccgtgctgggcatgttctccgctaccctggcagggattattgagtccattggggattactacgcttgcgccagattggcaggcgctccaccccctcccgtgcacgccatcaaccggggaatctttaccgagggtatatgctgcatcatcgccggtctgctcggaaccggaaacgggagcacaagcagctctccaaatatcggcgtgctgggcattactaaagtaggttccagacgagttgtccagtacggtgctgcaataatgctggtgctgggaactattgggaagtttaccgctctgttctcttcccttccagaccccattctcggtggcatgttctgtactttgttcggaatgataacagccgtgggattaagcaacttacagttcgtagacatgaacagctcaagaaacctttttgtgctgggatttagcatgtttttcggattaaccctgcccaactatctggaatccaatcctggcgctatcaacaccggcatacttgaagttgatcagatcttgatagtgttgttgacaactgaaatgtttgtagggggatgtcttgcctttatcctcgataacaccgtgcccggatcaccagaagagagggggttaattcagtggaaggctggcgcacacgctaacagcgacatgagcagcagcttgaaatcatacgacttcccgattggtatgggaatcgtgaagagaattactttcttgaaatatatcccaatttgtcccgtgtttaaggggttcagcagttcatccaaagaccagatcgcaatccccgaagacacaccagagaacaccgaaactgcctctgtttgtacgaaagtgtag

SEQ ID NO: 340596 - DNA, 2303 bp, Artificial Sequence
  derived and/or modified sequence
ctcttctcctcaggaactgctcaaacctgtgccccaaagatgagggcccaggaggacctcgagggccggacacagcatgaaaccaccagggacccctcgaccccgctacccacagagcctaagtttgacatgttgtacaagatcgaggacgtgccaccttggtacctgtgcatcctgctgggcttccagcactacctgacatgcttcagtggtaccatcgccgtgcccttcctgctggctgaggcgctgtgtgtgggccacgaccagcacatggttagtcagctcatcggcaccatcttcacgtgcgtgggcatcaccactctcatccagaccaccgtgggcatccggctgccgctgttccaggccagtgcctttgcatttctggttccagccaaagccatactggctctggagagatggaaatgccccccggaagaggagatctacggtaactggagtctgcccctgaacacctctcatatttggcacccacggatacgggaggtgggtttgcatgtccagggtgcaatcatggtgtccagcgtggtggaggtggtgattggcctgctggggctgcctggggccctgctcaactacattgggcctctcacagtcacccccactgtctccctcattggcctttctgtcttccaagctgctggcgaccgagctggctcccactggggcatctcagcttgctccattctcctgatcatcctcttctcccagtacctgcgcaacctcaccttcctgctgcctgtctaccgctggggcaagggcctcactctcctccgcatccagatcttcaaaatgtttcctatcatgctggccatcatgaccgtgtggctgctctgctatgtcctgaccttgacagacgtgctgcccacagacccaaaagcctatggcttccaggcacgaaccgatgcccgtggtgacatcatggctattgcaccctggatccgcatcccctacccctgtcagtggggcctgcccacggtgactgcggctgctgtcctgggaatgttcagcgccactctggcaggcatcattgagtccatcggagattactacgcctgtgcccgcctggctggtgcaccaccccctccagtacatgctatcaacaggggcatcttcaccgaaggcatttgctgcatcatcgcggggctattgggcacgggcaacgggtccacctcgtccagtcccaacattggcgtcctgggaattaccaaggtgggcagccggcgcgtggtgcagtatggtgcggctatcatgctggtcctgggcaccatcggcaagttcacggccctcttctcctcgctccctgaccccatcctggggggcatgttctgcactctctttggcatgattacagctgtggggctgtccaacctgcaatttgtggacatgaactcctctcgcaacctcttcgtgctgggattttccatgttcttcgggctcacgctgcccaattacctggagtccaaccctggcgccatcaatacaggcattcttgaagtggatcagattctgattgtgctgctgaccacggagatgtttgtgggcgggtgccttgctttcatacttgacaacacagtgccagggagcccagaggagcgtggtctgatacagtggaaagctggggctcatgccaacagtgacatgtcttccagcctcaagagctacgatttccccattgggatgggcatagtaaaaagaattacctttctgaaatacattcctatctgcccagtcttcaaaggattttcttcaagttcaaaagatcagattgcaattccagaagacactccagaaaatacagaaactgcatctgtgtgcaccaaggtctgaaaaatgacttccaggaaaggaagcatggtatataacaggaaaagaaaactacatggggaaccagaagacctaagcctgaaatcccagccctgcccctaactaacttctgtgtaaactcagataagtcacctttctctgggattcaaatttttgcatcagttaaaaaaaaaggggtgggggggaatgggccaaagtctgagtcttagagacttgtaccaatgttatgctatgtctctaaatctttactctcctaagtagacttgtcagcatctaggaagaacagctagaaattttcctctgtgatattttagactgcaagttgaaaaaaataaaaagaaatgagggcaggttccagggcctgaaatgtaggtatgctgcaaggcttttacattgaatttgaccctacatcacttcaagactaatgcataatattaaacatcatgttgaagaaataa

SEQ ID NO: 340597 - DNA, 1809 bp, Artificial Sequence
  derived and/or modified sequence
atgagagcccaggaggacctggagggcagaacccagcacgagaccaccagagaccccagcacccccctgcccaccgagcccaagttcgacatgctgtacaagatcgaggacgtgcccccctggtacctgtgcatcctgctgggcttccagcactacctgacctgcttcagcggcaccatcgccgtgcccttcctgctggccgaggccctgtgcgtgggccacgaccagcacatggtgagccagctgatcggcaccatcttcacctgcgtgggcatcaccaccctgatccagaccaccgtgggcatcagactgcccctgttccaggccagcgccttcgccttcctggtgcccgccaaggccatcctggccctggagagatggaagtgcccccccgaggaggagatctacggcaactggagcctgcccctgaacaccagccacatctggcaccccagaatcagagaggtgggcctgcacgtgcagggcgccatcatggtgagcagcgtggtggaggtggtgatcggcctgctgggcctgcccggcgccctgctgaactacatcggccccctgaccgtgacccccaccgtgagcctgatcggcctgagcgtgttccaggccgccggcgacagagccggcagccactggggcatcagcgcctgcagcatcctgctgatcatcctgttcagccagtacctgagaaacctgaccttcctgctgcccgtgtacagatggggcaagggcctgaccctgctgagaatccagatcttcaagatgttccccatcatgctggccatcatgaccgtgtggctgctgtgctacgtgctgaccctgaccgacgtgctgcccaccgaccccaaggcctacggcttccaggccagaaccgacgccagaggcgacatcatggccatcgccccctggatcagaatcccctacccctgccagtggggcctgcccaccgtgaccgccgccgccgtgctgggcatgttcagcgccaccctggccggcatcatcgagagcatcggcgactactacgcctgcgccagactggccggcgccccccccccccccgtgcacgccatcaacagaggcatcttcaccgagggcatctgctgcatcatcgccggcctgctgggcaccggcaacggcagcaccagcagcagccccaacatcggcgtgctgggcatcaccaaggtgggcagcagaagagtggtgcagtacggcgccgccatcatgctggtgctgggcaccatcggcaagttcaccgccctgttcagcagcctgcccgaccccatcctgggcggcatgttctgcaccctgttcggcatgatcaccgccgtgggcctgagcaacctgcagttcgtggacatgaacagcagcagaaacctgttcgtgctgggcttcagcatgttcttcggcctgaccctgcccaactacctggagagcaaccccggcgccatcaacaccggcatcctggaggtggaccagatcctgatcgtgctgctgaccaccgagatgttcgtgggcggctgcctggccttcatcctggacaacaccgtgcccggcagccccgaggagagaggcctgatccagtggaaggccggcgcccacgccaacagcgacatgagcagcagcctgaagagctacgacttccccatcggcatgggcatcgtgaagagaatcaccttcctgaagtacatccccatctgccccgtgttcaagggcttcagcagcagcagcaaggaccagatcgccatccccgaggacacccccgagaacaccgagaccgccagcgtgtgcaccaaggtgtag

SEQ ID NO: 340598 - protein, 259 aa, Artificial Sequence
  derived and/or modified sequence
MRAQEDLEGRTQHETTRDPSTPLPTEPKFDMLYKIEDVPPWYLCILLGFQHYLTCFSGTIAVPFLLAEALCVGHDQHMVSQLIGTIFTCVGMFCTLFGMITAVGLSNLQFVDMNSSRNLFVLGFSMFFGLTLPNYLESNPGAINTGILEVDQILIVLLTTEMFVGGCLAFILDNTVPGSPEERGLIQWKAGAHANSDMSSSLKSYDFPIGMGIVKRITFLKYIPICPVFKGFSSSSKDQIAIPEDTPENTETASVCTKV

SEQ ID NO: 340599 - DNA, 96 bp, Artificial Sequence
  derived and/or modified sequence
atgctggaggccatcctgggccccgtgagcaacagcctgtacgtgagcggaaaaacctgccacggcagtcggagcgtcttctctagcgccaaatag

SEQ ID NO: 340600 - DNA, 780 bp, Artificial Sequence
  derived and/or modified sequence
atgcgggcacaggaagatctggaaggtcgcactcaacacgaaactacccgtgatcccagtacccccctcccgacggaacccaaatttgacatgctgtacaaaatagaagacgtgcctccatggtacctctgtatattgctgggattccaacactatctgacatgtttttctgggacaatagcagtaccgtttttactcgcggaggcactttgtgtgggacacgaccagcacatggtaagtcagttaataggtacaatcttcacctgcgtcgggatgttctgtaccctctttgggatgataactgctgttggactctcgaatctgcagttcgtcgacatgaatagcagtaggaacctgtttgttttggggttctcaatgttttttggtctcactttgccgaactatctggagagtaatcctggtgcaatcaacactgggattcttgaagttgatcagatcctcatagtcctgctcacaacagagatgttcgttggcggctgtttggcttttatcctcgataacaccgttcctggctccccagaagaacgaggcctgatccagtggaaagcaggggcacacgctaattccgatatgagcagctcgctgaaatcttacgatttcccaatcggcatgggaatcgtgaagcgcatcactttcctcaaatatatccctatatgtcctgtcttcaagggtttctccagctctagcaaggaccagatcgcaatacccgaagacacccctgagaatacagaaactgcaagcgtttgcaccaaggtctag

SEQ ID NO: 340601 - DNA, 780 bp, Artificial Sequence
  derived and/or modified sequence
atgagggcccaggaggacctggagggccgcacccagcacgagaccacccgggaccccagcacccccctgcccacagagcccaagtttgacatgctgtacaagattgaagatgtgcccccctggtacctgtgcatcctgctgggcttccagcactacctgacctgcttcagcggcaccatcgctgtgcccttcctgctggccgaggccctgtgtgtgggccatgaccagcacatggtgtcccagctgattggcaccatcttcacctgtgtgggcatgttctgcaccctgtttggcatgatcacagctgtgggcctgagcaacctgcagtttgtggacatgaacagcagcaggaacctgtttgtgctgggcttctccatgttcttcggcctgaccctgcccaactacctggagagcaaccctggggccatcaacacaggcatcctggaggtggaccagatcctgattgtgctgctgaccacagagatgtttgtgggcggctgcctggccttcatcctggacaacacagtgcccggcagccctgaggagcggggcctcatccagtggaaggccggggcccacgccaacagcgacatgagcagcagcctgaagagctatgacttccccatcggcatgggcatcgtgaagaggatcaccttcctgaagtacatccccatctgccctgtgttcaagggcttcagcagcagcagcaaggaccagatcgccatccctgaggacaccccagagaacacagaaacagcctctgtgtgcaccaaggtgtag

SEQ ID NO: 340602 - DNA, 780 bp, Artificial Sequence
  derived and/or modified sequence
atgcgggcccaggaggacctggagggccggacccagcacgagaccacacgggacccaagcacgccccttcctaccgaacctaagtttgacatgctgtacaagatcgaggacgtgcccccttggtacctctgcatattattgggattccaacattatctgacctgtttctccgggactatcgcagtcccgttcttgcttgcagaagctctgtgcgtgggtcacgaccaacatatggtgtctcaactgattgggacgatcttcacctgcgttggaatgttctgcactctcttcgggatgatcaccgccgtgggtctgagcaacctccagttcgtagacatgaactcttcacgcaatttgttcgtactcgggttttccatgttttttggattgaccttgccgaattacttagagtctaacccaggtgcaataaatactgggatcctggaggtcgaccagattctgatagtgctcctgactaccgaaatgttcgtgggtggatgccttgcattcatcttagacaatactgtcccagggtcacctgaggaaagaggacttatacagtggaaagcgggggcccacgcgaatagtgacatgtctagctctctcaagtcatacgactttcccatcgggatggggattgttaagagaatcacttttttaaaatatattcctatctgcccagtattcaaagggttctcaagctctagtaaggatcagattgcgatacccgaggatacacctgagaacacggaaaccgcatccgtgtgtacaaaggtgtag

SEQ ID NO: 340603 - DNA, 780 bp, Artificial Sequence
  derived and/or modified sequence
atgcgggcacaggaggacctggaggggcgaacacagcacgagacaactagagacccctcaacacctctaccaacagaacccaagtttgacatgctatacaaaatagaggatgtgcccccatggtatctttgcattttacttggctttcaacattacctgacctgcttctccgggaccatcgccgtgccttttctactcgctgaggccctttgcgtgggacacgatcagcatatggtaagtcagttgatcggtactatttttacatgcgtaggcatgttctgtactcttttcgggatgatcactgcagtcggtctgtccaatttgcagtttgtcgacatgaactctagtcggaatctgtttgttctcggcttctctatgttcttcggattgactctgccaaattaccttgagtcaaaccctggggctatcaatactggcatcctggaggtagaccaaattctgattgttttgctcactacagaaatgtttgtggggggttgcctggccttcatcctggacaacaccgttccagggtctccagaggagaggggactgatccagtggaaagctggggcacatgccaactctgacatgtcgtcctccctcaagtcatacgactttcccattgggatgggtatagttaagagaattactttcttgaagtacattcctatttgccctgtgtttaaaggatttagctccagtagcaaggaccagattgccatacctgaagacaccccagaaaatacagagacagcatcagtttgtactaaggtttag

SEQ ID NO: 340604 - DNA, 1323 bp, Artificial Sequence
  derived and/or modified sequence
aaacaatgcctgatatgtggagtaaagtcctcctccttggcctttgtcaagtcatcccctcttctcctcaggaactgctcaaacctgtgccccaaagatgagggcccaggaggacctcgagggccggacacagcatgaaaccaccagggacccctcgaccccgctacccacagagcctaagtttgacatgttgtacaagatcgaggacgtgccaccttggtacctgtgcatcctgctgggcttccagcactacctgacatgcttcagtggtaccatcgccgtgcccttcctgctggctgaggcgctgtgtgtgggccacgaccagcacatggttagtcagctcatcggcaccatcttcacgtgcgtgggcatgttctgcactctctttggcatgattacagctgtggggctgtccaacctgcaatttgtggacatgaactcctctcgcaacctcttcgtgctgggattttccatgttcttcgggctcacgctgcccaattacctggagtccaaccctggcgccatcaatacaggcattcttgaagtggatcagattctgattgtgctgctgaccacggagatgtttgtgggcgggtgccttgctttcatacttgacaacacagtgccagggagcccagaggagcgtggtctgatacagtggaaagctggggctcatgccaacagtgacatgtcttccagcctcaagagctacgatttccccattgggatgggcatagtaaaaagaattacctttctgaaatacattcctatctgcccagtcttcaaaggattttcttcaagttcaaaagatcagattgcaattccagaagacactccagaaaatacagaaactgcatctgtgtgcaccaaggtctgaaaaatgacttccaggaaaggaagcatggtatataacaggaaaagaaaactacatggggaaccagaagacctaagcctgaaatcccagccctgcccctaactaacttctgtgtaaactcagataagtcacctttctctgggattcaaatttttgcatcagttaaaaaaaaaggggtgggggggaatgggccaaagtctgagtcttagagacttgtaccaatgttatgctatgtctctaaatctttactctcctaagtagacttgtcagcatctaggaagaacagctagaaattttcctctgtgatattttagactgcaagttgaaaaaaataaaaagaaatgagggcaggttccagggcctgaaatgtaggtatgctgcaaggcttttacattgaatttgaccctacatcacttcaagactaatgcataatattaaacatcatgttg

SEQ ID NO: 340605 - DNA, 2204 bp, Artificial Sequence
  derived and/or modified sequence
aaacaatgcctgatatgtggagtaaagtcctcctccttggcctttgtcaagtcatcccctcttctcctcaggaactgctcaaacctgtgccccaaagatgagggcccaggaggacctcgagggccggacacagcatgaaaccaccagggacccctcgaccccgctacccacagagcctaagtttgacatgttgtacaagatcgaggacgtgccaccttggtacctgtgcatcctgctgggcttccagcactacctgacatgcttcagtggtaccatcgccgtgcccttcctgctggctgaggcgctgtgtgtgggccacgaccagcacatggttagtcagctcatcggcaccatcttcacgtgcgtgggcatcaccactctcatccagaccaccgtgggcatccggctgccgctgttccaggccagtgcctttgcatttctggttccagccaaagccatactggctctggagagatggaaatgccccccggaagaggagatctacggtaactggagtctgcccctgaacacctctcatatttggcacccacggatacgggaggtgggtttgcatgtaagcatagaagaggccgggggctatatgggagtgagggtggccgctgagtttggggatttgaggaggtggtccaggagctttgttcctgctagcagcagccaggtccagggtgcaatcatggtgtccagcgtggtggaggtggtgattggcctgctggggctgcctggggccctgctcaactacattgggcctctcacagtcacccccactgtctccctcattggcctttctgtcttccaagctgctggcgaccgagctggctcccactggggcatctcagcttgctccattctcctgatcatcctcttctcccagtacctgcgcaacctcaccttcctgctgccttgcgcccagcagagtgcgccactctggcaggcatcattgagtccatcggagattactacgcctgtgcccgcctggctggtgcaccaccccctccagtacatgctatcaacaggggcatcttcaccgaaggcatttgctgcatcatcgcggggctattgggcacgggcaacgggtccacctcgtccagtcccaacattggcgtcctgggaattaccaaggtgggcagccggcgcgtggtgcagtatggtgcggctatcatgctggtcctgggcaccatcggcaagttcacggccctcttctcctcgctccctgaccccatcctggggggcatgttctgcactctctttggcatgattacagctgtggggctgtccaacctgcaatttgtggacatgaactcctctcgcaacctcttcgtgctgggattttccatgttcttcgggctcacgctgcccaattacctggagtccaaccctggcgccatcaatacaggcattcttgaagtggatcagattctgattgtgctgctgaccacggagatgtttgtgggcgggtgccttgctttcatacttgacaacacagtgccagggagcccagaggagcgtggtctgatacagtggaaagctggggctcatgccaacagtgacatgtcttccagcctcaagagctacgatttccccattgggatgggcatagtaaaaagaattacctttctgaaatacattcctatctgcccagtcttcaaaggattttcttcaagttcaaaagatcagattgcaattccagaagacactccagaaaatacagaaactgcatctgtgtgcaccaaggtctgaaaaatgacttccaggaaaggaagcatggtatataacaggaaaagaaaactacatggggaaccagaagacctaagcctgaaatcccagccctgcccctaactaacttctgtgtaaactcagataagtcacctttctctgggattcaaatttttgcatcagttaaaaaaaaaggggtgggggggaatgggccaaagtctgagtcttagagacttgtaccaatgttatgctatgtctctaaatctttactctcctaagtagacttgtcagcatctaggaagaacagctagaaattttcctctgtgatattttagactgcaagttgaaaaaaataaaaagaaatgagggcaggttccagggcctgaaatgtaggtatgctgcaaggcttttacattgaatttgaccctacatcacttcaagactaatgcataatattaaacatcatgttg

SEQ ID NO: 340606 - DNA, 780 bp, Artificial Sequence
  derived and/or modified sequence
atgagagcccaggaggacctggagggcagaacccagcacgagaccaccagagaccccagcacccccctgcccaccgagcccaagttcgacatgctgtacaagatcgaggacgtgcccccctggtacctgtgcatcctgctgggcttccagcactacctgacctgcttcagcggcaccatcgccgtgcccttcctgctggccgaggccctgtgcgtgggccacgaccagcacatggtgagccagctgatcggcaccatcttcacctgcgtgggcatgttctgcaccctgttcggcatgatcaccgccgtgggcctgagcaacctgcagttcgtggacatgaacagcagcagaaacctgttcgtgctgggcttcagcatgttcttcggcctgaccctgcccaactacctggagagcaaccccggcgccatcaacaccggcatcctggaggtggaccagatcctgatcgtgctgctgaccaccgagatgttcgtgggcggctgcctggccttcatcctggacaacaccgtgcccggcagccccgaggagagaggcctgatccagtggaaggccggcgcccacgccaacagcgacatgagcagcagcctgaagagctacgacttccccatcggcatgggcatcgtgaagagaatcaccttcctgaagtacatccccatctgccccgtgttcaagggcttcagcagcagcagcaaggaccagatcgccatccccgaggacacccccgagaacaccgagaccgccagcgtgtgcaccaaggtgtag

SEQ ID NO: 340607 - protein, 822 aa, Artificial Sequence
  derived and/or modified sequence
MAESLGSAELLRQLKSLGMERLLHAVNTFLRQSCTYLPLLTFGGKTSFVSLDVYGTEANCSATSCSFPKAAATWPRRQAPGPLGELVRGPPDQGVAEQSFSHGLFEFGITNVPCIFSPPQMFPWIIQLYMVRTMLESLIADKSGSKKTLRSSLEGPTILDIEKFHRESFFYTHLINFSETLQQCCDLSQLWFREFFLELTMGRRIQFPIEMSMPWILTDHILETKEASMMEYVLYSLDLYNDSAHYALTRFNKQFLYDEIEAEVNLCFDQFVYKLADQIFAYYKVMAGSLLLDKRLRSECKNQGATIHLPPSNRYETLLKQRHVQLLGRSIDLNRLITQRVSAAMYKSLELAIGRFESEDLTSIVELDGLLEINRMTHKLLSRYLTLDGFDAMFREANHNVSAPYGRITLHVFWELNYDFLPNYCYNGSTNRFVRTVLPFSQEFQRDKQPNAQPQYLHGSKALNLAYSSIYGSYRNFVGPPHFQVICRLLGYQGIAVVMEELLKVVKSLLQGTILQYVKTLMEVMPKICRLPRHEYGSPGILEFFHHQLKDIVEYAELKTVCFQNLREVGNAILFCLLIEQSLSLEEVCDLLHAAPFQNILPRVHVKEGERLDAKMKRLESKYAPLHLVPLIERLGTPQQIAIAREGDLLTKERLCCGLSMFEVILTRIRSFLDDPIWRGPLPSNGVMHVDECVEFHRLWSAMQFVYCIPVGTHEFTVEQCFGDGLHWAGCMIIVLLGQQRRFAVLDFCYHLLKVQKHDGKDEIIKNVPLKKMVERIRKFQILNDEIITILDKYLKSGDGEGTPVEHVRCFQPPIHQSLASS

SEQ ID NO: 340608 - DNA, 2469 bp, Artificial Sequence
  derived and/or modified sequence
atggcggagtcgcttggatcagccgaactgcttcggcaacttaaaagcctcggaatggagcgcctcctccacgccgtgaatacttttttacgtcaaagttgcacttacttaccattattgaccttcgggggtaagacatcatttgtgagcctggacgtgtacgggactgaagctaactgttccgcaacctcttgtagcttccccaaggctgccgccacatggccgcggagacaggcccccggccccctgggggaactagtgcggggccccccggaccagggggtcgctgaacagagtttctcgcatggactgttcgaatttggcatcactaacgttccctgtatatttagtccgccacagatgtttccatggataatccagctctatatggtgaggacgatgctggaatccctcatagcagacaagagcggctcaaagaagactcttagatccagtctcgaaggtcccactatcctcgacatcgagaagttccatcgcgagtcttttttctacactcatttgataaatttcagtgaaactctgcagcagtgttgtgatctgtctcaactttggttccgcgagttctttctcgaactcactatgggacggcgaatccagtttcctattgagatgagcatgccgtggatcctgactgatcacatattggagactaaggaggcaagtatgatggaatacgtgctttattctctcgatctctacaatgatagcgcgcattacgctctaacccgattcaacaagcaattcttgtatgacgagatagaggcagaggtcaatctgtgctttgaccagttcgtgtacaagcttgccgaccagatcttcgcgtattacaaggtcatggctggctctctactccttgacaagcgtctcaggtcagagtgcaaaaatcagggggccacaatccatctccctccatccaataggtacgaaaccctattgaaacagcggcacgtccagctactgggtagatccattgacttgaatagactgattacccaaagggtcagcgcagccatgtataaaagtctggagctagcaatcgggcgtttcgaatccgaagatttaaccagtattgttgagctagacggactgctggagattaatcgcatgacccacaaactgcttagccgctacctgacactggacggattcgacgccatgtttcgcgaggccaaccacaacgtgagtgctccttacggtcgaatcactttgcacgtgttctgggaattgaattacgactttctgccaaactactgctataatggttccactaacaggttcgtgaggactgtgttgccattttcccaggaatttcagagggataagcaaccaaacgctcagccacagtatctgcatggaagtaaggctctgaacctcgcgtactcatctatctacggaagctaccggaactttgtcgggcccccacactttcaggtgatatgccgactgttaggctatcaggggatcgccgtggtcatggaggaactcctaaaagtggtcaagagcctgttacaaggcactatacttcagtatgtcaagaccctcatggaggtcatgcccaagatttgtcggttgccaagacacgagtatgggagtcccggcatcctggaattctttcatcaccagctcaaagacattgttgaatacgccgaactcaagacagtgtgtttccagaatcttagagaggtcgggaatgccatcctattttgtctgcttatagagcagtccctgagcctggaagaagtgtgcgatctgctgcacgccgctcctttccagaacattctccccagagtgcacgtcaaagagggcgaacggctggatgccaaaatgaagagactcgaaagtaagtacgccccactccatctggtgccactgattgaacgtcttggtactcctcaacagattgcaattgcccgggagggagatctactgaccaaggagcgtctctgctgtgggttatccatgtttgaagtgattctgactaggattcgctcctttttggatgacccaatatggcggggacctctgcctagtaatggcgttatgcatgtggatgagtgcgttgagttccatcgactctggagcgcaatgcagttcgtttactgcattcccgtaggaacacacgaatttacagttgagcaatgctttggagatggtctacattgggccggctgtatgatcatcgtcttgctaggtcagcaaagaagattcgctgttttggacttttgttatcacctgctgaaagtgcagaagcacgacggtaaggatgaaatcattaagaacgtgccgctgaagaaaatggtggagcggattcggaagttccaaatcctaaacgatgaaatcatcaccatactggacaagtatctcaaaagcggagacggtgagggcactccagttgaacatgtgcggtgcttccagccccccattcaccagagtctggcctcaagctag

SEQ ID NO: 340609 - DNA, 2469 bp, Artificial Sequence
  derived and/or modified sequence
atggccgagagcctgggcagcgctgagctgctgcggcagctgaagagcctgggcatggagcggctgctgcatgctgtgaacaccttcctgcggcagagctgcacctacctgcccctgctgaccttcggcggcaagaccagctttgtgtccctggatgtgtatggaacagaggccaactgcagcgccaccagctgcagcttccccaaggctgctgccacctggccccggcggcaggcccctggccccctgggggagctggtgcggggccccccagaccagggcgtggccgagcagagcttcagccacggcctgtttgaatttggcatcaccaacgtgccctgcatcttcagccccccccagatgttcccctggatcatccagctgtacatggtgaggaccatgctggagagcctgattgctgacaagagcggcagcaagaagaccctgcggagcagcctggagggccccaccatcctggacatcgagaagttccaccgggagagcttcttctacacccacctgatcaacttcagcgagaccctgcagcagtgctgtgacctgagccagctgtggttccgggagttcttcctggagctgaccatgggccgccgcatccagttccccatcgagatgtccatgccctggatcctgacagaccacatcctggagaccaaggaggcctccatgatggagtatgtgctgtacagcctggacctgtacaatgattctgcccactacgccctgacccgcttcaacaagcagttcctgtatgatgaaattgaggccgaggtgaacctgtgctttgaccagtttgtgtacaagctggccgaccagatctttgcctactacaaggtgatggccggcagcctgctgctggacaagaggctgcggtctgagtgcaagaaccagggcgccaccatccacctgccccccagcaacagatatgagaccctgctgaagcagagacatgtgcagctgctgggccgcagcattgacctgaacagactcatcacccagagggtgtctgctgccatgtacaagagcctggagctggccatcggccgctttgaaagtgaggacctgaccagcatcgtggagctggatggcctgctggagatcaacaggatgacccacaagctgctgagccgctacctgaccctggatggctttgatgccatgttccgggaggccaaccacaacgtgtctgccccctacggccgcatcaccctgcacgtgttctgggagctgaactatgacttcctgcccaactactgctacaacggcagcaccaacagatttgtgaggacagtgctgcccttcagccaggagttccagagggacaagcagcccaatgcccagccccagtacctgcacggcagcaaggccctgaacctggcctacagcagcatctacggcagctacagaaactttgtgggccccccccacttccaggtgatctgccgcctgctgggctaccagggcattgctgtggtgatggaggagctgctgaaggtggtgaagagcctgctgcagggcaccatcctgcagtatgtgaagaccctgatggaggtgatgcccaagatctgccgcctgcccaggcatgaatatggcagccctggcatcctggagttcttccaccaccagctgaaggacatcgtggagtatgcagagctgaagacagtgtgcttccagaacctgcgggaggtgggcaatgccatcctcttctgcctgctgattgagcagagcctgagcctggaggaggtgtgtgacctgctgcacgccgcccccttccagaacatcctgccccgggtgcacgtgaaggagggggagcggctggatgccaagatgaagaggctggagagcaaatatgcccccctgcacctggtgcccctcatcgagcggctgggcaccccccagcagatcgccatcgcccgggagggggacctgctgaccaaggagcggctgtgctgcggcctgtccatgtttgaggtgatcctgacccgcatccgctccttcctggatgaccccatctggaggggccccctgcccagcaatggagtgatgcacgtggatgaatgtgtggagttccaccggctgtggagcgccatgcagtttgtgtactgcatccctgtgggcacccatgagttcaccgtggagcagtgctttggagatggcctgcactgggccggctgcatgatcatcgtgctgctgggccagcagaggagatttgctgtgctggacttctgctaccacctgctgaaggtgcagaagcatgatggcaaggatgagatcatcaagaatgtgcccctgaagaagatggtggagcgcatcaggaagttccagatcctgaatgatgagatcatcaccatcctggacaagtacctgaagtctggagatggagagggcacccctgtggagcacgtgcgctgcttccagccccccatccaccagagcctggccagcagctag

SEQ ID NO: 340610 - DNA, 2469 bp, Artificial Sequence
  derived and/or modified sequence
atggccgagagcctgggcagcgccgagctgctgcggcagctgaagtctcttggcatggagcgtctgcttcacgcagtcaatactttcctccgccagagctgcacttacctacctcttctgacgttcggcgggaagacctctttcgtgagcctagacgtctacggcaccgaagctaactgcagtgcgacttcatgcagctttccgaaggcagccgcaacctggcccagaagacaagcccccggtccgttaggagaactggttagaggtccccctgatcagggtgtggcagagcagagcttttctcatgggcttttcgagtttgggatcacaaacgtcccgtgtattttctccccccctcagatgttcccttggattatccaactgtatatggtgagaactatgctcgaaagtcttatagcagacaaaagtggcagtaagaagaccttacggtcctccctggaaggccccaccatattagacatcgaaaagttccatcgggagagttttttttacacccacctgattaacttctcagagacccttcaacagtgctgcgatctttcccagctttggtttcgcgaatttttcctcgaactgacaatgggccgacggatacaatttccaatcgagatgtctatgccatggatccttacagaccatattctggaaaccaaggaagccagtatgatggaatacgtcttgtattccctagacctttacaacgactctgcccattatgccttgactcggttcaacaagcagttcctctatgacgagattgaggccgaggtgaatctgtgcttcgatcagtttgtctacaaactagctgaccagatctttgcatactacaaagtgatggcagggtcattgctgctggataagagactccgctccgagtgtaaaaatcagggggccaccattcacctcccgccatcaaaccgatacgaaaccctgctcaaacagcgccatgtgcagctcttagggcgatcgatcgacctgaacaggctgatcacccagcgcgtatcggcggctatgtataaatctctggagctcgccataggcaggttcgaatccgaggatttaacaagcattgtcgagctagatggtttacttgaaatcaacaggatgacccataaactgctgagccgttatttaactttggatgggttcgacgcgatgtttagagaagccaaccacaacgtcagcgctccctacggaaggatcaccctacatgtgttttgggagcttaattacgacttcctgccaaactattgttataacggtagcaccaataggttcgtccgtaccgtgttgcccttctcacaggaatttcaaagggataagcagcctaacgcccaaccgcaatacctgcatggatccaaggcactgaatctcgcctactcctctatctacggcagctacaggaatttcgtgggcccaccccactttcaagttatttgcagactgctcggctaccagggcatagccgttgttatggaagagcttttgaaagtcgtaaaatctttgttgcagggcaccatcctccagtatgtgaaaacactgatggaggtgatgcctaaaatttgccggttacccaggcacgagtatgggagccctggaatcctggaattcttccaccatcagctgaaagatatagtcgagtacgctgaactaaaaactgtgtgcttccagaacctgagagaggtcgggaatgcgatccttttttgtctgctgattgaacagagcctgtctctggaggaggtgtgtgacctccttcacgcagctccattccagaatattttgccccgtgttcacgtcaaggaaggagagcgcctggatgctaagatgaaaaggttggaaagcaaatatgcaccacttcacttggtccctctcatcgagaggctggggacaccacagcagatcgccatcgctcgggagggggacctgctgactaaagaacgcctctgctgtggcctctccatgtttgaggtgatactgaccagaattcggagcttccttgatgacccgatctggcggggaccacttccttccaacggcgtgatgcacgtcgatgagtgtgttgaatttcatcgcttgtggtccgcaatgcagtttgtgtattgtattccagtgggaacgcacgagttcaccgttgagcagtgctttggggatggtctgcattgggccggatgcatgatcatcgtcctgcttggccagcagcggaggttcgccgtgctagacttctgctaccacctcctgaaagtgcagaaacacgacggcaaggatgaaatcattaaaaacgtgcccctgaaaaaaatggtggagcggattcggaagttccagatcttgaacgacgaaatcataactatcctggacaaatacctgaagagcggagatggcgaggggacgccagtagagcacgtgcggtgtttccagccacccattcaccaaagcctggctagttcctag

SEQ ID NO: 340611 - DNA, 2469 bp, Artificial Sequence
  derived and/or modified sequence
atggcagagagtttgggttctgccgagctgctgaggcagttaaagagtctaggaatggagaggttgttacatgcagtcaacaccttcctgagacagagctgcacctacttacctctcctgacatttgggggaaaaacttcctttgtcagtctagatgtgtacggtaccgaagccaactgttctgccacttcctgtagcttcccaaaagcagccgctacttggccacgaaggcaagccccaggtccgctcggggaactcgtccggggaccacccgatcaaggcgtggcagagcagtctttctcccatggcctcttcgagtttggcatcactaacgtgccgtgtatattctctcccccacagatgtttccttggatcattcagttatacatggtcagaactatgctcgagtctctgattgcagacaaatctggatccaaaaagacactgcgctccagcctggagggcccaactattttggatatcgagaagttccaccgcgaatcattcttttatactcacctgatcaacttcagcgagacgctgcaacagtgctgcgacttaagtcaactttggttcagggaattcttcctggagcttaccatgggcaggaggatacagtttcccatcgagatgtcaatgccttggatcctcacagaccatatcctggagactaaggaggcctccatgatggaatatgttctatatagcttagacctttataacgactcagcacactatgcactcacacgctttaataagcagtttctctacgacgagattgaggccgaagtcaacttgtgtttcgaccagttcgtgtacaagctcgctgaccagattttcgcatactacaaggtgatggctggctctcttttgctggataagcggctgcggagtgagtgcaagaatcagggggctacaatacacctccctccttcaaacagatacgagactttgttgaaacagcgccatgtgcaactgctgggtagatccatcgatctgaatcgcctgattactcagcgggtaagtgctgctatgtataagagcctcgagctggctattggcaggtttgaatcagaagacctgacgtcgattgtggaactcgatggtttgctggagatcaatagaatgacgcacaagttactttcaaggtacctgacactcgacgggttcgacgctatgtttcgcgaggctaaccacaatgtctcagccccatacgggaggataaccctgcacgtcttttgggaactaaattacgatttcctgccaaattactgttataatggctccaccaatagattcgtgcgcaccgtactcccattctcgcaggagttccagcgtgataagcaacccaacgctcagcctcagtacctgcacggatccaaggctctgaacttggcttactcaagtatatacgggtcctatagaaactttgtgggcccaccacatttccaggtgatttgccggctcctgggatatcagggcatcgccgtcgtgatggaagagctgcttaaggtggttaagagtcttctccagggaaccatattacagtatgtgaaaaccctgatggaagtcatgccaaaaatttgtagattgcctcgacacgaatatggcagccccggtatcctcgagttctttcaccaccagctgaaggatatcgttgagtacgccgaactcaagaccgtgtgcttccaaaacctccgcgaggttgggaacgccatactgttctgcctcttgattgaacagtctctgtcgctggaagaagtctgtgacctgctacacgcggcaccctttcagaatatcttgccccgagttcatgttaaagagggggagcgattagacgctaagatgaaacggttggaatccaagtacgcccctctgcacctggtcccattaatcgaacgactgggtacccctcagcagatagccatcgctagagagggggacctgttgacgaaggaacgtctttgttgcgggctgagcatgttcgaagtgatcctgactagaatccggtcctttctggatgacccgatttggcgaggaccccttccgtccaacggtgtgatgcatgttgacgaatgcgttgagtttcacagactgtggtctgccatgcagtttgtttactgcatccctgttggaacacatgagttcactgtcgagcagtgcttcggcgatggactccactgggctggatgcatgattatcgtgctcctggggcagcagcgcaggtttgccgtcctcgacttttgttaccatctcctaaaggtgcagaagcacgatggtaaagatgaaattatcaagaatgtccctctgaagaagatggtagagcggatcaggaagtttcagattctcaatgacgaaattatcacgattctggataaatacctgaagtccggtgacggagaaggcactcccgtagagcatgtgcgatgtttccagccccctattcaccagtccctcgcctctagctag

SEQ ID NO: 340612 - DNA, 5674 bp, Artificial Sequence
  derived and/or modified sequence
ccggtttaatccacaccgctgcgtctgtcctccgtcctggggctggtcttctccctcatctctgccggaggcttttaatctcttctgccactcttctggaaagtcaccagcaatgcacgctgctggctctgcaggagggtcagggggacggccctcggcctgtgcgtggtgccagccaccctccctgcctccctctgcgtgcgtcccgtgtccctgcctggggtgtgtgtgtcgagtgactaacgtctctctcctgcctctccctcctgtctgtccgtgtctagctctacctggtgcgcaccatggccgagtccttgggctctgccgagctgctcaggcagctcaagtctctgggcatggagaggctcttgcatgcggttaacacgtttctgaggcagtcgtgcacctacctaccccttttaacctttggtggtaagacatcatttgtttctcttgacgtttatggcacggaggcgaactgctccgctacaagttgttctttccccaaagcagcagcaacgtggccgcgtagacaggcacccggacccctcggggagctggtgcggggccctcccgaccagggcgtagcggagcagtccttctctcatgggctttttgagtttggcataactaatgtaccatgtatattttctcccccacaaatgtttccttggataatccagctttacatggtgagaaccatgctagagtccctcattgcagacaaaagtggttccaagaaaaccttgagaagtagccttgaggggcccaccatattggacatagaaaaatttcatcgagagtcattcttctacactcacttgataaatttcagtgaaacgctgcagcagtgctgtgacctttcgcagctgtggttccgagagttcttcctggagctgaccatgggcaggaggatccagttccccattgagatgtcgatgccctggatcctgacggaccacatcctggagaccaaggaggcatcgatgatggagtacgtgctctactccctggacctgtacaatgacagcgcccactacgcgctcaccaggttcaacaagcagttcctgtacgacgaaattgaggccgaggtgaatctatgttttgaccaatttgtttacaagctagcagaccagatatttgcctattataaggttatggcaggaagtttgcttcttgataaacggttacgatcagaatgcaagaatcagggagccacgatccacctcccgccgtctaaccgctacgagacgctgctgaagcagaggcatgtgcagctcctcggcagatcaatagacctcaatcgtctgatcacccagcgcgtctcagcagccatgtataagtccctagaactggcgattggacgatttgaaagtgaagatttgacctccatagttgagctggatggcctgttggaaatcaaccgcatgacccacaagctgctgagccggtacctgacgctggacggcttcgacgccatgttccgggaggccaaccacaacgtgtcagcgccctacgggaggatcaccctgcacgtcttctgggagctcaactatgacttcctgcccaactactgctacaacggctctaccaaccggtttgttcggacagtgttaccattttctcaggaatttcaaagagataagcagcctaatgcacagcctcagtatctgcatggatccaaggctttgaacttggcctactccagcatttacggcagctaccggaacttcgtgggacctccacactttcaagtcatctgccggcttctcggctaccagggtatcgccgtggtcatggaggagctgctgaaggtcgtcaagagcctgctgcaaggcacaatcctgcagtacgtgaagacgctgatggaggtgatgcccaagatctgccgcctgccccggcacgagtacggctctcctggtatcctggagttcttccaccaccagctgaaggacatcgtggagtacgcagagctgaagacggtgtgcttccagaacctgcgggaggtggggaacgccatcctcttctgcctgctcatcgagcagagcctgtctttagaagaagtgtgtgacctgctgcacgcggctcctttccagaacatcttgccgcgagtccatgtgaaagagggggagagacttgatgccaaaatgaaaagactagaatcaaagtacgccccgctgcatcttgtcccactgattgaaagactggggacccctcagcaaattgccatcgcaagagagggggacctgctgacaaaggagcgcctctgctgcggcctgtccatgtttgaggtcatcctgacacggatccggagctttctggatgaccccatctggcgcgggcctctgcccagcaatggggtcatgcatgtggacgagtgtgtggagtttcacagactgtggagtgccatgcagtttgtctactgcattcccgtggggacacacgagttcacagtcgagcagtgctttggtgatgggctacactgggctggctgtatgatcatcgtacttcttgggcagcagcggcgttttgctgtgctggatttctgctaccatctacttaaagtccagaaacatgatggcaaagatgagattattaaaaatgtgcctttgaagaagatggtggagagaattcgcaagttccagattctcaatgatgagatcatcaccatcctggataagtacctgaagtcaggcgacggggagggcacgccagtggagcatgtgcgctgcttccagccgcccatccaccagtccctcgccagcagctgagggcacgcgctgcactccgtaactcaacatggcatgcctttctctccgtaaactatttagtgagatttttagggactatttttcagtatctctgtacctgttaaagggggtgcttttcgatctaaaaacttaattttataaaattgacttatttttctagactaaaattgtatatgcttttggtaattaggaactcttgagaatattggctgctgattgttgccatcacgttcctacaaaattgtttttctatgggatgttctggcagctgtgtcataaaatgctgctgggttcattcattcattccataagaaacttaataccagcaaatgcattaaatcccttgccagttaccattaactgtaactatttagcttttgtttagggatctttctgatggtcttttatgagcaatcttagttctaagtcattgttcccatcccttttttgtgtgtttcagaaaatagtgaacttgattcccctgcttccactaaatccagttgtgacaaaatctaacgtgacatcagatcgaaaggttatagaaataaaactaatgagatctatttgtgttcatttatttactctaaccctgtgctgcctggcttggcaaggaactctaacctgaactcacataccaggccagctgggatggaggtcacctctaaggctgaggtgggatgggaccgtgacaccatcccatataccgctcacctcagcacaggtttagctttatatttagggttccgcaggcaaatgaggtgtaaaacggccgtgttggctgctccaatctggatatgaagaggctactcagtgcctctctgttacctgtgcccatgacctggaggaagccagcaatgtgggaggagatcagtcaggcccagtgggtgctgcacaaagggaccgggagcaccgagtccagccttcagctgtccccgatccacagggctcacatggctggagctggttcacatgatctgtcagaatgaaaaacaatcggtctagactaccagtagagtcacgaacatgtttgagaaactaaagccatattttaaaaagtactaaggcaatgaggttctgaaaatcctaactaactgaatggaaaaagatgctatgcctgtttattgtagatgaatactacagataaacacaagtccagcatgattaactgaactcactttatattgtagcctggcagtcattttacattatttggagtattgcaaccttcaccaattttaaaattttctatggatgccaagttgccataaaaagcaggcctcgcctacttttccggaggcctttggaaactgtccagaagcatatgatgcacggcacagaaaagtagtaagtgtacgaaccatcctgttacactgccaaactcactcaagtgacatgaagcctaacaaacaattattctttctttataaaaagttccctaaaaatgcttttggtaatgtgaattaataaccctggggccagcattctgctgcagatttagaggtggtagctgtgcttatcttagaaactacagaataggatgaaaaattatggtaaaacttaatcaattaccaagttttataaggcttaattatataccaaatatgtaataccttaggtataagacaatctcaagtgctacaaaatgttaaataagaatttattatttattaacctatgcatgttcaaatgagtctctgtcctcaagggggagaaaactggttcttttatgtacaaagcacagatgtaggtacagtatataaacagatacgtagtacatctgtagtattaaaatggcatgggaggaggcagttagaaaaaacatctaaaacagctccttagaaggccaataataaagttggaaaaaagggagtttccacgcagccagtggtgagctgcatgggataccagcaccattggcaggggaggccctcggggagtgatggcttggcgctggcgcaccactgggtaacctccaggcaggagccacaggctggaacaggcgaacactttcttcccatcacctaggtggaaattaattctgccaatacttttttttaaaggccagtcaatggttatgagtggataggttcaaagctgaatggagttcattagaccttttttattattctaccttttctgcatatgtttgcagttttccatcgacttcttcataaacaaacattttctagaaaccaaaatatgtagtggcccaaaggagctcttaagcaaagtacttggtacaaagagaccatattctataaacatgttaagtttgttctaagcattcagacttttagaataagaacttcatttcaactttttattataacatgagctaaatttaagaaacaaccctagtcttctatttcccagagctgttcaaagtctaaatgacaatataactcattatgaaaatatactgaaaagtacaagagctgatgtaaaacggtaatcaaggttccaggcatcatgggattagggtaactgaagaataaacccagccaggctgcaacagcaggcaggatgtgctggcttgatgaggtgctaaggccatcgaatgctcagaggaagccggattcacggtgatcatctcaacctgagaaatcgttccttggggtgatttctgcccttttttttgttttgtaagaaagaggttccttcattcagtaacttagttttcccttaataaatatttcaaaaataaaaccaatcatcatcaaacaaacaggagccacttttgtaggtaaggtaaatcacaggataatgtattgggataactctgtttttttaaaataaaaaagccttacatggtcagggattgatggagtggggatgacaaatgcacatttcagactttcatcaccaatgaaaaaataaagcattttcatagacttaaaactgtc

SEQ ID NO: 340613 - DNA, 2469 bp, Artificial Sequence
  derived and/or modified sequence
atggccgagagcctgggcagcgccgagctgctgagacagctgaagagcctgggcatggagagactgctgcacgccgtgaacaccttcctgagacagagctgcacctacctgcccctgctgaccttcggcggcaagaccagcttcgtgagcctggacgtgtacggcaccgaggccaactgcagcgccaccagctgcagcttccccaaggccgccgccacctggcccagaagacaggcccccggccccctgggcgagctggtgagaggcccccccgaccagggcgtggccgagcagagcttcagccacggcctgttcgagttcggcatcaccaacgtgccctgcatcttcagccccccccagatgttcccctggatcatccagctgtacatggtgagaaccatgctggagagcctgatcgccgacaagagcggcagcaagaagaccctgagaagcagcctggagggccccaccatcctggacatcgagaagttccacagagagagcttcttctacacccacctgatcaacttcagcgagaccctgcagcagtgctgcgacctgagccagctgtggttcagagagttcttcctggagctgaccatgggcagaagaatccagttccccatcgagatgagcatgccctggatcctgaccgaccacatcctggagaccaaggaggccagcatgatggagtacgtgctgtacagcctggacctgtacaacgacagcgcccactacgccctgaccagattcaacaagcagttcctgtacgacgagatcgaggccgaggtgaacctgtgcttcgaccagttcgtgtacaagctggccgaccagatcttcgcctactacaaggtgatggccggcagcctgctgctggacaagagactgagaagcgagtgcaagaaccagggcgccaccatccacctgccccccagcaacagatacgagaccctgctgaagcagagacacgtgcagctgctgggcagaagcatcgacctgaacagactgatcacccagagagtgagcgccgccatgtacaagagcctggagctggccatcggcagattcgagagcgaggacctgaccagcatcgtggagctggacggcctgctggagatcaacagaatgacccacaagctgctgagcagatacctgaccctggacggcttcgacgccatgttcagagaggccaaccacaacgtgagcgccccctacggcagaatcaccctgcacgtgttctgggagctgaactacgacttcctgcccaactactgctacaacggcagcaccaacagattcgtgagaaccgtgctgcccttcagccaggagttccagagagacaagcagcccaacgcccagccccagtacctgcacggcagcaaggccctgaacctggcctacagcagcatctacggcagctacagaaacttcgtgggccccccccacttccaggtgatctgcagactgctgggctaccagggcatcgccgtggtgatggaggagctgctgaaggtggtgaagagcctgctgcagggcaccatcctgcagtacgtgaagaccctgatggaggtgatgcccaagatctgcagactgcccagacacgagtacggcagccccggcatcctggagttcttccaccaccagctgaaggacatcgtggagtacgccgagctgaagaccgtgtgcttccagaacctgagagaggtgggcaacgccatcctgttctgcctgctgatcgagcagagcctgagcctggaggaggtgtgcgacctgctgcacgccgcccccttccagaacatcctgcccagagtgcacgtgaaggagggcgagagactggacgccaagatgaagagactggagagcaagtacgcccccctgcacctggtgcccctgatcgagagactgggcaccccccagcagatcgccatcgccagagagggcgacctgctgaccaaggagagactgtgctgcggcctgagcatgttcgaggtgatcctgaccagaatcagaagcttcctggacgaccccatctggagaggccccctgcccagcaacggcgtgatgcacgtggacgagtgcgtggagttccacagactgtggagcgccatgcagttcgtgtactgcatccccgtgggcacccacgagttcaccgtggagcagtgcttcggcgacggcctgcactgggccggctgcatgatcatcgtgctgctgggccagcagagaagattcgccgtgctggacttctgctaccacctgctgaaggtgcagaagcacgacggcaaggacgagatcatcaagaacgtgcccctgaagaagatggtggagagaatcagaaagttccagatcctgaacgacgagatcatcaccatcctggacaagtacctgaagagcggcgacggcgagggcacccccgtggagcacgtgagatgcttccagccccccatccaccagagcctggccagcagctag

SEQ ID NO: 340614 - protein, 161 aa, Artificial Sequence
  derived and/or modified sequence
MAAQVTLEDALSNVDLLEELPLPDQQPCIEPPPSSLLYQPNFNTNFEDRNAFVTGIARYIEQATVHSSMNEMLEEGQEYAVMLYTWRSCSRAIPQVKCNEQPNRVEIYEKTVEVLEPEVTKLMNFMYFQRNAIERFCGEVRRLCHAERRKDFVSEAYLITL

SEQ ID NO: 340615 - DNA, 486 bp, Artificial Sequence
  derived and/or modified sequence
atggccgctcaagttactttggaagacgcactgagcaatgtggacctgctggaagagctgcccctaccagatcaacagccttgcattgagcccccgcccagtagcctcctataccagccaaactttaacaccaactttgaagatcggaatgctttcgtcaccggaatcgctaggtatatcgaacaggctacagtgcactcgtctatgaatgaaatgctggaggagggccaggagtacgctgtgatgctctacacgtggagatcttgctcccgggctatcccccaggtgaaatgcaacgagcagcccaatcgcgtggaaatctacgaaaaaaccgttgaggtgctggagcctgaggtcaccaagctgatgaattttatgtatttccagaggaatgcgatagagaggttctgtggggaggtgcgtagactctgtcacgcagagcgccggaaagattttgtaagcgaggcctacctcattaccttgtag

SEQ ID NO: 340616 - DNA, 456 bp, Artificial Sequence
  derived and/or modified sequence
atggccgctcaggtcaccctcgaagacgcattatccaacgtcgatctactggaggagctcccgttgcctgatcagcaaccttgtatcgagcccccaccttcttcactgctgtatcagcccaacttcaatactaactttgaggataggaacgcgttcgttacggggatcgcacgttatatcgagcaggccactgtccacagctcaatgaatgaaatgctggaagaggggcaggaatacgccgtgatgctctatacgtggcgctcctgttctcgagccatcccccaggttaagtgtaacgagcagccaaatcgcgtcgagatctatgagaagaccgtggaggtactggagcctgaggttacaaaactgatgaactttatgtacttccaaaggaacgcaatagaaaggttctgtggcgaggtcagacgattgtgccatgcagagagaagaaaggattag

SEQ ID NO: 340617 - DNA, 486 bp, Artificial Sequence
  derived and/or modified sequence
atggccgcccaggtgaccctggaggatgccctgagcaatgtggacctgctggaggagctgcccctgcctgaccagcagccctgcatcgagcccccacccagcagcctgctgtaccagcccaacttcaacaccaactttgaagatagaaatgcctttgtgacaggcatcgcccgctacatcgagcaggccaccgtgcacagctccatgaatgagatgctggaggagggccaggagtatgctgtgatgctgtacacctggaggagctgcagccgggccatcccccaggtgaagtgcaatgagcagcccaacagagtggagatctatgagaagacagtggaggtgctggagcctgaggtgaccaagctgatgaacttcatgtacttccagagaaatgccatcgagcgcttctgtggggaggtgcggcggctgtgccacgccgagaggaggaaggactttgtgtctgaggcctacctgatcaccctgtag

SEQ ID NO: 340618 - DNA, 456 bp, Artificial Sequence
  derived and/or modified sequence
atggccgcccaggtgaccctggaggatgccctgagcaatgtggacctgctggaggagctgcccctgcctgaccagcagccctgcatcgagcccccacccagcagcctgctgtaccagcccaacttcaacaccaactttgaagatagaaatgcctttgtgacaggcatcgcccgctacatcgagcaggccaccgtgcacagctccatgaatgagatgctggaggagggccaggagtatgctgtgatgctgtacacctggaggagctgcagccgggccatcccccaggtgaagtgcaatgagcagcccaacagagtggagatctatgagaagacagtggaggtgctggagcctgaggtgaccaagctgatgaacttcatgtacttccagagaaatgccatcgagcgcttctgtggggaggtgcggcggctgtgccacgccgagaggaggaaggactag

SEQ ID NO: 340619 - DNA, 486 bp, Artificial Sequence
  derived and/or modified sequence
atggccgcccaggtgaccctggaggacgccctgagcaacgtggaccttctcgaggaactacctctacccgaccagcagccatgcatcgagccaccgccaagctctctgctctaccaaccaaacttcaatacaaacttcgaagatcggaacgcctttgttactgggatcgccagatatatcgagcaggctaccgtccactcgtctatgaacgagatgttagaggaaggccaggaatacgctgtaatgttgtacacctggcgctcttgcagccgagccatcccccaggtgaaatgtaacgagcagcctaacagagtcgagatctatgaaaaaaccgtggaggtgctggagccggaagtaacaaagctcatgaattttatgtattttcagagaaatgccatcgaacggttttgcggagaggtgcgccgcctctgccatgctgagcgaaggaaagattttgtgagtgaggcgtatttaatcacactgtag

SEQ ID NO: 340620 - DNA, 456 bp, Artificial Sequence
  derived and/or modified sequence
atggccgcccaggtgaccctggaggacgccctgagcaacgtggacctcctagaagagctgcctctgccagaccaacagccttgcatcgagcccccaccatcttctttgttatatcagccaaacttcaacaccaattttgaggatcgcaatgccttcgtgacgggaattgctcgctacatcgagcaggccaccgtgcattcctccatgaatgaaatgctggaggaagggcaggagtacgccgtgatgttgtatacttggcgtagctgctctagagccatccctcaggtgaagtgcaatgagcagcccaatagagtcgagatttacgaaaagacggtggaggtgttggagcctgaggtgaccaaattgatgaattttatgtacttccagcggaacgcgatcgagcggttttgtggagaggtgcgcaggttatgtcatgctgaaagacgcaaggactag

SEQ ID NO: 340621 - DNA, 486 bp, Artificial Sequence
  derived and/or modified sequence
atggcagcccaggtcactctggaggatgcactcagcaacgtcgaccttctcgaagaactgccgcttcccgatcagcagccatgcattgaacccccaccgtcaagcctgctgtatcagcctaatttcaataccaacttcgaggaccgcaacgcctttgtcaccggcattgcaaggtatattgagcaggcaaccgtgcatagcagcatgaacgagatgctcgaagagggacaggagtatgccgtgatgctatatacatggcgctcatgctcaagagctatcccacaggtaaagtgtaacgagcagccaaaccgcgtagagatatacgagaagaccgtggaagtgcttgaaccagaggtcaccaagctcatgaacttcatgtactttcagaggaacgccattgagcgattctgtggggaggtcagaaggctctgccatgctgaaagaaggaaagatttcgtgtctgaggcgtaccttatcactctttag

SEQ ID NO: 340622 - DNA, 456 bp, Artificial Sequence
  derived and/or modified sequence
atggctgcccaggtaacacttgaagatgctctgtcgaacgtggatctgctggaagaattgccattgccagatcaacagccgtgtattgagcccccacctagctccctactatatcagcccaacttcaataccaattttgaggataggaatgcattcgttacgggcattgctagatacatagagcaggccacagtgcacagctcaatgaatgaaatgctggaagaggggcaagagtacgctgtcatgctgtacacatggagatcatgctcacgcgcaatcccacaggtcaagtgtaatgaacagcctaacagagtcgaaatatacgaaaaaactgttgaagtgctggagccagaggtgaccaagttaatgaacttcatgtactttcagcgcaacgctattgagaggttctgcggcgaagtcagacggctgtgtcacgccgagcggcgtaaggattag

SEQ ID NO: 340623 - DNA, 544 bp, Artificial Sequence
  derived and/or modified sequence
agttttcctaaacacgcctgtgaccagctgactccactcagcgtttccgtgtgagcccaggatggcggcccaggtgactctggaggacgcgctgtccaacgtggacctcctggaggagctgcccctgcccgaccagcagccctgcatcgagcccccgccatcctcgctgctctaccagccaaatttcaacactaactttgaagacagaaatgcatttgttactggcatcgcaagatacattgaacaagccaccgtccactctagcatgaacgagatgctggaggagggccaagaatatgctgtcatgctgtacacctggaggagctgctcccgggccatcccacaggtgaaatgtaacgagcagcctaacagagtggaaatctacgagaaaaccgtggaggttctggagcctgaggtcacaaaactgatgaatttcatgtacttccagagaaatgccattgagcgtttctgcggggaagtgaggcgcctgtgccatgccgagaggaggaaggacttcgtgtcagaagcctacctgatcacactg

SEQ ID NO: 340624 - DNA, 582 bp, Artificial Sequence
  derived and/or modified sequence
gtgtttcctggcgcattcccggccagcccgagtgactcactcggccaaggaaactcccagggcccgcccaggacccccaagccgccgcggacgcagaacaggggtccttatgtgttgttccagcccaggatggcggcccaggtgactctggaggacgcgctgtccaacgtggacctcctggaggagctgcccctgcccgaccagcagccctgcatcgagcccccgccatcctcgctgctctaccagccaaatttcaacactaactttgaagacagaaatgcatttgttactggcatcgcaagatacattgaacaagccaccgtccactctagcatgaacgagatgctggaggagggccaagaatatgctgtcatgctgtacacctggaggagctgctcccgggccatcccacaggtgaaatgtaacgagcagcctaacagagtggaaatctacgagaaaaccgtggaggttctggagcctgaggtcacaaaactgatgaatttcatgtacttccagagaaatgccattgagcgtttctgcggggaagtgaggcgcctgtgccatgccgagaggaggaaggac

SEQ ID NO: 340625 - DNA, 486 bp, Artificial Sequence
  derived and/or modified sequence
atggccgcccaggtgaccctggaggacgccctgagcaacgtggacctgctggaggagctgcccctgcccgaccagcagccctgcatcgagcccccccccagcagcctgctgtaccagcccaacttcaacaccaacttcgaggacagaaacgccttcgtgaccggcatcgccagatacatcgagcaggccaccgtgcacagcagcatgaacgagatgctggaggagggccaggagtacgccgtgatgctgtacacctggagaagctgcagcagagccatcccccaggtgaagtgcaacgagcagcccaacagagtggagatctacgagaagaccgtggaggtgctggagcccgaggtgaccaagctgatgaacttcatgtacttccagagaaacgccatcgagagattctgcggcgaggtgagaagactgtgccacgccgagagaagaaaggacttcgtgagcgaggcctacctgatcaccctgtag

SEQ ID NO: 340626 - DNA, 456 bp, Artificial Sequence
  derived and/or modified sequence
atggccgcccaggtgaccctggaggacgccctgagcaacgtggacctgctggaggagctgcccctgcccgaccagcagccctgcatcgagcccccccccagcagcctgctgtaccagcccaacttcaacaccaacttcgaggacagaaacgccttcgtgaccggcatcgccagatacatcgagcaggccaccgtgcacagcagcatgaacgagatgctggaggagggccaggagtacgccgtgatgctgtacacctggagaagctgcagcagagccatcccccaggtgaagtgcaacgagcagcccaacagagtggagatctacgagaagaccgtggaggtgctggagcccgaggtgaccaagctgatgaacttcatgtacttccagagaaacgccatcgagagattctgcggcgaggtgagaagactgtgccacgccgagagaagaaaggactag

SEQ ID NO: 340627 - protein, 265 aa, Artificial Sequence
  derived and/or modified sequence
MPLPVALQTRLAKRGILKHLEPEPEEEIIAEDYDDDPVDYEATRLEGLPPSWYKVFDPSCGLPYYWNADTDLVSWLSPHDPNSVVTKSAKKLRSSNADAEEKLDRSHDKSDRGHDKSDRSHEKLDRGHDKSDRGHDKSDRDRERGYDKVDRERERDRERDRDRGYDKADREEGKERRHHRREELAPYPKSKKAVSRKDEELDPMDPSSYSDAPRGTWSTGLPKRNEAKTGADTTAAGPLFQQRPYPSPGAVLRANAEASRTKQQD

SEQ ID NO: 340628 - protein, 67 aa, Artificial Sequence
  derived and/or modified sequence
MPLPVALQTRLAKRGILKHLEPEPEEEIIAEDYDDDPVDYEATRLEGLPPSWYKVFDPSCPGWSAMV

SEQ ID NO: 340629 - protein, 213 aa, Artificial Sequence
  derived and/or modified sequence
MPLPVALQTRLAKRGILKHLEPEPEEEIIAEDYDDDPVDYEATRLEGLPPSWYKVFDPSCGLPYYWNADTDLVSWLSPHDPNSVVTKSAKKLRSSNADAEEKLDRSHDKSDRGHDKSDRSHEKLDRGHDKSDRGHDKSDRDRERGYDKVDRERERDRERDRDRGYDKADREEGKERRHHRREELAPYPKSKKAVSRKDEELDPMDPSSYSDAP

SEQ ID NO: 340630 - DNA, 798 bp, Artificial Sequence
  derived and/or modified sequence
atgcccctgcccgtggccctgcagaccagactggccaagagaggcatcctgaagcacctggagcccgagcccgaggaggagatcatcgccgaggactacgacgacgaccccgtggactacgaggccaccagactggagggcctgccccccagctggtacaaggtgttcgaccccagctgcggcctgccctactactggaacgccgacaccgacctggtgagctggctgagcccccacgaccccaacagcgtggtgaccaagagcgccaagaagctgagaagcagcaacgccgacgccgaggagaagctggacagaagccacgacaagagcgacagaggccacgacaagagcgacagaagccacgagaagctggacagaggccacgacaagagcgacagaggccacgacaagagcgacagagacagagagagaggctacgacaaggtggacagagagagagagagagacagagagagagacagagacagaggctacgacaaggccgacagagaggagggcaaggagagaagacaccacagaagagaggagctggccccctaccccaagagcaagaaggccgtgagcagaaaggacgaggagctggaccccatggaccccagcagctacagcgacgcccccagaggcacctggagcaccggcctgcccaagagaaacgaggccaagaccggcgccgacaccaccgccgccggccccctgttccagcagagaccctaccccagccccggcgccgtgctgagagccaacgccgaggccagcagaaccaagcagcaggactag

SEQ ID NO: 340631 - DNA, 798 bp, Artificial Sequence
  derived and/or modified sequence
atgcctttgcccgtggcgttacagacccggttagccaagcggggtatattgaagcacctagaacccgagcccgaggaagaaattatagcggaagactatgatgatgatcccgttgattatgaggcaacacgcctagagggccttcccccatcatggtacaaagtgtttgacccaagctgtggcttaccatactactggaacgccgataccgacctcgtttcttggttgtctccacacgatcccaactctgtggtgaccaagtcagcaaaaaaactacggtccagtaacgctgacgccgaagagaaattagaccgaagccacgataagtccgaccgcggtcatgataaatccgaccgttcgcacgagaagcttgatagaggacacgataagtccgaccgcgggcacgataagtccgatcgcgaccgagaacgaggttacgataaggtcgacagagaaagggagagggatcgggagagggacagagaccgaggttacgacaaggctgaccgcgaagagggtaaagagcggcggcatcatagacgggaagagttggcgccatatccaaaatctaaaaaggccgtgtcacggaaagacgaagaattagatccaatggatccctcctcatactcagacgctccacgcggcacctggtcaacaggcctcccaaagcggaacgaagctaaaacaggcgccgacacgaccgccgcgggccctctgttccagcaaagaccatatcccagccccggcgccgtgctgagggctaatgcagaggcatctcggacaaagcagcaggactag

SEQ ID NO: 340632 - DNA, 798 bp, Artificial Sequence
  derived and/or modified sequence
atgccattgcccgtggcgctgcagacgcggttggcaaagcggggcatattaaagcatctagaacccgagcctgaagaagagatcattgccgaggattatgatgacgacccggtagattacgaggccaccaggctggagggtctgcccccaagttggtacaaagtcttcgacccgtcctgtgggctgccctattactggaacgccgataccgatttggtgagctggctgtcacctcacgatccaaacagcgttgtgaccaaatctgcaaaaaaactccggagctctaacgccgatgctgaagaaaaattggatagaagtcacgataagagcgatcgcggtcacgacaaaagcgaccgctcccacgagaagttggatcgcggacatgacaagtctgatagggggcatgacaagagtgatcgtgatagggagcgtggctacgacaaggtggatcgcgaacgagaaagagatcgggaacgcgatagagaccgaggatacgacaaagctgaccgtgaggaaggaaaagaacggcgccaccatcgacgagaggagcttgcaccgtaccctaaaagcaaaaaagcagtttctcgtaaagacgaggaacttgacccaatggatccttcatcatattcagacgcacccagaggaacctggtctacgggcttgccaaagagaaatgaagccaagaccggggccgatactactgccgcgggccccctgttccagcaaagaccctacccttcaccaggcgcggtcctgagggccaatgccgaagcctctaggactaaacagcaggactag

SEQ ID NO: 340633 - DNA, 798 bp, Artificial Sequence
  derived and/or modified sequence
atgccactgcccgtggcactgcaaactagactggccaagagaggaatcttgaagcacttagagccggagcctgaggaggaaataatcgctgaagattacgatgatgatccggtcgactacgaggccacgcgtctcgaaggcctgccgcccagctggtataaggtgtttgacccatcctgtggccttccatattattggaatgccgataccgatcttgttagttggttgagcccccatgatcctaacagcgttgtgaccaagagcgctaagaagttaaggtcctctaatgcagacgccgaagaaaagctggaccggtcacacgacaagagtgatcgaggccacgataaatccgacaggtcgcacgagaaactggatcgcggccacgacaagtccgaccggggccatgacaaatctgacagggaccgcgagcgggggtacgataaggtcgacagggaacgggaaagggatcgggaacgtgaccgggaccgtggatacgacaaagcggatcgcgaggaaggaaaagagaggagacatcataggagagaggagcttgctccctaccccaaatctaagaaggcggtgagtcggaaagacgaggagctggacccgatggatccatcctcttattccgacgctcctagggggacatggtctaccgggttaccgaaaaggaatgaggcgaaaaccggcgctgacaccactgccgcagggccgctctttcagcagcgtccatatccatctcctggagcagttctcagggccaacgccgaggcaagtcgcacaaaacaacaggattag

SEQ ID NO: 340634 - DNA, 798 bp, Artificial Sequence
  derived and/or modified sequence
atgcccctgcctgtggccctgcagacccggctggccaagaggggcatcctgaagcacctggagcctgagcctgaggaggagatcatcgcagaagattatgatgatgatcctgtggactatgaggccacccggctggagggcctgcccccatcctggtacaaggtgtttgaccccagctgtggcctgccctactactggaatgctgacacagacctggtgtcctggctgagcccccatgaccccaacagcgtggtgaccaagagcgccaagaagctgcggagcagcaatgctgatgctgaggagaagctggacaggagccatgacaagagtgaccggggccatgacaagagtgacaggagccatgagaagctggaccggggccatgacaagagtgaccggggccatgacaagagtgaccgggaccgggagcggggctatgacaaggtggaccgggagcgggagcgggaccgggagcgggaccgggaccggggctatgacaaggctgaccgggaggagggcaaggagcggcggcaccaccggcgggaggagctggccccctaccccaagagcaagaaggctgtgtccaggaaggatgaggagctggaccccatggaccccagcagctacagtgatgccccccggggcacctggagcacaggcctgcccaagagaaatgaggccaagacaggagctgacaccacagctgctggccccctcttccagcagaggccctaccccagccctggagctgtgctgcgggccaatgctgaggccagcaggaccaagcagcaggactag

SEQ ID NO: 340635 - DNA, 798 bp, Artificial Sequence
  derived and/or modified sequence
atgcccctgcccgtggccctgcagacccggctggccaagcggggcatactgaaacatctggagcctgagcctgaggaggagattatcgccgaggactacgacgacgatcccgtagattatgaagccacccgccttgaagggctgcctccctcttggtacaaagtgttcgatccatcctgtgggttaccgtactactggaacgcagataccgacctggtttcctggctcagtccccatgatccgaactccgtcgtgaccaagagcgctaaaaaactcagatcaagcaacgcggatgcagaggagaaactggaccgctcccacgataagtctgaccgcggtcacgataaatctgataggagccacgagaaattggaccggggacacgataagtccgaccggggccacgacaagtccgatcgagacagggagcgtggatacgataaggtggaccgggagcgagagagagatagggaacgcgatcgcgataggggctacgacaaggccgatagagaagagggtaaggaaagacgtcatcatagaagagaggagcttgccccttaccccaagtctaagaaagctgtttccagaaaggatgaggagctggatcctatggacccaagctcctattcagacgctccaaggggaacctggagcactgggctcccaaaacggaacgaggccaagactggggccgatactaccgccgcagggcccctgtttcaacagcggccctacccgtcccccggcgcagttctgagggccaatgcagaggcctcccggactaagcagcaggattag

SEQ ID NO: 340636 - DNA, 798 bp, Artificial Sequence
  derived and/or modified sequence
atgcccctgcccgtggccctgcagacccggctggccaagcggggcattctcaagcatctcgagcctgaacccgaagaggaaattattgccgaagactatgacgacgatcccgtggattatgaagccacaagattagaaggtctgccaccatcttggtacaaggtcttcgacccatcatgcgggcttccttactattggaacgccgatacagacctagtgtcatggctgagccctcacgaccctaattccgtggtgactaagagtgcaaagaaattgcgatcttcaaacgccgatgcagaagagaagctggaccggagccacgataagtctgaccggggccatgataaatctgaccggagccatgaaaagctggaccggggccacgacaaatccgatcggggccatgacaagtcagaccgcgacagagaacgggggtacgataaagtggatagggagagagaaagagatcgggaacgtgaccgagacagaggctatgacaaagccgatcgcgaagaggggaaagagaggcgacaccacaggagggaagaattagccccttatccaaaatcaaaaaaggctgtcagccggaaggacgaggagttggatcccatggatcccagcagctattcggatgctccgcggggaacttggagtaccgggctcccaaaacgaaatgaggccaagacaggtgctgatacaacagcggctggacccctgtttcagcaacgaccttacccttcacccggcgcagttctgcgagcaaacgccgaggcctcccggactaaacaacaggactag

SEQ ID NO: 340637 - DNA, 798 bp, Artificial Sequence
  derived and/or modified sequence
atgcccctgcccgtggccctgcagacccggctggccaagcggggcatcctgaagcacttggaacccgaacctgaagaagaaatcatcgccgaagattatgatgacgatcccgtagattacgaagccacacgattagaagggctgccccctagttggtataaggttttcgacccgtcttgcgggctcccttactactggaacgcagacaccgatctggtctcgtggctgagtccacacgaccccaactccgtagttactaagagcgccaagaagctccggtcttcaaacgccgacgcggaagaaaagctggacaggagtcacgataaatccgatagagggcatgataagtcagacaggtcccacgagaagctggaccggggccacgacaagagcgacaggggacatgacaagagtgatcgagacagagagagaggctacgacaaggttgacagagagcgtgagcgcgaccgggaacgcgatcgagacagaggttatgacaaggcggacagagaggaggggaaagagagacgacatcataggagagaagagctggccccatacccaaaatcaaaaaaggcagtgagccgaaaagatgaggaactggaccccatggacccttccagttattctgacgctcctagaggtacctggagtacaggcctccctaagcggaatgaagctaagacaggtgccgacacaaccgctgccggtcctcttttccagcaaagaccttaccccagcccaggggcagtgttgcgtgcaaacgcagaagcctctaggaccaagcaacaggattag

SEQ ID NO: 340638 - DNA, 965 bp, Artificial Sequence
  derived and/or modified sequence
agaggaacagggccctggagcacctggtttcggggacagtagggttggtgggagttgcgatgatattgccacctacctcttacatcttttagtctgtctgctatcagctatgccgctgcccgttgcgctgcagacccgcttggccaagagaggcatcctcaaacatctggagcctgaaccagaggaagagatcattgccgaggactatgacgatgatcctgtggactacgaggccaccaggttggagggcctaccaccaagctggtacaaggtgttcgacccttcctgcgggctcccttactactggaatgcagacacagaccttgtatcctggctctccccacatgaccccaactccgtggttaccaaatcggccaagaagctcagaagcagtaatgcagatgctgaagaaaagttggaccggagccatgacaagtcggacaggggccatgacaagtcggaccgcagccatgagaaactagacaggggccacgacaagtcagaccggggccacgacaagtctgacagggatcgagagcgtggctatgacaaggtagacagagagagagagcgagacagggaacgggatcgggaccgcgggtatgacaaggcagaccgggaagagggcaaagaacggcgccaccatcgccgggaggagctggctccctatcccaagagcaagaaggcagtaagccgaaaggatgaagagttagaccccatggaccctagctcatactcagacgccccccggggcacgtggtcaacaggactccccaagcggaatgaggccaagactggcgctgacaccacagcagctgggcccctcttccagcagcggccgtatccatccccaggggctgtgctccgggccaatgcagaggcctcccgaaccaagcagcaggattgaagcttcggcctccctggccctgggttaaaataaaagctttctggtgatcctgcccacc

SEQ ID NO: 340639 - DNA, 1110 bp, Artificial Sequence
  derived and/or modified sequence
agaggaacagggccctggagcacctggtttcggggacagtagggttggtgggagttgcgatgatattgccacctacctcttacatcttttagtgcgtatgttctgtccacccagctactggttcatttgagtagatcggagtcagatgagtacatgtttacgggaggcgcttggttacgggatccagataggaatctttatctgagctgcttgtcagtttgttcgtctgtccctaggtctgtctgctatcagctatgccgctgcccgttgcgctgcagacccgcttggccaagagaggcatcctcaaacatctggagcctgaaccagaggaagagatcattgccgaggactatgacgatgatcctgtggactacgaggccaccaggttggagggcctaccaccaagctggtacaaggtgttcgacccttcctgcgggctcccttactactggaatgcagacacagaccttgtatcctggctctccccacatgaccccaactccgtggttaccaaatcggccaagaagctcagaagcagtaatgcagatgctgaagaaaagttggaccggagccatgacaagtcggacaggggccatgacaagtcggaccgcagccatgagaaactagacaggggccacgacaagtcagaccggggccacgacaagtctgacagggatcgagagcgtggctatgacaaggtagacagagagagagagcgagacagggaacgggatcgggaccgcgggtatgacaaggcagaccgggaagagggcaaagaacggcgccaccatcgccgggaggagctggctccctatcccaagagcaagaaggcagtaagccgaaaggatgaagagttagaccccatggaccctagctcatactcagacgccccccggggcacgtggtcaacaggactccccaagcggaatgaggccaagactggcgctgacaccacagcagctgggcccctcttccagcagcggccgtatccatccccaggggctgtgctccgggccaatgcagaggcctcccgaaccaagcagcaggattgaagcttcggcctccctggccctgggttaaaataaaagctttctggtgatcctgcccacc

SEQ ID NO: 340640 - DNA, 1056 bp, Artificial Sequence
  derived and/or modified sequence
tgcctcctgagcgtagtccagttactttcaggctcggggagtgaaggcctcgttgagagaaggtctcattcggtgttttgggaagagagtcgtgtgggcccaggtatcgtagcggcgacacgagagagacgggcggtgtgacagccttccactacctgcacgagtgtattggtaacgttggggtctgtctgctatcagctatgccgctgcccgttgcgctgcagacccgcttggccaagagaggcatcctcaaacatctggagcctgaaccagaggaagagatcattgccgaggactatgacgatgatcctgtggactacgaggccaccaggttggagggcctaccaccaagctggtacaaggtgttcgacccttcctgcgggctcccttactactggaatgcagacacagaccttgtatcctggctctccccacatgaccccaactccgtggttaccaaatcggccaagaagctcagaagcagtaatgcagatgctgaagaaaagttggaccggagccatgacaagtcggacaggggccatgacaagtcggaccgcagccatgagaaactagacaggggccacgacaagtcagaccggggccacgacaagtctgacagggatcgagagcgtggctatgacaaggtagacagagagagagagcgagacagggaacgggatcgggaccgcgggtatgacaaggcagaccgggaagagggcaaagaacggcgccaccatcgccgggaggagctggctccctatcccaagagcaagaaggcagtaagccgaaaggatgaagagttagaccccatggaccctagctcatactcagacgccccccggggcacgtggtcaacaggactccccaagcggaatgaggccaagactggcgctgacaccacagcagctgggcccctcttccagcagcggccgtatccatccccaggggctgtgctccgggccaatgcagaggcctcccgaaccaagcagcaggattgaagcttcggcctccctggccctgggttaaaataaaagctttctggtgatcctgcccacc

SEQ ID NO: 340641 - DNA, 798 bp, Artificial Sequence
  derived and/or modified sequence
atgcctctaccggtagcgctgcagaccagactggccaagcgaggaattctcaagcatctagaaccagagcctgaggaagaaattatcgcagaggactacgatgatgatcctgtggactacgaggcaacaagactggaaggcctgcccccttcctggtataaagtgttcgaccctagctgcggtctcccctattattggaatgctgacactgatttagtttcctggcttagcccccacgatcccaacagtgtggtaactaagtcagctaagaagctacggagctcaaacgccgacgcagaagagaaattagacaggtctcacgacaaatcggatagaggacatgataagtcagatcgttcacatgaaaagctggatcggggtcacgacaagagcgatcggggtcacgataagagcgatagagatagggaaaggggttatgataaggtggatcgcgagcgagaaagggaccgagagcgggaccgggacaggggttacgataaggctgaccgtgaggaaggaaaggagcggcgtcatcatagaagggaagagttggccccttatccaaagtcaaagaaggccgtatctagaaaagacgaggagctcgatcccatggatccctcatcttactcggatgcccctcgaggtacctggagtaccggattgccgaaacgaaacgaggcgaaaactggcgctgatactacggcagccggacccctctttcagcagaggccttacccctccccgggtgccgtgctccgtgctaatgccgaggcgagtaggaccaagcaacaggattag

SEQ ID NO: 340642 - DNA, 798 bp, Artificial Sequence
  derived and/or modified sequence
atgcccctgcctgtagccttgcagactagactcgctaagagggggattctgaaacacctagagccggagcctgaagaggaaattatcgccgaggactacgacgatgaccccgtcgactacgaggctacacgcctggaggggctccccccatcctggtataaagtctttgatcctagttgtggactgccatactactggaatgctgatactgatctggtgtcgtggctttcccctcacgatcctaactctgtggtgactaaatccgccaagaaactgcgtagcagcaacgccgacgccgaggaaaaactcgatcgaagtcacgataagagcgaccgaggacacgacaaaagcgacagatcccatgagaaattggatcggggacacgacaagagcgatcggggacatgataagtccgatcgcgatagggaacgcggatacgataaagtcgacagggagagggaacgtgacagggaacgggaccgcgatcgaggttatgataaggctgacagggaggaaggaaaggaacggcgtcatcatcgacgagaggagctggcaccgtaccctaagtcaaaaaaagctgtctcacgaaaggacgaagagttagacccaatggatccttcaagctatagtgacgctccaagaggtacatggagcaccgggcttcctaagcgcaacgaggccaagacaggtgcagacactacagccgcaggcccattgtttcagcagcgtccttaccccagccccggtgccgttttgcgcgcaaacgcagaggcaagcagaactaagcagcaggattag

SEQ ID NO: 340643 - DNA, 798 bp, Artificial Sequence
  derived and/or modified sequence
atgcccttgcctgtggcactgcagacgagattagccaaacgcggaattttgaagcatctcgagccagaacccgaggaggagatcattgccgaagattacgacgatgatccggtggactatgaggccacgagattggaaggattacctccatcttggtacaaggtgttcgatccttcgtgtggacttccttactactggaatgccgataccgacttagtgtcctggttaagtccacatgaccctaacagtgtggtcaccaaatccgccaaaaaattgaggagtagtaacgccgacgcggaggagaagctcgaccggagccacgataaaagcgacaggggacacgacaaaagtgacagaagccatgagaagctcgatcgtggccatgataagagcgatcgaggccatgacaaatccgaccgcgaccgcgaaagaggctacgacaaagtggacagggaacgggaaagagaccgagaaagagacagggaccgtggatacgacaaagccgatcgggaggaaggcaaagagaggagacaccacaggcgagaggaactcgccccttaccccaaaagcaaaaaagcagtgtcacgaaaagacgaggagctggatccgatggacccctcgtcctactcagacgcccctcggggaacctggtcaacaggcttacccaaacgcaatgaggctaagaccggggcagataccacagccgcaggcccactctttcaacaacgaccttacccgagccccggagctgttcttagagctaacgccgaagcatcccgcacgaaacagcaggattag

SEQ ID NO: 340644 - DNA, 798 bp, Artificial Sequence
  derived and/or modified sequence
atgccccttccagttgcgctgcagactagactcgccaaaaggggtatattaaaacacctagaacctgagcctgaagaggaaattatcgccgaggactacgacgacgacccggtagactatgaagcgacccgactggaaggcctgcccccttcatggtacaaggtttttgatcctagctgtggcctcccctattactggaacgctgacactgacctggtgtcatggcttagccctcacgaccccaactcagtcgtaactaagtctgcgaagaagctgcgctcctctaatgcagacgccgaagaaaagctggatagaagtcatgacaaatctgatcgcggtcatgacaagtccgacagatcccacgagaagctcgaccgaggacacgacaagtcagaccggggtcatgacaaatctgaccgcgatcgggagaggggatatgacaaggtggaccgcgagcgcgagcgggatcgcgagcgcgacagggataggggatacgataaagccgaccgggaagagggcaaagagcggcgccatcatcgcagagaggagctggccccgtaccctaagtcaaaaaaggcagtttctagaaaagacgaggagttagaccccatggatccttcctcttattcagatgcacctaggggcacctggtccaccggtcttccaaaaaggaatgaagctaaaactggcgccgatactaccgctgctggccccttattccagcagcggccttatccatcacccggcgccgtgttgcgggccaacgcagaagcgagcagaacaaaacagcaggactag

SEQ ID NO: 340645 - DNA, 798 bp, Artificial Sequence
  derived and/or modified sequence
atgcctctgcccgtggccttacagactcggctcgcaaagcgcggcatcctcaaacacctggaaccagaaccagaggaggagataatcgctgaggattacgacgacgatccagttgattacgaggctacccgactcgagggcctgcctccaagttggtacaaggtgttcgatccttcttgcggcctgccctactactggaatgcggataccgatctggtgagttggttgtcaccccatgatcctaatagtgtggtgactaagtctgcaaagaagctcaggagctcgaatgccgacgccgaggagaagctggaccgatcacacgacaaatctgaccggggtcacgataagagcgataggagccatgagaagttggaccgtggccatgacaagtccgacagagggcatgataagagcgacagagatcgagagaggggctatgataaggtggaccgcgagcgcgagcgcgatcgcgagagggatagggacagaggctacgataaagcagatcgcgaggaaggcaaggaaagacggcaccatcgacgagaagagctggccccataccccaagtccaaaaaagcagtgagtcggaaggacgaggagcttgaccctatggatcctagttcctatagcgacgcacctcggggaacatggtcaaccggactgccgaaaaggaacgaggccaaaactggagccgacacaaccgcagcaggtcccctttttcagcagcggccctaccccagccctggagcggtcctcagggccaacgcagaagcttctaggacaaaacagcaggactag

SEQ ID NO: 340646 - DNA, 642 bp, Artificial Sequence
  derived and/or modified sequence
atgccccttcctgttgctctgcagaccaggctggcaaagcgcggaatcctaaagcatttggaacccgagcccgaggaggagatcatcgcggaagactatgatgacgacccagtcgactacgaggccactcggctagaaggattaccgcccagctggtacaaggtgttcgacccctcttgtggcttgccatattattggaacgctgatacggacctcgtctcatggctgtctccacacgacccgaatagcgttgtcacaaagagcgccaagaagcttaggtcatctaacgccgatgctgaagaaaagctggacaggtcccatgataagagcgaccgaggtcacgacaagtcggaccggagtcatgagaaactcgacagaggacacgacaagtccgacagaggccatgacaagtctgacagagatagagaaagagggtatgataaggtagaccgggagcgggagcgtgaccgggaacgggaccgggacaggggttatgataaggctgatagagaggaaggcaaggagcggcggcaccaccgccgcgaggagcttgccccttatcccaaatccaagaaagcagtgtcccgcaaagacgaagagttagacccaatggatcccagctcctactctgacgcaccatag

SEQ ID NO: 340647 - DNA, 798 bp, Artificial Sequence
  derived and/or modified sequence
atgccactcccagtcgccctacagacaaggttagcaaaacgtggcatcctgaaacatttggaacctgagccggaagaagagattatagccgaggattatgatgacgatcccgttgactatgaggctacacgcttggagggtctgccccctagctggtataaggtgttcgatccctcatgtggactcccatactactggaacgcagatacagatctcgtgagttggctgagcccccacgacccaaattccgtagtaaccaaatcagctaaaaaacttaggtcctccaacgcagacgccgaggaaaaactggataggtcacatgacaaatcagatagaggtcatgacaaatcagatcggagccacgaaaaactcgatcggggtcacgacaagagtgatcgcggccatgacaagtcagatcgcgatagggaaagggggtatgacaaggtcgatcgggagagggagcgagacagggaaagagatagagatcgcgggtatgacaaagccgacagagaggaaggaaaagagcgaaggcatcatagaagggaagagctggcaccatatcccaaatccaagaaggccgtgtctaggaaggacgaggagctcgaccccatggatccaagttcttactcagacgcacctaggggaacttggtcaaccggcctccccaagcggaacgaggccaagacgggcgctgacaccacggctgctgggccactatttcaacaacggccatacccatcgcccggggctgtgctgcgagccaatgctgaggcttctaggacaaaacagcaggattag

SEQ ID NO: 340648 - DNA, 798 bp, Artificial Sequence
  derived and/or modified sequence
atgcctctgcctgtggctttacagacgaggctggcgaagagaggcatcttaaagcatttggaacctgagcctgaggaggagattattgcggaggattacgacgatgatcctgtggattacgaggctactcgcctggaaggcctccccccatcttggtataaagtgtttgacccgagctgtggtttgccgtattactggaatgccgacacggatctggtaagctggctatcaccacacgacccaaattctgtagtgacgaagagcgctaagaaacttcggtccagcaacgcggatgcagaggagaaactggaccggagccatgacaaatctgatagagggcatgacaagagcgacaggtctcatgagaagttggaccgcggacacgacaagagcgacaggggccatgacaaaagcgatcgtgatagagaacggggctacgacaaggtcgaccgtgagagagagcgcgaccgcgagagagatcgagacaggggttatgacaaggccgatcgtgaggaaggaaaagagcgccggcatcaccgcagggaggagcttgccccctatccgaagagcaagaaggcagtctctcgtaaggacgaagagctggaccccatggatccaagttcctattccgacgctcctagagggacttggagtacaggcctgccaaaaagaaacgaagccaagacaggtgctgacaccacagcagccggccctcttttccagcaacgaccctatccgtcacctggcgctgtcctccgcgccaacgctgaagcctctcgtaccaaacaacaggactag

SEQ ID NO: 340649 - DNA, 642 bp, Artificial Sequence
  derived and/or modified sequence
atgcccctgcctgtggccctgcagacccggctggccaagaggggcatcctgaagcacctggagcctgagcctgaggaggagatcatcgcagaagattatgatgatgatcctgtggactatgaggccacccggctggagggcctgcccccatcctggtacaaggtgtttgaccccagctgtggcctgccctactactggaatgctgacacagacctggtgtcctggctgagcccccatgaccccaacagcgtggtgaccaagagcgccaagaagctgcggagcagcaatgctgatgctgaggagaagctggacaggagccatgacaagagtgaccggggccatgacaagagtgacaggagccatgagaagctggaccggggccatgacaagagtgaccggggccatgacaagagtgaccgggaccgggagcggggctatgacaaggtggaccgggagcgggagcgggaccgggagcgggaccgggaccggggctatgacaaggctgaccgggaggagggcaaggagcggcggcaccaccggcgggaggagctggccccctaccccaagagcaagaaggctgtgtccaggaaggatgaggagctggaccccatggaccccagcagctacagtgatgccccctag

SEQ ID NO: 340650 - DNA, 798 bp, Artificial Sequence
  derived and/or modified sequence
atgcccctgcccgtggccctgcagacccggctggccaagcggggcatactgaagcacctggagcccgaacctgaggaggaaattatagcggaagattatgatgacgacccggtggactacgaagccactaggctggaaggtctcccaccttcctggtacaaggtgtttgacccctcatgcggtctcccttactattggaatgccgataccgatcttgtcagttggctgagtccacacgaccctaactcagtagttacgaagtctgctaagaaactgcggtcaagcaacgcagacgccgaagagaaactggatcgttctcatgacaaaagcgacagagggcatgacaagtctgaccggtcacacgaaaagctcgacaggggtcacgacaagtcagacagggggcacgacaaaagtgatagagatcgagaacgaggatacgacaaggttgaccgcgagcgcgaacgtgatagagagagggacagagacagaggatatgataaggccgaccgggaagagggcaaggaacggagacaccatcgcagggaggaactggccccttaccccaagtccaagaaggctgtgtcaagaaaggatgaggagttagatcccatggatccaagctcctacagcgatgctccaagaggcacgtggagtaccggattacccaaacggaacgaggctaaaaccggtgctgacacaacagctgccggacccctgttccagcagagaccctacccctccccaggagcagtactgagagcaaatgccgaagctagccgcaccaagcaacaagattag

SEQ ID NO: 340651 - DNA, 798 bp, Artificial Sequence
  derived and/or modified sequence
atgcccctgcccgtggccctgcagacccggctggccaagcggggcattctgaaacacctggagccagaacctgaagaagagataatagccgaagactatgacgacgacccagtggactacgaggctaccaggttagaaggactgccgccttcttggtataaggtgttcgacccgtcatgtggtctgccctattattggaacgcggatacagacctcgtgtcctggttgagcccccacgaccctaactcagtagtcactaaaagcgctaaaaaactgcgatcgagcaatgcagatgctgaagagaaactggataggagccacgacaaaagcgatcgcggacatgacaagtctgaccggtctcacgagaaactcgaccgcggacacgataaatctgatcggggacatgacaaatccgatcgggatcgagaacgaggctatgataaagtagatcgggagagggaacgcgaccgcgagcgggaccgtgaccggggctatgacaaggcggatagggaggaaggaaaagaaagacggcatcacagaagggaggaactggccccctacccgaagtctaaaaaggccgtgtcgcggaaagacgaggaactggacccgatggacccatcaagttactccgacgcaccccgcggcacatggtccactgggttgcctaaaagaaatgaagcaaagaccggagccgacaccaccgcggccggccccttgttccagcagcgtccttacccttcgccgggagcagtgttgagggccaacgcagaggcctcacggaccaagcagcaagactag

SEQ ID NO: 340652 - DNA, 642 bp, Artificial Sequence
  derived and/or modified sequence
atgcccctgcccgtggccctgcagacccggctggccaagcggggcatcctgaagcaccttgagcctgaacctgaggaggaaatcatagcggaggactatgacgatgatccagtcgactacgaagctacacggctggaaggtttgccaccgtcttggtacaaagtctttgatcccagctgcggactgccctattattggaacgccgacacagatctcgtgtcctggctctccccgcatgacccgaatagcgtcgtaactaagtctgcaaaaaaactgaggtcctcaaacgcagatgcagaggagaagttggacagatcacatgataaaagcgatcggggccacgataaaagcgatagatcccacgaaaagctggaccggggccacgataagtcagacaggggacatgataaaagcgatagggaccgggagcgcggctacgacaaagtagatcgggagcgggagcgcgatcgcgagagagaccgagacagagggtacgataaggctgatagagaggagggaaaggagcgcaggcaccaccgcagagaggagctggccccatatcctaaatctaaaaaagctgtttcaagaaaagatgaagaattggatcctatggacccttcaagctattcggacgctccctag

SEQ ID NO: 340653 - DNA, 798 bp, Artificial Sequence
  derived and/or modified sequence
atgcccctgcccgtggccctgcagacccggctggccaagcggggcattctcaagcacctggaaccggaacctgaagaagaaatcattgcagaggattacgacgatgaccccgtggattacgaagccacaagattggaaggcctgccccccagctggtataaggtctttgacccaagctgtgggctcccctactactggaacgcagatacagacctagttagttggctctccccacacgaccctaattcagtggtgaccaaaagcgcaaaaaagctccgtagctccaacgctgacgccgaagaaaagctcgacaggtcccacgacaaaagtgacagagggcacgacaaaagcgaccgttcacacgagaagctagatcgcggacacgacaaatcagatcgaggccacgacaagtccgaccgcgatagggagaggggctacgataaagtcgacagagagagggaacgtgacagagagcgcgacagggatagaggctacgataaggctgatagagaggaggggaaagagaggagacatcataggcgagaagagcttgcgccctatcccaagagcaagaaagctgtgagtcggaaagacgaggaactcgaccctatggacccttcatcttactcggatgccccacgcggaacatggtccacaggcctgccaaagagaaacgaggctaagacaggggcagataccactgcagccggtcctctttttcagcagcggccatatccctcccccggggcagtccttagagctaacgccgaggcttcccgcacgaaacagcaagactag

SEQ ID NO: 340654 - DNA, 798 bp, Artificial Sequence
  derived and/or modified sequence
atgcccctgcccgtggccctgcagacccggctggccaagcggggcattctgaagcatctcgaacctgagccagaagaggagatcatcgctgaagattacgacgatgacccagtggattacgaagcaacacggctagaagggctgcccccatcctggtacaaggtgtttgacccctcctgtggtctgccgtattactggaatgcggacaccgacttggtcagctggttatcaccgcacgaccctaacagtgtagtgaccaagtctgcaaaaaagctcagaagttctaatgcagacgcggaggaaaaactagataggagccacgacaagagtgataggggccatgataaatcagaccgctcacacgagaagctggatcggggacacgataagtcagatagggggcacgacaaatctgaccgggatcgtgagcggggctacgacaaagtcgaccgcgaacgtgagcgcgacagagaaagggatagggacagggggtatgacaaggctgatcgcgaagaggggaaagaacgtcggcatcatagacgtgaggagctcgctccttatccgaaaagcaaaaaggccgtgtctaggaaggatgaagagcttgatccgatggaccctagctcctacagtgatgcccctagagggacttggtccaccgggcttccaaaacgaaacgaggcaaaaacaggcgccgacacaaccgccgctggtccactgttccaacaacgtccctaccccagccctggtgcagtcctccgagccaacgctgaggcctccaggacaaaacagcaggattag

SEQ ID NO: 340655 - DNA, 744 bp, Artificial Sequence
  derived and/or modified sequence
gaacagggccctggagcacctggtttcggggacagtagggttggtgggagttgcgatgatattgccacctacctcttacatcttttagtctgtctgctatcagctatgccgctgcccgttgcgctgcagacccgcttggccaagagaggcatcctcaaacatctggagcctgaaccagaggaagagatcattgccgaggactatgacgatgatcctgtggactacgaggccaccaggttggagggcctaccaccaagctggtacaaggtgttcgacccttcctgcgggctcccttactactggaatgcagacacagaccttgtatcctggctctccccacatgaccccaactccgtggttaccaaatcggccaagaagctcagaagcagtaatgcagatgctgaagaaaagttggaccggagccatgacaagtcggacaggggccatgacaagtcggaccgcagccatgagaaactagacaggggccacgacaagtcagaccggggccacgacaagtctgacagggatcgagagcgtggctatgacaaggtagacagagagagagagcgagacagggaacgggatcgggaccgcgggtatgacaaggcagaccgggaagagggcaaagaacggcgccaccatcgccgggaggagctggctccctatcccaagagcaagaaggcagtaagccgaaaggatgaagagttagaccccatggaccctagctcatactcagacgccccc

SEQ ID NO: 340656 - DNA, 1020 bp, Artificial Sequence
  derived and/or modified sequence
agttactttcaggctcggggagtgaaggcctcgttgagagaaggtctcattcggtgttttgggaagagagtcgtgtgggcccaggtatcgtagcggcgacacgagagagacgggcggtgtgacagccttccactacctgcacgagtgtattggtctgtctgctatcagctatgccgctgcccgttgcgctgcagacccgcttggccaagagaggcatcctcaaacatctggagcctgaaccagaggaagagatcattgccgaggactatgacgatgatcctgtggactacgaggccaccaggttggagggcctaccaccaagctggtacaaggtgttcgacccttcctgcgggctcccttactactggaatgcagacacagaccttgtatcctggctctccccacatgaccccaactccgtggttaccaaatcggccaagaagctcagaagcagtaatgcagatgctgaagaaaagttggaccggagccatgacaagtcggacaggggccatgacaagtcggaccgcagccatgagaaactagacaggggccacgacaagtcagaccggggccacgacaagtctgacagggatcgagagcgtggctatgacaaggtagacagagagagagagcgagacagggaacgggatcgggaccgcgggtatgacaaggcagaccgggaagagggcaaagaacggcgccaccatcgccgggaggagctggctccctatcccaagagcaagaaggcagtaagccgaaaggatgaagagttagaccccatggaccctagctcatactcagacgccccccggggcacgtggtcaacaggactccccaagcggaatgaggccaagactggcgctgacaccacagcagctgggcccctcttccagcagcggccgtatccatccccaggggctgtgctccgggccaatgcagaggcctcccgaaccaagcagcaggattgaagcttcggcctccctggccctgggttaaaataaaagctttctggtgatcctg

SEQ ID NO: 340657 - DNA, 798 bp, Artificial Sequence
  derived and/or modified sequence
atgccactcccagtggcacttcagactcgactggccaagcggggaatcctcaagcacctggagccagaaccagaagaagagataatagccgaggactatgacgacgatccggtagactacgaagccacacggcttgaaggattaccccctagctggtacaaggtcttcgaccccagctgtggactcccgtattactggaatgcagacactgatctggtttcttggttgagcccacacgatccgaatagtgttgtaaccaagtcagcaaagaaactacggagttcaaatgcggacgctgaggagaagctagataggtctcacgataagtctgacagagggcacgacaagtcagataggtcgcatgaaaagctggatcggggtcatgataaaagtgacagaggacacgacaaatcagatcgagacagggaacgaggctacgataaagtagacagggaacgggagagggatcgcgagcgggaccgcgaccggggttacgacaaggcagaccgcgaagaaggaaaagagagacggcaccatagaagggaagaactggccccttacccaaaatccaagaaggcagtgagtagaaaagatgaggaactggatccgatggacccctcttcctacagcgatgctcccaggggcacttggagcaccgggctcccgaaaaggaacgaggccaagactggggcagacactaccgctgccggaccgctctttcaacagcggccatacccaagtccaggcgcagtcttgagagccaatgcggaggcctcaaggacaaagcagcaggactag

SEQ ID NO: 340658 - DNA, 798 bp, Artificial Sequence
  derived and/or modified sequence
atgcctctaccggtcgcacttcaaacccgactcgcaaagcgaggcattctgaaacatttggagcctgagccagaagaggagatcatcgccgaagattacgatgacgacccagtggattatgaggccacaagactggagggcctcccgccaagctggtacaaggtatttgacccgagctgcggcctcccttattattggaacgctgacacagatctggtgagttggttgtctcctcacgaccccaacagcgtagttaccaaatccgccaagaaactgcggtcatccaatgcagatgctgaggaaaaactggataggtcacatgacaaatctgatcggggtcatgacaagtctgacagatcacatgaaaagctggacagagggcacgataagagcgaccgcggacacgacaagagcgatcgggatagagaaagggggtatgacaaagtggacagagagcgggagcgtgaccgcgaacgcgatagagacaggggttacgacaaggccgatcgagaggagggcaaagaacgcagacaccaccggagggaggaactggctccttatccgaagtcgaaaaaagccgtttcacgcaaagacgaggagcttgatcctatggacccaagtagctacagcgatgctcccaggggcacatggtcgactggcctgccaaagaggaatgaggccaaaactggtgcggatactacggcggctggacccctgttccagcaacgcccttatccgtccccgggagccgttcttagagccaacgccgaagcatcccgtactaagcagcaggattag

SEQ ID NO: 340659 - DNA, 642 bp, Artificial Sequence
  derived and/or modified sequence
atgccgctgcccgtagctctgcaaactcgcctcgctaagaggggaattctgaagcaccttgagcctgagccggaggaggagatcattgccgaagactatgatgatgatcccgtggattacgaggccactcggctggaaggccttccgccaagctggtacaaggttttcgacccttcatgcggcctgccatattattggaacgccgacactgacttggtgtcctggctgtccccccatgatcctaattctgtggtgacgaagtcagcgaagaagctgcgcagttccaacgccgatgcagaggagaaactggatagaagccacgataaatcagatcggggacacgacaagagcgatcgcagtcacgaaaagcttgaccggggacacgataagtccgatcgcggacatgataaatctgacagagacagagaaagagggtatgataaggtggatcgcgaaagagagagagacagggagcgtgatcgagacagggggtacgataaagcggaccgagaggaaggcaaagaaaggcggcatcaccgacgggaggagctggctccttaccctaaatctaaaaaagcagtgagccgcaaggacgaagaattggaccccatggatccttctagttactcggatgccccatag

SEQ ID NO: 340660 - DNA, 798 bp, Artificial Sequence
  derived and/or modified sequence
atgcccctgcccgtggcgctgcaaacaaggctcgccaaacgaggcattctgaaacatctcgagcctgagccggaagaagaaatcatagccgaagactatgacgacgaccctgtggactacgaagccacgaggctggaagggctgccccctagctggtataaagtttttgaccccagttgtggattaccatactattggaacgcggatacggatctcgtgtcttggctgtcaccacacgatccaaattccgtggtaactaagtctgccaagaagttacggagcagcaatgccgacgccgaggagaagctggatcggagtcatgacaagtctgatcgcggtcatgacaaatctgatcgctcccacgagaagctcgataggggacatgataagagtgaccggggtcatgataagtccgatcgggaccgggaacgcggatatgataaggttgatcgagagcgagagcgggatagagagagggacagagatcggggatacgataaggcagatagggaggaagggaaggagcgacgacatcatcgacgggaagaattagctccctatcccaagtcaaaaaaagctgttagccggaaggatgaggagttggacccaatggatccaagctcatatagcgacgccccacggggtacgtggtctaccggcctgcctaaaagaaacgaggctaagacgggagccgacacgacggccgctgggcctctctttcaacagcgtccctacccttctccaggcgcagtgctcagggccaacgccgaggcctctcgcactaaacagcaggactag

SEQ ID NO: 340661 - DNA, 798 bp, Artificial Sequence
  derived and/or modified sequence
atgccactgcccgtggcactgcaaactcgcttggcgaaacgtgggatcctaaagcatttagaacccgaaccagaggaagagattattgctgaggactatgacgacgaccccgtggactacgaggccacgagactggaaggtctgccaccaagttggtataaggtttttgacccctcttgcggtcttccctactactggaatgcagatactgacctcgtatcctggttaagcccccatgatccaaattcggtggtaactaaatctgccaaaaaactcagatctagtaacgccgacgctgaagagaagctggatagatctcatgacaaatcagatagaggtcacgacaaaagcgaccgtagtcatgagaagctcgatcgagggcacgacaagagcgaccgtgggcacgacaagagtgatagggacagagaaaggggatacgacaaggttgatcgtgaacgggagcgggaccgcgagagagacagagacaggggctacgataaggcggaccgtgaagaagggaaggagcgcagacaccatcggagggaggagttggccccatatccaaaatcgaagaaggctgtcagccgcaaagacgaggagctggacccaatggaccccagctcttactcagacgcgcctaggggaacttggagcactgggcttccgaaacggaatgaggccaagactggcgctgataccacagctgccggacctttgtttcaacagcgaccctatccatcccccggagcggtgctcagagctaatgcagaggccagccgcacaaaacagcaggattag

SEQ ID NO: 340662 - DNA, 642 bp, Artificial Sequence
  derived and/or modified sequence
atgcccctgcccgtggccctgcagaccagactggccaagagaggcatcctgaagcacctggagcccgagcccgaggaggagatcatcgccgaggactacgacgacgaccccgtggactacgaggccaccagactggagggcctgccccccagctggtacaaggtgttcgaccccagctgcggcctgccctactactggaacgccgacaccgacctggtgagctggctgagcccccacgaccccaacagcgtggtgaccaagagcgccaagaagctgagaagcagcaacgccgacgccgaggagaagctggacagaagccacgacaagagcgacagaggccacgacaagagcgacagaagccacgagaagctggacagaggccacgacaagagcgacagaggccacgacaagagcgacagagacagagagagaggctacgacaaggtggacagagagagagagagagacagagagagagacagagacagaggctacgacaaggccgacagagaggagggcaaggagagaagacaccacagaagagaggagctggccccctaccccaagagcaagaaggccgtgagcagaaaggacgaggagctggaccccatggaccccagcagctacagcgacgccccctag

SEQ ID NO: 340663 - DNA, 912 bp, Artificial Sequence
  derived and/or modified sequence
atgacttggaaatggattgtgggtcccatgtttctctatctgtgcgaacgcctggtccgcttttggcggtcccagcagaaggtggtgatcacaaaggttgttacccacccgtttaagactatcgaactgcagatgaaaaagaaagggttcaagatggaagtaggccagtatatcttcgtgaaatgtcccaaggtgtcaaaattagaatggcatccattcactttaacctctgcacccgaggaggactttttctctatacacatccgcatcgtgggagattggaccgaaggcttgttcaatgcgtgcggatgcgacaagcaggagtttcaggatgcctggaagttgcctaagatagcagtagatggcccgttcggaaccgccagcgaagatgtttttagctacgaggtggtgatgctggtgggagccggcatcggcgttacgccatttgcttctatcctaaagagtgtgtggtacaaatattgtaataacgcaactaacttgaagctgaaaaagatctacttttattggttgtgtcgagatacccacgctttcgagtggttcgccgacctgctgcagctgctggaatcccagatgcaggaacggaataacgcaggattcctgtcctacaatatctatctcaccgggtgggatgaatctcaagccaaccatttcgctgtgcatcacgacgaagagaaggacgtcattactggactgaaacagaaaaccctgtacggaagaccaaactgggataatgagttcaagaccattgcgagccagcacccaaatacccggattggagttttcctctgcggaccagaggcactggccgaaaccctgtccaagcagtctatctccaactctgagtcaggtccccggggggttcactttattttcaacaaagagaacttttag

SEQ ID NO: 340664 - DNA, 912 bp, Artificial Sequence
  derived and/or modified sequence
atgacctggaagtggatcgtgggccccatgttcctgtacctgtgtgagcggctggtgcgcttctggaggagccagcagaaggtggtgatcaccaaggtggtgacccaccccttcaagaccatcgagctgcagatgaagaagaagggcttcaagatggaggtgggccagtacatctttgtgaagtgccccaaggtgtccaagctggagtggcaccccttcaccctgaccagcgcccctgaggaggacttcttcagcatccacatccgcatcgtgggggactggacagagggcctcttcaatgcctgtggctgtgacaagcaggagttccaggatgcctggaagctgcccaagattgctgtggatggccccttcggcacagcctctgaagatgtgttctcctatgaggtggtgatgctggtgggcgccggcatcggcgtgaccccatttgccagcatcctgaagtctgtgtggtacaagtactgcaacaatgccaccaacctgaagctgaagaagatctacttctactggctgtgccgggacacccacgcctttgagtggtttgctgacctgctgcagctgctggagagccagatgcaggagagaaataatgccggcttcctgagctacaacatctacctgaccggctgggatgagagccaggccaaccactttgctgtgcaccatgatgaggagaaggatgtgatcaccggcctgaagcagaagaccctgtatggccggcccaactgggacaatgagttcaagaccatcgccagccagcaccccaacaccagaattggagtcttcctgtgtggccctgaggccctggccgagaccctgagcaagcagagcatcagcaacagcgagagcggcccccggggcgtgcacttcatcttcaacaaggagaacttctag

SEQ ID NO: 340665 - DNA, 912 bp, Artificial Sequence
  derived and/or modified sequence
atgacctggaagtggatcgtgggccccatgttcctgtacctgtgcgaacggctggtccgcttctggcggtcacagcagaaagttgtgatcacaaaagtcgttacccatccatttaagaccattgagctgcaaatgaaaaaaaaggggttcaagatggaggttggccagtacatattcgtcaagtgtccgaaagtatccaagctggaatggcaccctttcactcttacgagcgcacctgaggaggatttcttctctattcacatcagaattgtcggcgattggactgaggggctgtttaacgcttgtggctgcgataaacaggaattccaggatgcctggaaactgcctaagattgctgtcgatggtcctttcgggacagcctccgaggatgtgtttagttacgaagtggtgatgcttgtgggagcaggtattggggtcaccccttttgcgtcaattcttaaatccgtgtggtacaaatattgtaataatgcgacgaacctgaagctaaagaagatatacttctattggttgtgccgcgacacccatgcgttcgagtggtttgcagacctgctccagctgctggagagtcaaatgcaggaaaggaacaacgccggatttttgagttataatatttatctgaccggttgggacgagtcccaggcaaaccattttgccgttcatcatgatgaagagaaagacgtaataaccgggttgaaacaaaagactctctacggccgccctaactgggacaacgagtttaagaccattgcaagtcaacatccaaataccagaattggagtctttctctgtggaccagaggcgttggctgaaaccctgagcaagcaaagtatatctaattccgaatcgggccctcggggggtgcactttatattcaacaaagagaacttttag

SEQ ID NO: 340666 - DNA, 912 bp, Artificial Sequence
  derived and/or modified sequence
atgacttggaagtggattgtgggccctatgtttctgtatctttgcgaacgcctagtgagattctggagatcccagcagaaggtggtgatcaccaaggtggtgacacaccccttcaagacaattgaacttcagatgaagaagaaggggtttaagatggaggtcgggcagtacatttttgtgaagtgccctaaggtgtctaaactggaatggcatccatttacactcaccagcgcacctgaagaagattttttctctatccacatccgtattgtcggcgactggacagaaggcctgttcaatgcctgtggatgcgacaagcaggagtttcaagatgcgtggaaactgcccaaaatcgcggtggatggaccttttgggacagcttcagaggacgtgttctcctacgaggtggtaatgctcgtgggagccggaataggcgtgaccccctttgccagcatccttaagagcgtatggtataagtattgcaataatgcaactaaccttaaactcaagaagatctacttctattggctgtgccgcgatactcacgcattcgagtggttcgccgatctgctccaactgctggagtcacagatgcaggagagaaataatgccggttttttatcatataacatatacctgacgggctgggatgagagccaggctaatcactttgctgttcatcacgatgaagaaaaagatgtcattaccggcctgaaacagaagacattgtatggacggcctaactgggacaacgaatttaagacaatcgccagccagcaccccaacacaaggatcggagtgttcctttgcggtccggaagcactggcagaaactttaagcaaacaaagcatcagtaactcagagtcaggaccacgcggtgttcacttcatcttcaataaagagaacttttag

SEQ ID NO: 340667 - DNA, 1608 bp, Artificial Sequence
  derived and/or modified sequence
caacctctgccaccatggggaactgggctgtgaatgaggggctctccatttttgtcattctggtttggctggggttgaacgtcttcctctttgtctggtattaccgggtttatgatattccacctaagttcttttacacaagaaaacttcttgggtcagcactggcactggccagggcccctgcagcctgcctgaatttcaactgcatgctgattctcttgccagtctgtcgaaatctgctgtccttcctcaggggttccagtgcgtgctgctcaacaagagttcgaagacaactggacaggaatctcacctttcataaaatggtggcatggatgattgcacttcactctgacgaattgtacgtgggcagaccgcagagagtttggctgtgcataatataacagtttgtgaacaaaaaatctcagaatggggaaaaataaaggaatgcccaatccctcagtttgctggaaaccctcctatgacttggaaatggatagtgggtcccatgtttctgtatctctgtgagaggttggtgcggttttggcgatctcaacagaaggtggtcatcaccaaggtggtcactcaccctttcaaaaccatcgagctacagatgaagaagaaggggttcaaaatggaagtgggacaatacatttttgtcaagtgcccaaaggtgtccaagctggagtggcacccttttacactgacatccgcccctgaggaagacttctttagtatccatatccgcatcgttggggactggacagaggggctgttcaatgcttgtggctgtgataagcaggagtttcaagatgcgtggaaactacctaagatagcggttgatgggccctttggcactgccagtgaagatgtgttcagctatgaggtggtgatgttagtgggagcagggattggggtcacacccttcgcatccattctcaagtcagtctggtacaaatattgcaataacgccaccaatctgaagctcaaaaagatctacttctactggctgtgccgggacacacatgcctttgagtggtttgcagatctgctgcaactgctggagagccagatgcaggaaaggaacaatgccggcttcctcagctacaacatctacctcactggctgggatgagtctcaggccaatcactttgctgtgcaccatgatgaggagaaagatgtgatcacaggcctgaaacaaaagactttgtatggacggcccaactgggataatgaattcaagacaattgcaagtcaacaccctaataccagaataggagttttcctctgtggacctgaagccttggctgaaaccctgagtaaacaaagcatctccaactctgagtctggccctcggggagtgcatttcattttcaacaaggaaaacttctaacttgtctcttccatgaggaaataaatgtgggttgtgctgccaaatgctcaaataatgctaattgataatataaataccccctgcttaaaaatggacaaaaagaaactataatgtaatggttttcccttaaaggaatgtcaaagattgtttgatagtgataagttacatttatgtggagctctatggttttgagagcacttttacaaacattatttcat

SEQ ID NO: 340668 - DNA, 912 bp, Artificial Sequence
  derived and/or modified sequence
atgacctggaagtggatcgtgggccccatgttcctgtacctgtgcgagagactggtgagattctggagaagccagcagaaggtggtgatcaccaaggtggtgacccaccccttcaagaccatcgagctgcagatgaagaagaagggcttcaagatggaggtgggccagtacatcttcgtgaagtgccccaaggtgagcaagctggagtggcaccccttcaccctgaccagcgcccccgaggaggacttcttcagcatccacatcagaatcgtgggcgactggaccgagggcctgttcaacgcctgcggctgcgacaagcaggagttccaggacgcctggaagctgcccaagatcgccgtggacggccccttcggcaccgccagcgaggacgtgttcagctacgaggtggtgatgctggtgggcgccggcatcggcgtgacccccttcgccagcatcctgaagagcgtgtggtacaagtactgcaacaacgccaccaacctgaagctgaagaagatctacttctactggctgtgcagagacacccacgccttcgagtggttcgccgacctgctgcagctgctggagagccagatgcaggagagaaacaacgccggcttcctgagctacaacatctacctgaccggctgggacgagagccaggccaaccacttcgccgtgcaccacgacgaggagaaggacgtgatcaccggcctgaagcagaagaccctgtacggcagacccaactgggacaacgagttcaagaccatcgccagccagcaccccaacaccagaatcggcgtgttcctgtgcggccccgaggccctggccgagaccctgagcaagcagagcatcagcaacagcgagagcggccccagaggcgtgcacttcatcttcaacaaggagaacttctag

SEQ ID NO: 340669 - protein, 139 aa, Artificial Sequence
  derived and/or modified sequence
MSHVAVENALGLDQQFAGLDLNSSDNQSGGSTASKGRYIPPHLRNREATKGFYDKDSSGWSSSKDKDAYSSFGSRSDSRGKSSFFSDRGSGSRGRFDDRGRSDYDGIGSRGDRSGYGGFYNSDGYGGNYNSQGVDWWGN

SEQ ID NO: 340670 - protein, 308 aa, Artificial Sequence
  derived and/or modified sequence
MRESRLISDLGGFAGVRSAAGRDWRPFWLGGLRPSRLAQPGFPSGGPGGTRCLRACEQGFAGLDLNSSDNQSGGSTASKGRYIPPHLRNREATKGFYDKDSSGWSSSKDKDAYSSFGSRSDSRGKSSFFSDRGSGSRGRFDDRGRSDYDGIGSRGDRSGFGKFERGGNSRWCDKSDEDDWSKPLPPSERLEQELFSGGNTGINFEKYDDIPVEATGNNCPPHIESFSDVEMGEIIMGNIELTRYTRPTPVQKHAIPIIKEKRDLMACAQTGKWKVWAPQTIPNLLGISTNERVGSTDLRGSQKIFIPI

SEQ ID NO: 340671 - DNA, 420 bp, Artificial Sequence
  derived and/or modified sequence
atgagtcacgtcgcagtggaaaacgctctgggcttggaccaacagttcgcaggtctggacctaaattcttccgataaccagtccggtggcagcactgcatccaagggcagatatatcccccctcacttgcgcaatcgggaagcaaccaagggattctacgataaagactcaagcggatggtcctctagcaaagacaaggacgcatactccagttttgggtccaggagcgactcacgaggcaaaagttccttcttttccgacagggggtctggttctagaggacgtttcgatgatagagggcgtagcgactatgatgggatcgggtcccgcggcgatcgaagtgggtacggaggcttctacaatagtgatggatacggcggcaactataatagtcagggagtcgactggtggggaaattag

SEQ ID NO: 340672 - DNA, 927 bp, Artificial Sequence
  derived and/or modified sequence
atgagggagagtagactgatttccgacttggggggcttcgccggggtgcgtagcgctgccggccgcgattggcggcccttctggttaggcgggcttaggccctcaaggttagctcagcccgggttcccgtccggtggtccaggtgggacacgttgccttagagcttgtgaacaggggttcgcggggttggacctgaattcatcagacaatcagtcagggggctccaccgccagtaagggacgttacatcccgccccatctgcgtaatcgggaagccactaaggggttctacgataaggactcctctggctggtcctcttcgaaggacaaagatgcatattcctcattcggatcaaggtccgacagccggggcaagtcttccttcttctcagataggggcagcggatcaagaggacgcttcgacgacaggggacgctccgactacgatgggatcggctcaagaggtgataggagtggattcgggaagtttgaaagggggggaaacagtcgatggtgcgacaagtctgacgaagacgattggtctaagccactccctccatccgaacggctcgaacaggagctgtttagcggcggaaacaccggcatcaacttcgagaaatacgacgatatcccggtagaagccacaggtaataactgtcctccgcatatcgagtcgttttcagacgtagagatgggtgagatcatcatgggaaatatcgagcttacccggtacacccgacccacccctgtgcagaaacacgccatcccaataataaaggagaagcgagacctcatggcatgtgcacagactggtaagtggaaagtctgggctcctcaaactattcctaacctgcttggcatctcaactaacgagcgcgtaggttctactgacctgcgcggttcacagaaaatcttcatcccaatctag

SEQ ID NO: 340673 - DNA, 420 bp, Artificial Sequence
  derived and/or modified sequence
atgagccacgtggccgtggagaatgccctgggcctggaccagcagtttgctggcctggacctgaacagcagtgacaaccagagcggcggcagcacagccagcaagggccgctacatccccccccacctgaggaaccgggaggccaccaagggcttctatgacaaggacagcagcggctggagcagcagcaaggacaaggatgcctacagcagctttggcagcagaagtgacagccggggcaagagcagcttcttcagtgaccggggcagcggcagccggggccgctttgatgaccggggccgcagtgactatgatggcatcggcagcagaggagacaggagcggctacggcggcttctacaacagtgatggctatggaggcaactacaacagccagggcgtggactggtggggcaactag

SEQ ID NO: 340674 - DNA, 927 bp, Artificial Sequence
  derived and/or modified sequence
atgagggagagccgcctcatcagtgacctgggcggctttgctggggtgcgctctgctgctggccgggactggaggcccttctggctgggcggcctgcggcccagccggctggcccagcccggcttccccagcggcggccctgggggcacccgctgcctgcgggcctgtgagcagggctttgctggcctggacctgaacagcagtgacaaccagagcggcggcagcacagccagcaagggccgctacatccccccccacctgaggaaccgggaggccaccaagggcttctatgacaaggacagcagcggctggagcagcagcaaggacaaggatgcctacagcagctttggcagcagaagtgacagccggggcaagagcagcttcttcagtgaccggggcagcggcagccggggccgctttgatgaccggggccgcagtgactatgatggcatcggcagcagaggagacaggagcggctttgggaagtttgagcggggcggcaacagccgctggtgtgacaagagtgatgaagatgactggagcaagcccctgcccccatctgagcggctggagcaggagctgttcagcggcggcaacacaggcatcaactttgagaagtatgatgacatccctgtggaggccactggaaacaactgccccccccacatcgagagcttcagtgatgtggagatgggagagatcatcatgggcaacatcgagctgacccgctacacccggcccacccctgtgcagaagcacgccatccccatcatcaaggagaagagggacctgatggcctgtgcccagacaggcaagtggaaggtgtgggccccccagaccatccccaacctgctgggcatcagcaccaatgaaagagtgggcagcacagacctgcggggcagccagaagatcttcatccccatctag

SEQ ID NO: 340675 - DNA, 420 bp, Artificial Sequence
  derived and/or modified sequence
atgagccacgtggccgtggagaacgccctgggcctggaccagcagttcgctggcctcgacttgaactctagcgacaatcaatctggcggctccaccgcttccaaagggaggtatatacccccgcacctgcggaacagggaagcgaccaaggggttttacgacaaggacagctccggatggtcctcttcaaaggataaagacgcctattccagctttggaagtaggagtgactcacgaggcaagtccagctttttctcagaccggggctcggggtcccggggtcgcttcgatgacagaggacgctctgactatgacggaatcggctccaggggtgatcggtctggatacgggggcttctacaactcagacggatatggcggaaactataactctcaaggagtggactggtgggggaactag

SEQ ID NO: 340676 - DNA, 927 bp, Artificial Sequence
  derived and/or modified sequence
atgcgggagagccggctgatcagcgacctgggcggcttcgccggcgtgaggagcgcagccggacgcgactggcggccgttctggctcggagggttgcgcccaagtcggctcgcccaacctggatttccctcaggcggccccggaggaacgcggtgtctgcgggcctgcgaacagggcttcgccggcttggatctgaactctagcgataatcagtcaggaggcagtacggcatccaaagggcgctacattccccctcacctgaggaaccgtgaggccacaaagggattttacgacaaagatagttctgggtggagcagttcaaaggacaaggacgcttattcatcttttggatctaggagcgattcccgggggaagtcaagcttcttcagcgaccgtggctcaggaagcaggggcagattcgacgaccgaggtcggtccgactatgacggcattggcagtagaggtgaccggtcaggtttcgggaaatttgaaaggggaggcaattcaagatggtgtgataagagcgatgaggacgactggtctaaaccattaccacctagcgaaaggcttgaacaggaacttttctctggagggaacaccggtattaatttcgagaagtacgatgatattcccgtcgaggccaccggaaataactgtccccctcacatagagtctttctcagacgttgaaatgggcgagataatcatgggtaacatagagttgacgagatacacccggccaacacctgttcagaagcacgcaatcccaattattaaagagaaaagggatctaatggcatgcgcccaaacaggaaagtggaaggtatgggcccctcagaccatccccaatctgttgggaatttctacgaatgagagggttggcagcaccgacctgcgggggtcccagaaaatttttatacctatttag

SEQ ID NO: 340677 - DNA, 420 bp, Artificial Sequence
  derived and/or modified sequence
atgtcacacgtcgcagttgagaatgcattgggcttagatcagcagttcgccggtctggacctgaattcgtctgacaatcaaagcggcggatccacggcttctaaggggaggtacatccccccacatctccgaaatagggaggcaacaaaagggttctacgataaagatagcagcggctggagcagtagcaaagacaaggacgcatacagcagttttggctcaaggtcagatagcagaggaaaatctagttttttttctgaccgcggatcaggctcgcggggacgctttgatgatcggggtagatcagactacgacggaatcggctcaaggggcgatcgttcgggctatgggggattttacaactcagacggctacggcggaaactacaacagccagggagtggactggtggggaaattag

SEQ ID NO: 340678 - DNA, 927 bp, Artificial Sequence
  derived and/or modified sequence
atgcgggagtcacggttgatcagcgaccttggaggattcgcgggtgtccgttctgcagctgggagggactggcgaccattttggctcgggggtctgcgcccatctcgactcgcccagccgggatttccctccggcggtcccggaggtacgcgctgtctgagagcctgcgagcaaggcttcgctggtctggatttgaatagttccgacaaccagtccggtggttctaccgcctctaaaggaaggtacattccaccccacctgcgcaatcgagaggcaacgaagggattttacgacaaggattctagtggctggagctctagcaaggacaaggacgcctattcatcctttgggtctcgcagcgatagtcggggtaagtcctctttcttctctgaccgaggaagtggttctcgtggcaggttcgacgaccgcggaagatctgattacgatgggatcggcagccggggagataggtccggcttcggcaagtttgagagaggaggtaactctcggtggtgcgataaatccgatgaggatgattggtctaaacccctgcctccgagtgaaagactggagcaagaattgttctccggcggaaacaccgggatcaatttcgagaagtatgacgacatacctgtcgaagcaactggcaacaactgtcctccacatattgagtccttctcagatgtggagatgggggaaattatcatggggaacatcgagctgaccaggtatacgcgccctacccctgtgcagaagcacgccattccgatcataaaagagaaacgcgatctcatggcttgcgctcaaacgggcaagtggaaggtatgggcaccccagacaatacctaatctcctaggcatatccaccaatgagcgcgttgggtctaccgacttaaggggttcccagaagatttttatccctatttag

SEQ ID NO: 340679 - DNA, 1051 bp, Artificial Sequence
  derived and/or modified sequence
agagccgcagttctcccgtgagagggccttcgcggtggaacaaacactcgcttagcagcggaagactccgagttctcggtactcttcagggatgagtcatgtggcagtggaaaatgcgctcgggctggaccagcagtttgctggcctagacctgaactcttcagataatcagagtggaggaagtacagccagcaaagggcgctatattcctcctcatttaaggaaccgagaagctactaaaggtttctacgataaagacagttcagggtggagttctagcaaagataaggatgcgtatagcagttttggatctcgtagtgattcaagagggaagtctagcttcttcagtgatcgtggaagtggatcaaggggaaggtttgatgatcgtggacggagtgattacgatggcattggcagccgtggtgacagaagtggctatggaggcttttacaacagtgatggatatggaggaaattataactcccagggggttgactggtggggtaactgagcctgctttgcagtaggtcaccctgccaaacaagctaatatggaaaccacatgtaacttagccagactataccttgtgtagcttcaagaactcgcagtacattaccagctgtgattctccactgaaattttttttttaagggagctcaaggtcacaagaagaaatgaaaggaacaatcagcagccctgttcagaaggtggtttgaagacttcattgctgtagtttggattaactcccctcccgcctacccccatcccaaactgcatttataattttgtgactgaggatcatttgtttgttaatgtactgtgcctttaactttagacaactttttattttgatgtcctgttggctcagtaatgctcaagatatcaattgttttgacaaaataaatttactgaacttgggctaaaatcaaaccttggcacacaggtgtgatacaacttaacaggaatcatcgattcatccataaataatataaggaaaaacttatgcggtagcctgcattagggctttttgatacttgcagattgggggaaa

SEQ ID NO: 340680 - DNA, 420 bp, Artificial Sequence
  derived and/or modified sequence
atgagccacgtggccgtggagaacgccctgggcctggaccagcagttcgccggcctggacctgaacagcagcgacaaccagagcggcggcagcaccgccagcaagggcagatacatccccccccacctgagaaacagagaggccaccaagggcttctacgacaaggacagcagcggctggagcagcagcaaggacaaggacgcctacagcagcttcggcagcagaagcgacagcagaggcaagagcagcttcttcagcgacagaggcagcggcagcagaggcagattcgacgacagaggcagaagcgactacgacggcatcggcagcagaggcgacagaagcggctacggcggcttctacaacagcgacggctacggcggcaactacaacagccagggcgtggactggtggggcaactag

SEQ ID NO: 340681 - DNA, 927 bp, Artificial Sequence
  derived and/or modified sequence
atgagagagagcagactgatcagcgacctgggcggcttcgccggcgtgagaagcgccgccggcagagactggagacccttctggctgggcggcctgagacccagcagactggcccagcccggcttccccagcggcggccccggcggcaccagatgcctgagagcctgcgagcagggcttcgccggcctggacctgaacagcagcgacaaccagagcggcggcagcaccgccagcaagggcagatacatccccccccacctgagaaacagagaggccaccaagggcttctacgacaaggacagcagcggctggagcagcagcaaggacaaggacgcctacagcagcttcggcagcagaagcgacagcagaggcaagagcagcttcttcagcgacagaggcagcggcagcagaggcagattcgacgacagaggcagaagcgactacgacggcatcggcagcagaggcgacagaagcggcttcggcaagttcgagagaggcggcaacagcagatggtgcgacaagagcgacgaggacgactggagcaagcccctgccccccagcgagagactggagcaggagctgttcagcggcggcaacaccggcatcaacttcgagaagtacgacgacatccccgtggaggccaccggcaacaactgccccccccacatcgagagcttcagcgacgtggagatgggcgagatcatcatgggcaacatcgagctgaccagatacaccagacccacccccgtgcagaagcacgccatccccatcatcaaggagaagagagacctgatggcctgcgcccagaccggcaagtggaaggtgtgggccccccagaccatccccaacctgctgggcatcagcaccaacgagagagtgggcagcaccgacctgagaggcagccagaagatcttcatccccatctag

SEQ ID NO: 340682 - protein, 334 aa, Artificial Sequence
  derived and/or modified sequence
MEFPGLGSLGTSEPLPQFVDPALVSSTPESGVFFPSGPEGLDAAASSTAPSTATAAAAALAYYRDAEAYRHSPVFQVYPLLNCMEGIPGGSPYAGWAYGKTGLYPASTVCPTREDSPPQAVEDLDGKGSTSFLETLKTERLSPDLLTLGPALPSSLPVPNSAYGGPDFSSTFFSPTGSPLNSAAYSSPKLRGTLPLPPCEARECVNCGATATPLWRRDRTGHYLCNACGLYHKMNGQNRPLIRPKKRLIVSKRAGTQCTNCQTTTTTLWRRNASGDPVCNACGLYYKLHQHYCGGSAQLMRAQSMASRGGVVSFSSCSQNSGQPKSLGPRHPLA

SEQ ID NO: 340683 - protein, 661 aa, Artificial Sequence
  derived and/or modified sequence
MPANEDAPQPGEHGSACEVSVSFEDVTVDFSREEWQQLDSTQRRLYQDVMLENYSHLLSVGFEVPKPEVIFKLEQGEGPWTLEGEAPHQSCSDGKFGIKPSQRRISGKSTFHSEMEGEDTRDDSLYSILEELWQDAEQIKRCQEKHNKLLSRTTFLNKKILNTEWDYEYKDFGKFVHPSPNLILSQKRPHKRDSFGKSFKHNLDLHIHNKSNAAKNLDKTIGHGQVFTQNSSYSHHENTHTGVKFCERNQCGKVLSLKHSLSQNVKFPIGEKANTCTEFGKIFTQRSHFFAPQKIHTVEKPHELSKCVNVFTQKPLLSIYLRVHRDEKLYICTKCGKAFIQNSELIMHEKTHTREKPYKCNECGKSFFQVSSLLRHQTTHTGEKLFECSECGKGFSLNSALNIHQKIHTGERHHKCSECGKAFTQKSTLRMHQRIHTGERSYICTQCGQAFIQKAHLIAHQRIHTGEKPYECSDCGKSFPSKSQLQMHKRIHTGEKPYICTECGKAFTNRSNLNTHQKSHTGEKSYICAECGKAFTDRSNFNKHQTIHTGEKPYVCADCGRAFIQKSELITHQRIHTTEKPYKCPDCEKSFSKKPHLKVHQRIHTGEKPYICAECGKAFTDRSNFNKHQTIHTGDKPYKCSDCGKGFTQKSVLSMHRNIHT

SEQ ID NO: 340684 - protein, 69 aa, Artificial Sequence
  derived and/or modified sequence
MPANEDAPQPGEHGSACEVSVSFEDVTVDFSREEWQQLDSTQRRLYQDVMLENYSHLLSVGKDNHPVKL

SEQ ID NO: 340685 - protein, 103 aa, Artificial Sequence
  derived and/or modified sequence
MPANEDAPQPGEHGSACEVSVSFEDVTVDFSREEWQQLDSTQRRLYQDVMLENYSHLLSVGFEVPKPEVIFKLEQGEGPWTLEGEAPHQSCSGISTYFVTSTV

SEQ ID NO: 340686 - protein, 122 aa, Artificial Sequence
  derived and/or modified sequence
MPANEDAPQPGEHGSACEVSVSFEDVTVDFSREEWQQLDSTQRRLYQDVMLENYSHLLSVGFEVPKPEVIFKLEQGEGPWTLEGEAPHQSCSDGKFGIKPSQRRISGKSTFHSEMEGEDTLC

SEQ ID NO: 340687 - DNA, 1092 bp, Artificial Sequence
  derived and/or modified sequence
agagatgaaaaactctacatatgtactaaatgtgggaaggccttcatccagaattcagaattaattatgcatgagaaaactcatactagagagaaaccctataaatgcaatgaatgtgggaaatcatttttccaggtgtcatctctactcaggcatcagacaactcatactggagaaaaactctttgaatgcagtgaatgtggtaaaggcttctccctgaactcagccctcaatatacatcagaaaattcacactggagagagacatcacaaatgcagtgagtgtgggaaagcctttacccaaaaatcaacactcaggatgcatcagagaattcatacaggagagaggtcctatatctgtactcaatgtgggcaggccttcatccagaaggcacacttgattgcacatcaaagaattcatactggagagaagccttatgaatgcagtgactgtgggaaatctttcccttctaagtcacaactccagatgcataagagaattcatacaggagagaaaccctatatatgcactgaatgtgggaaggctttcaccaacaggtcaaatctcaatactcaccagaagtctcatactggagaaaagtcttatatatgtgctgaatgtgggaaggccttcaccgacaggtcaaatttcaataaacaccagaccattcacactggagagaaaccctatgtttgtgctgattgtgggagggccttcatccagaagtcagagttgattacacatcagagaattcatactacagagaagccttataaatgtcctgactgtgagaaatccttctccaagaaaccacatctcaaagtacatcaacgaattcacacaggggagaaaccatatatatgtgcagaatgtgggaaagccttcactgataggtcaaatttcaataaacatcagacaattcatactggagataaaccgtataaatgcagcgactgtggaaaggggttcacccagaaatcagttctcagtatgcatcgcaatattcatacatgaaagtaatcctgtttcttgaaaatgagagccttataagctgacaaaagtcaggtctaactatatattataaaatcatcc

SEQ ID NO: 340688 - DNA, 1986 bp, Artificial Sequence
  derived and/or modified sequence
atgcccgccaacgaggacgccccccagcccggcgagcacggcagcgcctgcgaggtgagcgtgagcttcgaggacgtgaccgtggacttcagcagagaggagtggcagcagctggacagcacccagagaagactgtaccaggacgtgatgctggagaactacagccacctgctgagcgtgggcttcgaggtgcccaagcccgaggtgatcttcaagctggagcagggcgagggcccctggaccctggagggcgaggccccccaccagagctgcagcgacggcaagttcggcatcaagcccagccagagaagaatcagcggcaagagcaccttccacagcgagatggagggcgaggacaccagagacgacagcctgtacagcatcctggaggagctgtggcaggacgccgagcagatcaagagatgccaggagaagcacaacaagctgctgagcagaaccaccttcctgaacaagaagatcctgaacaccgagtgggactacgagtacaaggacttcggcaagttcgtgcaccccagccccaacctgatcctgagccagaagagaccccacaagagagacagcttcggcaagagcttcaagcacaacctggacctgcacatccacaacaagagcaacgccgccaagaacctggacaagaccatcggccacggccaggtgttcacccagaacagcagctacagccaccacgagaacacccacaccggcgtgaagttctgcgagagaaaccagtgcggcaaggtgctgagcctgaagcacagcctgagccagaacgtgaagttccccatcggcgagaaggccaacacctgcaccgagttcggcaagatcttcacccagagaagccacttcttcgccccccagaagatccacaccgtggagaagccccacgagctgagcaagtgcgtgaacgtgttcacccagaagcccctgctgagcatctacctgagagtgcacagagacgagaagctgtacatctgcaccaagtgcggcaaggccttcatccagaacagcgagctgatcatgcacgagaagacccacaccagagagaagccctacaagtgcaacgagtgcggcaagagcttcttccaggtgagcagcctgctgagacaccagaccacccacaccggcgagaagctgttcgagtgcagcgagtgcggcaagggcttcagcctgaacagcgccctgaacatccaccagaagatccacaccggcgagagacaccacaagtgcagcgagtgcggcaaggccttcacccagaagagcaccctgagaatgcaccagagaatccacaccggcgagagaagctacatctgcacccagtgcggccaggccttcatccagaaggcccacctgatcgcccaccagagaatccacaccggcgagaagccctacgagtgcagcgactgcggcaagagcttccccagcaagagccagctgcagatgcacaagagaatccacaccggcgagaagccctacatctgcaccgagtgcggcaaggccttcaccaacagaagcaacctgaacacccaccagaagagccacaccggcgagaagagctacatctgcgccgagtgcggcaaggccttcaccgacagaagcaacttcaacaagcaccagaccatccacaccggcgagaagccctacgtgtgcgccgactgcggcagagccttcatccagaagagcgagctgatcacccaccagagaatccacaccaccgagaagccctacaagtgccccgactgcgagaagagcttcagcaagaagccccacctgaaggtgcaccagagaatccacaccggcgagaagccctacatctgcgccgagtgcggcaaggccttcaccgacagaagcaacttcaacaagcaccagaccatccacaccggcgacaagccctacaagtgcagcgactgcggcaagggcttcacccagaagagcgtgctgagcatgcacagaaacatccacacctag

SEQ ID NO: 340689 - DNA, 1986 bp, Artificial Sequence
  derived and/or modified sequence
atgccagcaaacgaggatgctccacagccgggagaacatggctccgcctgtgaagtctctgtaagtttcgaggatgtcacagtggatttttctcgagaggaatggcagcaattggattctacccagcggagactgtatcaggacgtgatgctggagaactattctcaccttctatccgtcggctttgaagtcccaaagcctgaggtgattttcaagttggagcagggcgaaggtccgtggacactggaaggcgaggccccacatcagagctgtagtgacgggaagttcgggataaaacccagccagcggcgcataagcgggaagagtacattccacagtgagatggaaggtgaggatactcgtgatgactccctatactccatcctcgaggaattgtggcaggacgctgagcagatcaaacgatgtcaggagaaacacaataaactcctgagccggacgacttttctgaacaaaaagattctgaacactgaatgggactatgaatacaaggactttggtaagtttgtgcacccctcaccaaatctgatactatcccagaaacggccacataagcgagactctttcgggaaaagctttaagcacaatctggatcttcatatccacaacaagagcaacgcagccaaaaatctagataagactatcggtcacggccaggtgtttactcagaattctagctactcacatcacgagaacacacatactggggtgaagttctgcgaaagaaaccagtgtggtaaggttctctcgctcaagcactctctctcacaaaacgtcaagttccctatcggagaaaaggcaaatacatgcaccgaatttgggaaaatcttcacccaaagaagccacttcttcgcaccccagaaaatccacaccgtggaaaaacctcacgagctttccaagtgtgtgaacgtgttcacccagaagccactcttgtcgatctacctccgcgtccatcgcgacgagaaattatacatatgcaccaagtgcggcaaggccttcatccagaatagtgagcttattatgcatgagaaaacacacactcgagaaaagccttataagtgcaacgaatgcggtaagagtttcttccaagtgtcctccctgcttcgccaccagacaacacacacaggggaaaaactcttcgaatgctcagagtgcggaaaggggttctctctgaactctgcactcaacatacaccaaaagattcacaccggagaacgtcatcacaaatgcagcgaatgtggaaaagctttcacccagaaaagcacattgcgcatgcaccagcggatccatacaggtgaaaggagttacatctgcactcagtgtggtcaggcctttatccagaaggcgcatctcatagcccaccaacgaattcacacgggagaaaagccttatgagtgttctgattgtggtaaatcattcccctcaaagagtcagttgcagatgcacaagcgaatacataccggggagaaaccctacatctgtactgagtgcgggaaggctttcaccaacagatcaaacctcaatacccaccagaaatcacatacaggagaaaagagctatatatgtgccgaatgcggcaaagctttcacagatcgtagcaattttaataagcaccagactattcacacaggtgaaaagccatatgtctgtgcagactgcggaagagcattcattcagaaatcagaactgatcacccaccagcgcattcacaccacagaaaagccttacaaatgcccagactgtgagaagagcttctccaagaaaccacacttaaaggtacatcagcgcattcatactggagaaaaaccatatatttgcgcagaatgtgggaaggcatttaccgaccgcagtaacttcaataagcaccaaacgattcatacaggcgacaagccatacaagtgcagtgattgtggcaaggggtttacacagaagtccgtcctgtccatgcaccggaacatacacacctag

SEQ ID NO: 340690 - DNA, 1986 bp, Artificial Sequence
  derived and/or modified sequence
atgcctgccaatgaagatgccccccagcccggggagcacggcagcgcctgtgaggtgtctgtgtcctttgaagatgtgacagtggacttcagccgggaggagtggcagcagctggacagcacccagaggcggctgtaccaggatgtgatgctggagaactacagccacctgctgtctgtgggctttgaggtgcccaagccagaggtgatcttcaagctggagcagggcgagggcccctggaccctggagggggaggccccccaccagagctgcagtgatggcaagtttggcatcaagcccagccagaggcgcatcagcggcaagagcaccttccacagcgagatggagggggaggacaccagagatgacagcctgtacagcatcctggaggagctgtggcaggatgctgagcagatcaagcgctgccaggagaagcacaacaagctgctgagcaggaccaccttcctgaacaagaagatcctgaacacagagtgggactatgagtacaaggactttgggaagtttgtgcaccccagccccaacctgatcctgagccagaagaggccccacaagagggacagctttgggaagagcttcaagcacaacctggacctgcacatccacaacaagagcaatgctgccaagaacctggacaagaccatcggccacggccaggtgttcacccagaacagcagctacagccaccacgagaacacccacactggagtgaagttctgtgagaggaaccagtgtgggaaggtgctgagcctgaagcacagcctgagccagaatgtgaagttccccatcggggagaaggccaacacctgcacagaatttgggaagatcttcacccagaggagccacttctttgccccccagaagatccacacagtggagaagccccatgagctgagcaaatgtgtgaatgtgttcacccagaagcccctgctgagcatctacctgcgggtgcacagagatgagaagctgtacatctgcaccaagtgtgggaaggccttcatccagaacagcgagctgatcatgcatgagaagacccacacccgggagaagccctacaagtgcaatgaatgtgggaagagcttcttccaggtgagcagcctgctgcggcaccagaccacccacactggagagaagctgtttgaatgttctgaatgtgggaagggcttcagcctgaacagcgccctgaacatccaccagaagatccacactggagagcggcaccacaagtgcagtgaatgtgggaaggccttcacccagaagagcaccctgaggatgcaccagaggatccacactggagagaggagctacatctgcacccagtgtggccaggccttcatccagaaggcccacctgattgcccaccagaggatccacactggagagaagccctatgaatgtagtgactgtgggaagagcttccccagcaagagccagctgcagatgcacaagaggatccacactggagagaagccctacatctgcacagaatgtgggaaggccttcaccaacagaagcaacctgaacacccaccagaagagccacactggagagaagagctacatctgtgccgagtgtgggaaggccttcacagacaggagcaacttcaacaagcaccagaccatccacactggagagaagccctacgtgtgtgccgactgtggccgggccttcatccagaagtctgagctgatcacccaccagaggatccacaccacagagaagccctacaagtgcccagactgtgagaagagcttcagcaagaagccccacctgaaggtgcaccagaggatccacactggagagaagccctacatctgtgccgagtgtgggaaggccttcacagacaggagcaacttcaacaagcaccagaccatccacactggagacaagccctacaagtgcagcgactgtgggaagggcttcacccagaagtctgtgctgtccatgcacaggaacatccacacctag

SEQ ID NO: 340691 - DNA, 1986 bp, Artificial Sequence
  derived and/or modified sequence
atgcccgccaacgaggacgccccccagcccggcgagcacggcagcgcatgtgaggtctcagtgagtttcgaggatgttacggtggacttcagtagggaagagtggcagcagttagactctacgcagagacggctctatcaagacgttatgctcgaaaactacagccacctgctttccgtcggttttgaggtcccgaagcctgaggtgatattcaagctcgaacagggagagggcccatggacgctggagggcgaagctccacaccagagctgtagcgatgggaagtttggcatcaaaccttcacagcgaaggattagtggcaagagcacttttcatagtgagatggaaggcgaagacactcgcgacgactcattgtactctatcctggaggaattgtggcaggacgcggaacaaatcaagagatgccaggaaaaacataacaagctcttaagccggacaacatttttaaataagaagattttgaataccgagtgggactatgaatacaaggattttggcaagtttgtacatccaagccctaatctgatcttgtcccagaagagacctcacaaaagagattcatttggcaagagctttaagcacaatctagacttgcacattcataataaatctaatgctgcgaagaacttggataagaccattggacacggccaggtttttacacagaattcttcctactctcaccacgaaaacacccacaccggcgtgaagttctgcgagaggaatcagtgtggcaaggttctttctctgaagcacagcctgtcacagaacgtgaagtttcccatcggcgagaaggcaaacacctgcaccgagttcggcaagatttttacacagcgttcccacttctttgcaccccagaagatccacactgtggaaaagccacatgagctgtccaagtgcgttaatgtgtttacacagaagcccctgctgtccatctatctcagagttcaccgagatgagaagctgtatatctgtacaaagtgcggcaaggccttcatacaaaacagtgaactgatcatgcacgaaaaaactcacacgcgagaaaagccctacaagtgcaacgagtgcggcaagtctttcttccaagtgagttcgcttctgcgtcaccagaccacccacactggcgaaaagctattcgagtgttccgagtgtggaaagggcttctctctgaactcagccctcaatattcaccaaaagattcacacaggggagaggcaccataaatgctcggagtgtgggaaggcctttacccagaagtcaactctgcgaatgcatcagcgaattcacacaggtgagagaagttacatttgtacacagtgtggacaggcctttatccagaaggcccatctgatagctcaccaacgcatccacacgggggaaaagccttacgaatgttccgactgcgggaagagctttccgagtaagtcccagctgcaaatgcataagaggatccacactggagaaaagccttatatctgcacagagtgcggcaaagcctttacgaacaggtcgaacctaaatacacatcagaaatctcacacaggggagaagagctacatctgtgctgagtgtggaaaggcctttaccgatcgttccaacttcaacaagcaccagaccatccacaccggggagaagccatatgtgtgtgccgactgcgggcgggcttttatccaaaagagcgagctgatcacacaccagcgcatacacacaacagagaagccatacaaatgtcctgactgcgaaaaaagtttttccaaaaaaccccatctgaaagtgcatcaaaggattcacactggggaaaagccttacatctgcgcggagtgtggaaaagcgttcactgacagaagcaattttaataagcaccaaaccatccatacaggtgataagccatacaagtgttcagactgcggaaaggggttcacccagaaaagcgtgttgagtatgcaccgaaacattcatacatag

SEQ ID NO: 340692 - DNA, 1986 bp, Artificial Sequence
  derived and/or modified sequence
atgcctgcgaacgaagacgcgccacagccaggtgagcacggtagcgcctgcgaggtcagtgtgtcttttgaagatgtgactgttgacttttcccgagaggagtggcagcagctggatagcacccagagacgcctttatcaagacgtgatgttagagaattattctcacctcttaagcgtcggattcgaagtgcccaagccggaagtaatcttcaagttagagcagggtgaagggccatggaccctggaaggtgaagccccacaccagagctgtagcgacggcaaattcggaattaagcccagtcagagacgaattagcggaaagtcaacttttcacagcgagatggaaggcgaagacacaagggatgattctctgtacagcatcctggaggagctttggcaggacgccgagcagattaagcgctgtcaggagaaacacaacaaactcttgtcaagaaccacctttctgaacaaaaaaattctgaacacagagtgggactatgaatataaagacttcggcaaattcgtgcacccttccccaaatctgatcctcagccagaaaagaccacacaaaagggactctttcggtaagtcatttaaacacaatctggatttacacattcacaacaaatccaacgctgcgaagaacctggataagacaattggccacggacaagtgttcacccaaaactcctcgtattctcaccatgagaatacccacacaggggtgaagttttgcgagcgcaatcagtgtggaaaggttctgtctctcaagcatagcctttcacagaacgtcaaatttcccatcggggagaaagccaacacctgtacagagttcggtaagatctttacgcagcgatcacatttctttgccccacaaaagatccacacagttgagaaaccccacgaattgtcgaaatgtgtgaacgttttcacacaaaaacccctgctgagcatttacctgagggtccaccgggatgagaaactttatatatgtacaaaatgcggtaaggctttcatccagaattctgaactcatcatgcacgagaagacacacacgcgtgaaaagccgtacaaatgtaatgagtgcggcaagtcgttcttccaggtttcctcactcctgcgccatcagacaacacacacaggggaaaagctttttgagtgctctgaatgtgggaaagggttctctttaaacagtgccttgaatattcatcagaagatacacacgggcgaaagacatcataaatgcagcgaatgtggaaaagccttcacccagaaaagcactctgcgcatgcatcaaaggatccatacgggcgaacggtcttacatttgtacccaatgcgggcaggctttcatacagaaagctcacctgattgcccaccaacgaattcatacaggcgagaagccctacgagtgttcagactgcggcaagagttttccgagcaagtcacaactccagatgcacaagcggattcatactggggaaaagccctacatctgtaccgagtgtggcaaagctttcacaaatcgatccaacctgaatactcaccagaaaagtcacaccggcgagaagagttatatctgtgcagagtgtgggaaagcctttactgatcgctctaactttaataaacaccaaacaatccacacaggagaaaagccttatgtgtgcgctgattgcgggagggccttcatccagaagagcgaactgattacacaccagcgcatccatacgacggagaagccttataagtgccccgactgcgagaagtcattttctaaaaaacctcacttgaaagtgcaccagagaattcacactggggaaaaaccatacatttgcgccgagtgtggtaaggcattcaccgatcgatccaattttaacaagcaccagacaatccatactggcgacaagccttataaatgtagcgactgcggcaagggcttcactcagaaatctgtcctatcaatgcataggaacatccatacctag

SEQ ID NO: 340693 - DNA, 7859 bp, Artificial Sequence
  derived and/or modified sequence
ggaagcggctgcggttctcgccggttctcagccggggtttgatagttgtcaggaggattcgacgttcagtgcccagggatgtggagagttcttggagtctctgcggagtccctgggccagatctcacagtgaaagctgcaggatcttccttctgaccccagcagtccccgttgagtccaccgatcccactggaattataaagttgtcagcaagaaagccccagggctgaagtccaagtccgtcgggaacatgccagctaacgaggacgctccccagccaggggaacatggcagtgcctgtgaggtatcagtgtcatttgaggatgtgactgtggacttcagtagagaggagtggcagcaactggactctactcaaagacgcctgtaccaggatgtaatgttggagaactacagccacctgctctcagtggggttcgaagttcctaaaccagaggtcatcttcaagttggagcaaggagaggggccatggacattggaaggggaagccccacatcagagctgttcagatgggaaatttggaattaagccttcccagaggagaatttctgggaaatctacatttcatagtgaaatggagggtgaagacacaagagatgattcattatactctattttagaagaattgtggcaagatgctgaacagataaagagatgtcaggaaaaacacaacaaacttctgagtcgcactactttcctcaataagaaaatattgaatacagagtgggattatgaatataaagactttggaaaatttgttcatccaagcccaaatctcattctttcacagaaaagaccccataaacgtgattcatttgggaagagttttaagcataatttagacttacatattcataataaaagcaatgcagcaaagaacctggataaaactattgggcatggtcaagtttttacccagaactcttcttatagtcaccacgaaaatacacatacaggagtgaagttctgtgaacgtaatcaatgtggaaaagtcctcagcctcaaacactcactcagtcaaaatgtgaaatttcccattggagagaaagcaaacacatgtactgaatttgggaagatcttcacccagaggtcacatttctttgctcctcaaaaaattcatactgtggaaaaacctcatgagcttagcaaatgtgtaaatgtttttacacagaagccactactcagtatatatctgagagttcatagagatgaaaaactctacatatgtactaaatgtgggaaggccttcatccagaattcagaattaattatgcatgagaaaactcatactagagagaaaccctataaatgcaatgaatgtgggaaatcatttttccaggtgtcatctctactcaggcatcagacaactcatactggagaaaaactctttgaatgcagtgaatgtggtaaaggcttctccctgaactcagccctcaatatacatcagaaaattcacactggagagagacatcacaaatgcagtgagtgtgggaaagcctttacccaaaaatcaacactcaggatgcatcagagaattcatacaggagagaggtcctatatctgtactcaatgtgggcaggccttcatccagaaggcacacttgattgcacatcaaagaattcatactggagagaagccttatgaatgcagtgactgtgggaaatctttcccttctaagtcacaactccagatgcataagagaattcatacaggagagaaaccctatatatgcactgaatgtgggaaggctttcaccaacaggtcaaatctcaatactcaccagaagtctcatactggagaaaagtcttatatatgtgctgaatgtgggaaggccttcaccgacaggtcaaatttcaataaacaccagaccattcacactggagagaaaccctatgtttgtgctgattgtgggagggccttcatccagaagtcagagttgattacacatcagagaattcatactacagagaagccttataaatgtcctgactgtgagaaatccttctccaagaaaccacatctcaaagtacatcaacgaattcacacaggggagaaaccatatatatgtgcagaatgtgggaaagccttcactgataggtcaaatttcaataaacatcagacaattcatactggagataaaccgtataaatgcagcgactgtggaaaggggttcacccagaaatcagttctcagtatgcatcgcaatattcatacatgaaagtaatcctgtttcttgaaaatgagagccttataaggctgacaaaagtcaggtctaactatatattataaaattcatccaagacagatcctatatgaatacattgtataaggaaaagcatcaggctatctcacttgagatggaaaaaaattattcagaagaaactctcttaaaaatgcattgaaggagagagaatttgcacagcctcatgaaatatagtaaaagtcatactgggaaaaatgttgtcagtttggtgtgttaggaaaagccttcctatagaaagtattataagttaaattgttaccaaattctttataggaaggagagtgcaaaattatgtaaatgatggtcaggtttactgtgttatattaagcaatttaaagtgataacaaaatgaaaggtagtgcagcaaaataatataactggtgagtagacctactttcagttccatagggtgtttgtggcagaacacagtgcagaacaggaggaatattacattttttttcaaatttagaataattatgtccatcaaatgtttcttactgaatatgtctatcaaatatgtttcttattgaatatttctatcaagtgaatccacaatttaaaagtcactttggttttatatatacacacatctgcagatataattttataagaacacacaaatataatcctgtcattcgtactggtttccatgacatagtatcttgttttctttcattgtggtacaatgcaaagtagccacagattcctcccatcccaagtagcgtctctttgtctactacttgactttgaacttggccacgtgactttctttggccaatggaaattagcaaagagaatcaataagaagcttgagaagtgtgcaaagcctgccttgaagcttaccctctcttgctgctctttgcaaacctgaagaatctcaaattgccctactcgggggtgaggagccaccacatggagcagtggtgagccagccttgctgaggccccttagaccaagtagcctgccaattgtcagaattgggagtgaggttttccaagacctctagccccagctgagccagcctagcccagaagagccataccagttattccagctgatttacagaattgtgagataaataaaatgatgatagttttaagcaacatgagttttggggttagtttgttgtacagaaaatgctaagtaatatttgaaagtatatgtttgggggagggggcatagtggaccaaaacgtgacaagtggcattggctttgggtctgagtggcacgtagaaactggaaaaacagtgaggaaaactgtttttcctcaaataacaaaggttggatagttggcaacccatgttatttagtagggaaagatacagaaaaacagtcatcaccatactctgtgggaagatagagaatggaccaaacgaactggtggatctggctaaggagatttgcagcagaatatgggaagtatcagtttgcttcttttagctgcatatgatacgatacagaaagagagaaatgaactaaagaaataactgtttctttggcaagcagaattcagaagaaatatggaaaagccaaggattgctgggttgaaaaataatgctttcacatcactagtctctccagctatctaactattcgcaaggtaaaaaatggcctcagggtaaagatcaaatcatggttgtgtctgtaagactctttattacagtgtgtgaaatagttcagttggtgcttaggagaccatctcagctaaacttaagggcttctaaaaatcttcatgacgttgtcccatagaagcctgacatactactcaaagtggagagagacctatcttaaaaagaattgctgatgtggcatttggggaaaggagtagatccaaaccagattcataggaaactcacaaagtttttaatagagttttactagtaaaactacctccaggttggacttccagggactgaaacagttcaaaatgaaaagtggcctctggattcccctccctaacttctatgaataggatacaagctgagaaagttactcagatgcaaacacggtccatttcttatggaaaatgaagggcatctcagagggaagacccaagaacaatatattaaaatgagctggggagccgttcccagggagaactgtgccctaatcaagaaacgtatctgcccctggagccaagggaaccgacaacatttgctctgtgggatttcagaatcgttatggaacagtgactgatatgtgcctcatggtcctcctctttttgaatgggagtgtctattacagttatcctgtacctatcccaccattgtatatattgggtgtatgttggggggcatgtaacttgtcatttagctcacaggtatctggatcaagaaactgaaaaactgtacccaaggaacctcagccacacctgaacctgatacagaagacttgagattctggattggagcttgatgccacaattttggatgagaaatttggaggtcctggaataggggtgaacacattttgcatggggtggtaatgtgaatactttgtgaccagaagacacactgtgttaggtagaaaaatgctacagatgtcttcatccctgtatatgtgtccttcttcagtctttatttctctttgtgtttcagttaggataatttctattgatctgtcttcaaattcactgatgttttttctctcaccctggctttgtcaagtctactgctgaacccattgaaggcattcttcaactcagttatgttttatttttatttgtaatatttccatttgattcttacaattttcatatatctgctgaaattccccatcttttcatgcatgttcatgttttcccctttaccctttgtcttagtcagtttgagctgctataataaagcaccatagacttggtggcttataaacaacagaaatttattcctcacagttctggagcctggaagtctgagatcagaatctagcaaggttaggtcttggtgacggccctcttcaaggttgcaaactgctcacttcttgcattttcccatgtctacagctagagaactctttgggatcccttttataagggcaccaatcccattcatgagttctccacccacattacctaactaccacccaaaggctccacctcctaataccatcacattgaggattaggattttaacatatgaattttgggggggatgcaatcattcagcccataataccctctaacatattaatcatagttatttttaactccctgtctgatagttccaactactaggtcaactgagtctaggtctgttgttgtcttctcttgctcttttgcatctaataatttttggctgaatgtcacagatgttgtatgtaggacagtagaaactgaggtaaatagtaattattcctggaaacagccatggttgcccttttgataggccattagcatggggagattgaatccatctaatcaggagttgggctgagtttgtgtttctttgttgccagtgttacctttgctgtaccatagacttaaaattcctctattgttatcttatgcttgaggtaggcactggtttgcccagagaatttttatttttcccagaccacacttgcctttaggcctgtaggcctttcctgtgtgcctgcatctcagggagggtctctctccatgttgttgcctctatgttagtagtagacaactgttattacttggttcttgctgacctggtgagttggggggcaggggttgtcttgggccagcctcagtttttgtcaggccatgaatccctgggtcttgagggtgggattttttagtgatcctgccctcttccactggtagaaggcctttaatgatctgggcccaggatgatttcctgcccttttatcatgggtggaatttttttttccatttccctcactctagtcacagtgaatctttaactgtgtcctgagggcaacagggtttgctgcacttcttttagtggcttaaggattttgttctgtaggggagtagggtttcattggagctttgtgccatttctatgttaacagcagcccccttgcaggcctaccccatggaggtaggctttctccagtcttcttccttgtccccgtgtttcttgagagcactcagtggatgactatggagaagagcctgcaagcagagaccaactacccttaggtctacagctctcatgagtctcccgcactcagcctttagcaattcattaaaaattcttgttgaattcttactgcttgtatagtggcctcatcttccttcctgctgtaccacagatggcccaggagaggcacttgtcttttattatatttcaagctagttggttgctctgtaatcttagctctctgatgggttcgagaaaacttatgtttttgcagattacccagctttgttcttgttataaagatgggagcagtgttctttccagatgtctacatgctaggcagaaactagaagtctggacagtctccatggtctcctactatcagaatatgtgcccttttcagtgtgactttgccacttcacccatcaagaggtagaatctatttcttcaacccctgcaactgagcttggctattttgttggccaatgggacattaacaagtatgatacaagcagaggcttgagaagtgcctgcacaatgaggcttgcccacttttgcagctctttggaatcctgaacccatgtgtggaaaagcctgaactgtgctgttggaaaatgagagcgatcacatggagcagtaatggagcaaagaccagccatcccagttgagataccctacaccaaccagattttcaactgctggacatatgaatgaagctatcctaggcatgcagtcttggtcaaggcaactttggctggcagtctctgagatgaccctgaatgatccccacctcctggtattctcactcttatataatcccctcctcttgagtttggactggaattagtgacttggttctagtgaatagaatgaggcagaggtaatgggatgtcatgttcaagattggttacaaaaagactgtggcttccattttgggtgcttgcttactctctcagatggctcatcataggggaaacctgctgctacatcatgagatagccctgtggaaaggtccacatgagtgaactttgaagcatatcctcccccagtttagcctttagatgaggaccacagccaaatagcttgactgtaagccagatagcttgactcatgagggaccttcagccagaggcatcttttgagccatacgaattcctgacccatagaaactgcaagacaataaatgttgttttaagttgctaaattttagggtaatttgttacacagtaataggttaataatacactggcccagattaggaaggttctgccatccatcccagccatcccaaacaactaccagaataatggattaaaacgttaactgttttaagtcactaagttttgggcagcatgataacaacccagcaaaaagctaactgatacattgattatttattgcatttcttcctccactattcttctctaacagatgaccaatactaataaactactgtgaacactttcatgttttaatctctgctctgtgctcataatcatatatagacat

SEQ ID NO: 340694 - DNA, 210 bp, Artificial Sequence
  derived and/or modified sequence
atgcccgccaacgaggacgccccccagcccggcgagcacggcagcgcctgcgaggtgagcgtgagcttcgaggacgtgaccgtggacttcagcagagaggagtggcagcagctggacagcacccagagaagactgtaccaggacgtgatgctggagaactacagccacctgctgagcgtgggcaaggacaaccaccccgtgaagctgtag

SEQ ID NO: 340695 - DNA, 312 bp, Artificial Sequence
  derived and/or modified sequence
atgcccgccaacgaggacgccccccagcccggcgagcacggcagcgcctgcgaggtgagcgtgagcttcgaggacgtgaccgtggacttcagcagagaggagtggcagcagctggacagcacccagagaagactgtaccaggacgtgatgctggagaactacagccacctgctgagcgtgggcttcgaggtgcccaagcccgaggtgatcttcaagctggagcagggcgagggcccctggaccctggagggcgaggccccccaccagagctgcagcggcatcagcacctacttcgtgaccagcaccgtgtag

SEQ ID NO: 340696 - DNA, 369 bp, Artificial Sequence
  derived and/or modified sequence
atgcccgccaacgaggacgccccccagcccggcgagcacggcagcgcctgcgaggtgagcgtgagcttcgaggacgtgaccgtggacttcagcagagaggagtggcagcagctggacagcacccagagaagactgtaccaggacgtgatgctggagaactacagccacctgctgagcgtgggcttcgaggtgcccaagcccgaggtgatcttcaagctggagcagggcgagggcccctggaccctggagggcgaggccccccaccagagctgcagcgacggcaagttcggcatcaagcccagccagagaagaatcagcggcaagagcaccttccacagcgagatggagggcgaggacaccctgtgctag

SEQ ID NO: 340697 - DNA, 210 bp, Artificial Sequence
  derived and/or modified sequence
atgccagctaatgaggacgctccccaacccggcgagcatggcagcgcctgcgaagtttcagtttcattcgaggacgtaacagtcgattttagccgagaagagtggcagcagctggattctacacagcgaaggctataccaggacgttatgctcgaaaactacagccatctgctatctgtcggcaaggacaaccaccccgtgaaactgtag

SEQ ID NO: 340698 - DNA, 1986 bp, Artificial Sequence
  derived and/or modified sequence
atgcccgctaatgaggacgcgccacagcccggggaacatgggtctgcatgtgaggtgtctgtgagtttcgaggacgtgaccgtggactttagtagggaagaatggcagcagttggactctactcagcggcggttgtaccaagatgtgatgctcgagaactattcccacctcctttctgtcggctttgaagtacccaagccagaagtcatatttaagctggaacaaggagagggaccctggaccctcgagggcgaggccccccatcagagttgctctgacggaaaatttgggatcaagccttcccagcgtcgcatctctggaaagagcactttccactctgagatggagggtgaggacacaagagacgatagcctgtactcgattctggaggagctttggcaggatgcagagcagataaagagatgtcaggaaaagcacaacaagctcctgtcccgcaccaccttcctcaataaaaagattttgaatacagagtgggactatgaatacaaagacttcggcaaatttgtccacccatctcccaaccttatcctgtcccagaagagaccccacaaacgggatagttttggaaaaagctttaaacataatcttgacctgcacatccataacaaaagcaacgccgccaagaatctggacaaaacaattgggcatgggcaggtgttcacacaaaattcaagttacagccaccatgagaacacccacacgggggttaagttttgcgagcgcaaccagtgtggcaaggtgctgtctctcaaacacagcctgagccaaaatgttaaatttcccatcggggagaaagccaacacctgcacagaatttgggaaaatctttacacagcgctcccacttcttcgcgccccagaaaatccatactgtggaaaagccccacgaactctccaaatgtgttaacgtgttcacccagaaacctctattgagtatctacctgcgcgtccacagggacgagaaactatacatatgcacaaagtgtgggaaagctttcattcagaatagcgagctcattatgcatgaaaagacgcacactagagagaagccatataagtgtaacgagtgcggaaaatcattttttcaggtgtcctccctcctgcggcaccagactacccacaccggtgaaaaactgttcgagtgctcggaatgcggcaagggcttttctcttaacagtgccctgaacattcaccagaagattcacactggggagagacaccataaatgctcagaatgcgggaaggcgttcacgcagaagagtacactccgcatgcaccaaaggatccatacaggggaacggtcgtacatctgcacacagtgcggccaggccttcatccaaaaggcacatctgatcgcccatcagcgtatccacaccggagagaaaccctacgagtgttctgattgtgggaaatccttcccaagcaagagccagctgcaaatgcataaacggatacacactggagaaaaaccttatatctgcacagagtgcggcaaagcattcacaaaccggagcaatctcaacacccaccaaaagagccacaccggagagaagagctacatttgtgccgaatgtggcaaggcctttaccgatcgaagtaactttaacaagcaccaaactatacataccggagagaaaccatatgtttgcgctgattgtggtcgcgccttcatacagaagagcgagctgatcacccatcagcgcattcataccactgagaagccttacaaatgtccagattgcgagaagtccttctccaaaaagcctcatctcaaggtacatcagcgaatacacaccggagaaaagccctacatctgcgctgaatgcgggaaggcgttcacagatcgctccaacttcaacaaacaccagacaatacatacaggtgacaagccctacaaatgctctgattgtggcaaaggcttcacccaaaagtcagtgctttccatgcaccggaacatccacacctag

SEQ ID NO: 340699 - DNA, 312 bp, Artificial Sequence
  derived and/or modified sequence
atgccagccaatgaagacgcccctcaacccggggagcatggctccgcgtgcgaagtctcagtgtcttttgaggacgttaccgttgacttctcacgcgaggagtggcagcagttggattccacacaacgacggctctaccaggatgttatgctggaaaattactcccacctcttgtctgtcggattcgaagtccctaagcccgaagtgatattcaagctggagcaaggcgaaggaccgtggaccttagagggtgaagcaccccaccagagttgctccggaatctcaacctatttcgtgactagcactgtgtag

SEQ ID NO: 340700 - DNA, 1986 bp, Artificial Sequence
  derived and/or modified sequence
atgcccgcaaacgaagacgccccccagcccggggagcacggctctgcgtgtgaagttagcgtgtcttttgaggacgtgactgtagacttttcgagggaagagtggcagcagcttgactccacacagcgccggctgtatcaagatgtcatgctcgagaattatagtcacctcctctctgtgggattcgaggtccctaagcctgaggtgatcttcaagctagagcagggcgaaggtccatggactctagagggagaggcaccacatcaaagctgcagtgacggtaagttcgggattaaacccagccaacggaggatctcaggcaaaagtacgtttcatagcgaaatggaaggagaggatacccgggacgactcactttacagtattcttgaagagctctggcaggatgccgagcagattaaacgatgccaggaaaagcacaacaagctgttgagccggactaccttcctgaataaaaaaattctgaataccgagtgggactacgagtacaaggactttggtaagttcgtccacccctcccctaacctgattctgagccagaagaggccacacaagcgcgatagctttggaaagagcttcaagcacaatcttgacctgcacatccacaataaatccaatgcagctaaaaacttagataaaacaataggtcatgggcaagtgtttacccagaactccagttactctcaccacgagaatactcacacaggggtgaagttctgcgagcggaatcagtgcggcaaagtgttgtccctcaagcattcgttatctcagaatgtgaagtttcccatcggtgaaaaagctaatacttgcactgagtttgggaagatattcacccaacgatcacacttcttcgcgcctcagaagatccatactgttgagaaacctcacgagttatcaaagtgcgttaacgtcttcactcagaaacctctgctatccatttacctacgggtccacagagacgagaagctgtatatatgtaccaagtgcggcaaggcctttatccaaaactctgaactgataatgcatgagaaaacccacactagagaaaaaccatacaagtgcaacgagtgcggaaaatcttttttccaggtgtcatcactgttacgccatcaaactacccacacaggggaaaagctttttgaatgcagtgagtgcggtaaagggttttctcttaattcggcactcaatattcaccagaaaatccacaccggcgaaaggcaccataaatgttctgagtgtggcaaggcctttacacagaaaagcactctacgaatgcatcagcggatacacaccggcgagcgatcatacatttgtacacaatgcggtcaagcattcattcagaaggcacacctgattgctcaccaacggattcacactggtgaaaagccgtacgagtgttccgattgtggcaaaagtttcccctcgaagtctcaattgcagatgcacaagcgcatacataccggcgagaagccctacatctgtactgaatgcgggaaggccttcacaaatagatcgaatcttaacacccaccagaaatcgcacacgggcgagaagtcttacatctgtgctgagtgcggcaaggcctttacagatagatctaactttaacaaacatcagacaattcacacaggagagaaaccttatgtatgcgcagattgtggaagagcctttattcagaagtctgagttaatcacccatcagcgaattcacactacagagaagccgtataaatgccctgactgcgagaagagtttcagcaaaaagcctcaccttaaagtgcatcaacggatccacactggagaaaaaccctacatttgcgccgagtgcgggaaggccttcactgaccggtccaactttaacaagcaccaaacaattcatactggcgacaagccatataaatgtagcgactgtggtaaagggttcacccaaaaaagtgtgctgtctatgcataggaatattcacacctag

SEQ ID NO: 340701 - DNA, 369 bp, Artificial Sequence
  derived and/or modified sequence
atgcctgctaatgaagatgcacctcagccaggagaacatggaagcgcttgcgaggtctccgtttcattcgaggacgtgacggtggattttagtcgggaagagtggcagcagctggattctactcagcgcagactctaccaagatgtcatgttggaaaactattcgcacctcttatctgtgggctttgaggtgcccaaaccagaggtgatcttcaagcttgagcagggtgagggcccatggactctcgagggcgaggcaccgcaccagagttgttccgacggaaagtttggaatcaaaccatctcaacgcagaattagcggtaagagcacatttcacagcgagatggaaggggaagataccctgtgttag

SEQ ID NO: 340702 - DNA, 210 bp, Artificial Sequence
  derived and/or modified sequence
atgcctgccaatgaagatgccccccagcccggggagcacggcagcgcctgtgaggtgtctgtgtcctttgaagatgtgacagtggacttcagccgggaggagtggcagcagctggacagcacccagaggcggctgtaccaggatgtgatgctggagaactacagccacctgctgtctgtgggcaaggacaaccaccctgtgaagctgtag

SEQ ID NO: 340703 - DNA, 312 bp, Artificial Sequence
  derived and/or modified sequence
atgcctgccaatgaagatgccccccagcccggggagcacggcagcgcctgtgaggtgtctgtgtcctttgaagatgtgacagtggacttcagccgggaggagtggcagcagctggacagcacccagaggcggctgtaccaggatgtgatgctggagaactacagccacctgctgtctgtgggctttgaggtgcccaagccagaggtgatcttcaagctggagcagggcgagggcccctggaccctggagggggaggccccccaccagagctgcagcggcatcagcacctactttgtgaccagcacagtgtag

SEQ ID NO: 340704 - DNA, 369 bp, Artificial Sequence
  derived and/or modified sequence
atgcctgccaatgaagatgccccccagcccggggagcacggcagcgcctgtgaggtgtctgtgtcctttgaagatgtgacagtggacttcagccgggaggagtggcagcagctggacagcacccagaggcggctgtaccaggatgtgatgctggagaactacagccacctgctgtctgtgggctttgaggtgcccaagccagaggtgatcttcaagctggagcagggcgagggcccctggaccctggagggggaggccccccaccagagctgcagtgatggcaagtttggcatcaagcccagccagaggcgcatcagcggcaagagcaccttccacagcgagatggagggggaggacaccctgtgctag

SEQ ID NO: 340705 - DNA, 210 bp, Artificial Sequence
  derived and/or modified sequence
atgcccgccaacgaggacgccccccagcccggcgagcacggcagcgcgtgcgaagtttcagtgtcgtttgaggatgttacagtcgatttttctcgcgaggagtggcagcagctcgactccacgcaacgtcgcctgtatcaggacgttatgctcgagaactactcgcaccttctctctgtcggcaaagataaccatccagtcaagctgtag

SEQ ID NO: 340706 - DNA, 1986 bp, Artificial Sequence
  derived and/or modified sequence
atgcccgccaacgaggacgccccccagcccggcgagcacggcagcgcttgcgaagtgtccgtcagctttgaagacgtcactgtggatttttcacgtgaggaatggcagcagctcgactcaacacagaggcggctgtaccaagacgtcatgctggagaattacagccatctgctgagcgtagggttcgaggtgccaaagccggaagtaatcttcaaactcgagcaaggcgaaggcccttggactctggaaggggaggcgcctcaccagtcttgctccgacgggaaattcggaatcaaacctagccagagaaggatctctggcaaatcaaccttccattccgagatggagggcgaagacacccgggacgactccctgtattcaatcctggaagaactgtggcaggacgctgagcagatcaagcggtgtcaagaaaaacacaacaaactgctcagccggaccaccttccttaataagaaaatccttaataccgagtgggattacgaatataaggacttcggaaagttcgtgcatccttctcctaacttaattctgtcacaaaagcgtccgcacaaacgggattcctttgggaaaagtttcaaacacaatttggacctgcacattcacaataaatcaaatgcagctaaaaatctcgacaaaacaatcggacatggccaggtctttactcagaacagtagttacagccatcacgaaaacacccatactggagtgaaattttgtgagaggaatcagtgcggtaaggttctgtctctgaagcactcattgagccaaaacgtgaaatttcccattggggagaaggcgaatacctgcacggaattcggtaagatcttcacccagagaagccactttttcgcgcctcagaagatccatacggtggagaagccacacgaactgagcaaatgtgtgaatgtgttcacccaaaaacctctgctctcaatctacctgagagtgcatagggatgaaaagctctatatatgtaccaaatgcggtaaggccttcattcagaattcagagctgataatgcacgaaaagacgcacactagggagaagccatataagtgtaacgagtgtggaaagtctttcttccaggtgtcatccctgctgcgtcaccagactacacacacaggcgagaagctctttgagtgctccgagtgtggaaaggggttctcactaaactccgcactgaacatccatcagaagatccataccggggagcggcaccacaagtgctcggagtgtggaaaggcgttcacacagaaaagcactctgcgaatgcaccagaggatccatacgggggaaaggagctacatatgtacccagtgtggtcaggccttcattcagaaagcacaccttatcgctcatcagcgtattcatacaggcgagaagccatatgaatgttccgactgtggaaagagctttccgagcaagtcccagctccaaatgcacaagcgaatccacactggggagaaaccttacatatgcacggaatgtgggaaggcctttacgaatcgatcaaacctgaatacccatcagaagtcccataccggtgaaaagtcttatatctgtgctgagtgtggcaaggcctttaccgaccgctctaatttcaacaagcatcagaccatacacactggggagaagccctatgtgtgcgccgattgcggcagagcttttattcagaagagtgaactcataacacatcaacgtatccacactacagagaaaccctacaagtgcccagattgcgagaagagcttttccaagaagccccacctgaaagtgcaccagcgcatacacaccggggagaagccgtatatctgcgcagaatgtgggaaggccttcaccgatcggtctaattttaacaaacaccaaaccatccatactggcgataagccatacaaatgctctgattgcggtaaaggcttcacccagaaatctgtgctgagcatgcacaggaacatacatacctag

SEQ ID NO: 340707 - DNA, 312 bp, Artificial Sequence
  derived and/or modified sequence
atgcccgccaacgaggacgccccccagcccggcgagcacggcagcgcctgtgaggtctccgtgtctttcgaagacgttactgtggacttctctcgcgaagaatggcagcagctcgattctacacagcggcggctctatcaggatgtcatgctggagaattacagtcatttgttgtcagtgggattcgaggtgcccaagccagaagttatcttcaaactggagcaaggagaaggcccctggaccttggagggcgaggctcctcatcagagctgtagtgggatttcaacctacttcgtgacctcaaccgtctag

SEQ ID NO: 340708 - DNA, 1986 bp, Artificial Sequence
  derived and/or modified sequence
atgcccgccaacgaggacgccccccagcccggcgagcacggcagcgcttgcgaagtttcagtcagtttcgaggacgtgactgtggacttctccagggaggagtggcaacagcttgacagtacccagcggcgactttatcaggatgtgatgctggaaaattattctcatctgctttcagtcggtttcgaagtccctaagccggaggtgatttttaaactcgagcaaggggaaggaccatggactctcgaaggagaggccccgcatcagagttgttccgatggaaaattcggcatcaagccttctcaacgacggataagtggtaagtccacattccattccgaaatggaaggcgaggacacacgggatgatagcctgtattcgatccttgaggaactgtggcaggatgcagaacagattaagcgttgccaggagaagcacaataaactgctcagccgcaccacctttctgaacaaaaagattctaaacaccgagtgggactacgagtacaaggattttggaaaatttgtgcatccatctcccaacttgatacttagccagaagaggcctcacaagcgcgatagtttcggcaagtccttcaaacacaacctcgacctgcacattcacaataaaagtaacgcagcaaaaaacctggataagaccattggtcacgggcaagtgttcactcagaacagctcgtactcccaccacgagaatactcataccggtgtgaagttttgcgagcggaatcaatgcggaaaggtcctatctctgaaacacagtctaagtcagaatgtgaagttccctattggtgagaaggctaatacctgcaccgagtttggcaagattttcacccagaggtcccatttcttcgctcctcagaagatccatactgttgagaaaccacacgagctgtctaaatgcgtgaatgtgtttacccagaagccattattatccatctacctgagagtccacagagacgagaaactctatatttgtaccaagtgcggcaaagctttcattcaaaatagcgagctcatcatgcacgaaaaaacacacactcgtgaaaagccgtacaaatgtaacgagtgtgggaagtcatttttccaggtgtcctccctccttaggcatcaaaccacccacacaggggagaagttattcgaatgctcagagtgcggcaagggtttcagcctgaactcggcactgaatattcatcagaaaatccacaccggcgaaaggcaccacaagtgttcagagtgcggcaaggcgtttacccagaagagtactcttcggatgcaccagcgtatacacaccggcgaaaggtcatatatatgcacccaatgcgggcaagccttcattcagaaggcgcatctaatcgcccaccagcgcattcacactggagaaaagccgtacgagtgttcggactgcggtaagtccttcccttctaaatcacagctacaaatgcacaaaaggattcacacaggtgaaaaaccttacatctgcacagaatgcggcaaagcattcaccaatcgtagcaacctgaacacgcaccagaaatcccataccggggaaaagagctatatctgtgccgagtgcggcaaggcattcacagaccgctccaatttcaataagcatcagaccatccatactggagaaaagccctatgtgtgcgccgactgcgggcgagcctttattcaaaagtcagagctgatcacacaccagcgcatccatactacagagaagccgtacaagtgccccgattgcgaaaagtcatttagcaagaaaccccatctcaaggtgcatcagaggattcacactggtgaaaagccatatatatgcgccgagtgtgggaaagcattcaccgatcggtcaaacttcaataagcaccagacaatccacaccggcgacaaaccctataaatgctccgactgtggtaagggcttcacacagaaatcagttttgtccatgcataggaatatacacacgtag

SEQ ID NO: 340709 - DNA, 369 bp, Artificial Sequence
  derived and/or modified sequence
atgcccgccaacgaggacgccccccagcccggcgagcacggcagcgcctgtgaggtgagcgtctcctttgaagacgtgaccgtggacttttctcgggaggaatggcagcaattagactctacccaacggcgcctctatcaggatgtgatgcttgagaattattcccaccttctgtcggtcggcttcgaagtgccgaagccagaggtcattttcaagttggaacagggggaaggtccctggaccctggaaggcgaggcaccgcaccagtcctgcagtgacggcaaattcggtattaagcccagtcaacggcggatcagtggcaaatcaacttttcactcagaaatggaaggcgaggacactctctgctag

SEQ ID NO: 340710 - DNA, 210 bp, Artificial Sequence
  derived and/or modified sequence
atgcccgcaaacgaggatgcccctcaaccaggtgagcatgggagcgcttgcgaggtgtccgtgtcttttgaggacgtaacagtcgatttcagccgcgaggagtggcagcaactcgactccacccagcgacgcctctaccaggacgtgatgctcgaaaactacagccacctgctcagtgtcggcaaagataaccacccagtgaagctgtag

SEQ ID NO: 340711 - DNA, 1986 bp, Artificial Sequence
  derived and/or modified sequence
atgccggctaacgaggacgcaccccagcccggtgaacatggctctgcttgtgaggttagtgtgtctttcgaagatgtcactgtagacttcagccgggaagaatggcagcagcttgacagcacacagagaagattgtaccaagacgtgatgctggaaaactactcccatcttctctctgtgggcttcgaggtacctaagccagaggtaattttcaaacttgagcaaggggaagggccttggacactggaaggggaggctcctcatcagtcgtgctcagatggcaagttcgggatcaagccgtcccaaagaaggatcagcggcaagtctacttttcattcggagatggaaggcgaggacacgagggatgattctctgtactccatcctggaagagctgtggcaagatgccgaacagatcaaacgatgtcaggagaagcacaacaaactcctgtccaggactacttttctcaacaagaagattctcaataccgaatgggattatgaatacaaggatttcggcaaattcgtccatccttctccaaacctgattctctctcagaaaaggcctcataaacgcgacagcttcgggaaaagcttcaagcacaacctggatctccacatacataacaagagtaatgcagctaaaaatctcgacaaaactatcggtcacggtcaggtgtttacccaaaactcctcctattctcatcatgaaaacactcatactggcgtgaagttttgcgagagaaaccagtgcggcaaggtgcttagccttaagcattccctgtcccagaacgttaagtttcctataggcgagaaggctaacacatgcactgaatttggcaagatcttcacacagcggtctcacttctttgctccacagaagatacacactgtggaaaaacctcacgagctctccaagtgcgtgaatgtgtttacgcagaaaccactactctcgatttatctgcgggtgcacagagacgaaaagctgtatatctgcaccaagtgtggtaaggcatttatccaaaattccgaactgattatgcacgagaaaacccacacccgtgagaaaccgtacaaatgcaatgagtgcggtaagagtttcttccaggtgtcatccttgctgagacatcagacgacacacacaggggagaagctctttgagtgttcagagtgcgggaagggttttagcctgaactctgccctcaatattcaccaaaaaattcatacaggagaacgccaccataaatgttccgagtgcgggaaggcttttacgcaaaagagtaccctgcggatgcaccaacggatccatactggggagagatcctatatatgcactcaatgcggtcaggccttcattcaaaaggcccatttgattgctcaccagagaatccacaccggcgagaaaccttacgagtgctcagattgtggaaagagctttccctccaagagccagttgcagatgcataagaggattcacaccggagagaagccatacatctgtacagaatgcggaaaggccttcacgaaccgcagtaacctgaatacacaccagaagtcacacaccggagaaaagtcttatatctgcgctgagtgtggcaaggcatttactgacaggtccaatttcaacaaacaccaaacaatccatactggggagaagccttatgtttgcgccgactgcgggcgagccttcatccagaaatctgaacttattacgcaccagaggatacataccacagaaaagccctacaaatgtccagattgtgaaaaaagcttctcgaaaaagccccatctaaaagtgcaccagcgcatccacaccggtgaaaagccctatatatgcgccgagtgtggaaaagcatttaccgacaggtcgaattttaataagcaccagaccatccatacaggagacaagccatataagtgctcggattgtggcaaaggctttacccaaaaaagtgtcctgtccatgcatagaaacatccacacatag

SEQ ID NO: 340712 - DNA, 312 bp, Artificial Sequence
  derived and/or modified sequence
atgccagcaaacgaggatgcaccccagcctggggagcatggaagcgcttgtgaggtgtccgtgtccttcgaggacgtgaccgtggacttcagtagagaggaatggcagcagcttgatagcacacagcgtaggctataccaggacgtgatgctcgaaaactactctcacctgcttagcgtgggctttgaagtccctaagccagaggtgattttcaagctcgagcagggagagggaccatggactctcgaaggggaggcccctcaccaaagctgctccggtatttcaacctatttcgtcacatctacagtgtag

SEQ ID NO: 340713 - DNA, 1986 bp, Artificial Sequence
  derived and/or modified sequence
atgcctgctaatgaagacgcgccacaacccggtgagcacggatccgcatgcgaggtgagcgtgagcttcgaggatgttacagttgacttcagtagagaggagtggcagcagctcgactccacgcaacgcaggttataccaggatgtgatgttagagaattactcccacttattgtccgtagggtttgaggttccgaaacccgaggtcatcttcaaacttgagcagggcgaaggcccttggacattggagggggaagcccctcatcagagctgtagcgatggaaaatttggcatcaaaccaagccagcgccgaatctcaggaaagagcacgtttcactcagagatggagggcgaagatactcgtgacgattccctctacagtattttggaagagttgtggcaagacgctgaacagattaaacgatgccaggagaaacataataagctgctgtctcgcaccacttttttgaataaaaagatcctgaacacagaatgggactacgagtataaggacttcggaaagtttgtccacccctctcctaatctgatcctgtctcagaagagaccccataagcgcgatagtttcgggaagtcatttaagcataatctggacctgcacattcacaacaagtctaacgctgctaagaacctggacaaaactatcgggcatgggcaagttttcacccagaatagttcctacagtcaccatgagaatacacacaccggcgtgaagttctgcgaaaggaaccagtgcgggaaggtgttatccctcaagcactctttgagtcagaatgtgaagtttcctataggggaaaaggccaacacctgtaccgagtttgggaagatctttacacagcggagtcacttctttgccccacaaaaaatccataccgtcgaaaaacctcatgagctttccaagtgtgtaaatgtattcacacagaaacccctgctctcaatttatctcagagtgcatagagatgaaaaactgtatatctgtactaagtgcgggaaggcctttatccagaattcagagttaataatgcacgagaagacgcacacccgcgagaagccttacaagtgcaacgagtgtgggaagagtttttttcaagtgtcctcactgctccggcatcagacaacacacacgggagagaagctgttcgagtgctccgagtgcggcaagggcttcagcttgaattcagcactgaatattcatcagaaaattcatacgggtgagagacaccataagtgcagtgagtgcggaaaagcattcacccagaaatcgactttgcgcatgcatcagaggattcacacgggggagagaagttatatctgcactcagtgcggccaagcctttattcagaaagcccatttaatcgctcaccagcgcatccacaccggggaaaagccctatgagtgctcagattgcggcaaaagcttcccatccaagtcccagctgcagatgcacaaacggatccatactggagagaagccttatatttgcactgagtgcggcaaagcttttactaacaggtccaatctgaatacccaccaaaagtctcacacgggtgagaaatcttatatttgtgcggaatgcgggaaagctttcactgaccggtctaactttaacaagcaccagaccattcacaccggtgaaaagccttatgtatgcgcggactgcggccgtgcattcatccaaaagtccgagctgattactcaccagcggatccatactactgaaaagccctataaatgccccgattgtgaaaagtcatttagcaagaaaccacacctgaaagtccaccagagaatccatacaggcgagaagccctacatttgcgcggagtgtggtaaagcatttactgatcggagcaattttaataaacatcagaccatccacaccggagacaagccttacaagtgctctgactgcggcaagggcttcactcagaagagcgtcctctccatgcacagaaatatccatacttag

SEQ ID NO: 340714 - DNA, 369 bp, Artificial Sequence
  derived and/or modified sequence
atgcccgctaacgaggacgctccacaacctggtgagcacggtagcgcatgcgaggtcagcgtgtcgtttgaggacgtgaccgttgatttctcgcgggaagaatggcagcagctagactccactcagagacgcctgtatcaggacgtaatgctcgagaactactcccatttattgtcggtcggattcgaggttccaaagcctgaagtaatctttaaacttgaacagggagaaggaccatggaccttggaaggcgaggcgccacaccaaagctgttccgacggtaagtttggaatcaagccttcccaaagaagaatatctgggaagtcgacattccactcagaaatggagggagaggacacactttgttag

SEQ ID NO: 340715 - DNA, 610 bp, Artificial Sequence
  derived and/or modified sequence
gttgtcaggaggattcgacgttcagtgcccagggatgtggaggtgatggggggccggggaggagtctcactctgtcacccaggctggagtgcagtttgtgtgatctcaactcactgcaacctctgcctcctgggttcaagcgattctcctgcctcagcctcccgagtagctggaattacagagttcttggagtctctgcggagtccctgggccagatctcacagtgaaagctgcaggatcttccttctgaccccagcagtccccgttgagtccaccgatcccactggaattataaagttgtcagcaagaaagccccagggctgaagtccaagtccgtcgggaacatgccagctaacgaggacgctccccagccaggggaacatggcagtgcctgtgaggtatcagtgtcatttgaggatgtgactgtggacttcagtagagaggagtggcagcaactggactctactcaaagacgcctgtaccaggatgtaatgttggagaactacagccacctgctctcagtgggtaaggacaaccatcctgtgaagttgtgaggagcctgttatgggttaaattgtgcccccaaataaaatatgttgaagtcctaata

SEQ ID NO: 340716 - DNA, 492 bp, Artificial Sequence
  derived and/or modified sequence
gtgcccagggatgtggagagttcttggagtctctgcggagtccctgggccagatctcacagtgaaagctgcaggatcttccttctgaccccagcagtccccgttgagtccaccgatcccactggaattataaagttgtcagcaagaaagccccagggctgaagtccaagtccgtcgggaacatgccagctaacgaggacgctccccagccaggggaacatggcagtgcctgtgaggtatcagtgtcatttgaggatgtgactgtggacttcagtagagaggagtggcagcaactggactctactcaaagacgcctgtaccaggatgtaatgttggagaactacagccacctgctctcagtggggttcgaagttcctaaaccagaggtcatcttcaagttggagcaaggagaggggccatggacattggaaggggaagccccacatcagagctgttcagggatttccacatatttcgtcacatccacagtaaa

SEQ ID NO: 340717 - DNA, 7933 bp, Artificial Sequence
  derived and/or modified sequence
ggaagcggctgcggttctcgccggttctcagccggggtttgatagttgtcaggaggattcgacgttcagtgcccagggatgtggagagtctcactctgtcacccaggctggagtgcagtttgtgtgatctcaactcactgcaacctctgcctcctgggttcaagcgattctcctgcctcagcctcccgagtagctggaattacagagttcttggagtctctgcggagtccctgggccagatctcacagtgaaagctgcaggatcttccttctgaccccagcagtccccgttgagtccaccgatcccactggaattataaagttgtcagcaagaaagccccagggctgaagtccaagtccgtcgggaacatgccagctaacgaggacgctccccagccaggggaacatggcagtgcctgtgaggtatcagtgtcatttgaggatgtgactgtggacttcagtagagaggagtggcagcaactggactctactcaaagacgcctgtaccaggatgtaatgttggagaactacagccacctgctctcagtggggttcgaagttcctaaaccagaggtcatcttcaagttggagcaaggagaggggccatggacattggaaggggaagccccacatcagagctgttcagatgggaaatttggaattaagccttcccagaggagaatttctgggaaatctacatttcatagtgaaatggagggtgaagacacaagagatgattcattatactctattttagaagaattgtggcaagatgctgaacagataaagagatgtcaggaaaaacacaacaaacttctgagtcgcactactttcctcaataagaaaatattgaatacagagtgggattatgaatataaagactttggaaaatttgttcatccaagcccaaatctcattctttcacagaaaagaccccataaacgtgattcatttgggaagagttttaagcataatttagacttacatattcataataaaagcaatgcagcaaagaacctggataaaactattgggcatggtcaagtttttacccagaactcttcttatagtcaccacgaaaatacacatacaggagtgaagttctgtgaacgtaatcaatgtggaaaagtcctcagcctcaaacactcactcagtcaaaatgtgaaatttcccattggagagaaagcaaacacatgtactgaatttgggaagatcttcacccagaggtcacatttctttgctcctcaaaaaattcatactgtggaaaaacctcatgagcttagcaaatgtgtaaatgtttttacacagaagccactactcagtatatatctgagagttcatagagatgaaaaactctacatatgtactaaatgtgggaaggccttcatccagaattcagaattaattatgcatgagaaaactcatactagagagaaaccctataaatgcaatgaatgtgggaaatcatttttccaggtgtcatctctactcaggcatcagacaactcatactggagaaaaactctttgaatgcagtgaatgtggtaaaggcttctccctgaactcagccctcaatatacatcagaaaattcacactggagagagacatcacaaatgcagtgagtgtgggaaagcctttacccaaaaatcaacactcaggatgcatcagagaattcatacaggagagaggtcctatatctgtactcaatgtgggcaggccttcatccagaaggcacacttgattgcacatcaaagaattcatactggagagaagccttatgaatgcagtgactgtgggaaatctttcccttctaagtcacaactccagatgcataagagaattcatacaggagagaaaccctatatatgcactgaatgtgggaaggctttcaccaacaggtcaaatctcaatactcaccagaagtctcatactggagaaaagtcttatatatgtgctgaatgtgggaaggccttcaccgacaggtcaaatttcaataaacaccagaccattcacactggagagaaaccctatgtttgtgctgattgtgggagggccttcatccagaagtcagagttgattacacatcagagaattcatactacagagaagccttataaatgtcctgactgtgagaaatccttctccaagaaaccacatctcaaagtacatcaacgaattcacacaggggagaaaccatatatatgtgcagaatgtgggaaagccttcactgataggtcaaatttcaataaacatcagacaattcatactggagataaaccgtataaatgcagcgactgtggaaaggggttcacccagaaatcagttctcagtatgcatcgcaatattcatacatgaaagtaatcctgtttcttgaaaatgagagccttataaggctgacaaaagtcaggtctaactatatattataaaattcatccaagacagatcctatatgaatacattgtataaggaaaagcatcaggctatctcacttgagatggaaaaaaattattcagaagaaactctcttaaaaatgcattgaaggagagagaatttgcacagcctcatgaaatatagtaaaagtcatactgggaaaaatgttgtcagtttggtgtgttaggaaaagccttcctatagaaagtattataagttaaattgttaccaaattctttataggaaggagagtgcaaaattatgtaaatgatggtcaggtttactgtgttatattaagcaatttaaagtgataacaaaatgaaaggtagtgcagcaaaataatataactggtgagtagacctactttcagttccatagggtgtttgtggcagaacacagtgcagaacaggaggaatattacattttttttcaaatttagaataattatgtccatcaaatgtttcttactgaatatgtctatcaaatatgtttcttattgaatatttctatcaagtgaatccacaatttaaaagtcactttggttttatatatacacacatctgcagatataattttataagaacacacaaatataatcctgtcattcgtactggtttccatgacatagtatcttgttttctttcattgtggtacaatgcaaagtagccacagattcctcccatcccaagtagcgtctctttgtctactacttgactttgaacttggccacgtgactttctttggccaatggaaattagcaaagagaatcaataagaagcttgagaagtgtgcaaagcctgccttgaagcttaccctctcttgctgctctttgcaaacctgaagaatctcaaattgccctactcgggggtgaggagccaccacatggagcagtggtgagccagccttgctgaggccccttagaccaagtagcctgccaattgtcagaattgggagtgaggttttccaagacctctagccccagctgagccagcctagcccagaagagccataccagttattccagctgatttacagaattgtgagataaataaaatgatgatagttttaagcaacatgagttttggggttagtttgttgtacagaaaatgctaagtaatatttgaaagtatatgtttgggggagggggcatagtggaccaaaacgtgacaagtggcattggctttgggtctgagtggcacgtagaaactggaaaaacagtgaggaaaactgtttttcctcaaataacaaaggttggatagttggcaacccatgttatttagtagggaaagatacagaaaaacagtcatcaccatactctgtgggaagatagagaatggaccaaacgaactggtggatctggctaaggagatttgcagcagaatatgggaagtatcagtttgcttcttttagctgcatatgatacgatacagaaagagagaaatgaactaaagaaataactgtttctttggcaagcagaattcagaagaaatatggaaaagccaaggattgctgggttgaaaaataatgctttcacatcactagtctctccagctatctaactattcgcaaggtaaaaaatggcctcagggtaaagatcaaatcatggttgtgtctgtaagactctttattacagtgtgtgaaatagttcagttggtgcttaggagaccatctcagctaaacttaagggcttctaaaaatcttcatgacgttgtcccatagaagcctgacatactactcaaagtggagagagacctatcttaaaaagaattgctgatgtggcatttggggaaaggagtagatccaaaccagattcataggaaactcacaaagtttttaatagagttttactagtaaaactacctccaggttggacttccagggactgaaacagttcaaaatgaaaagtggcctctggattcccctccctaacttctatgaataggatacaagctgagaaagttactcagatgcaaacacggtccatttcttatggaaaatgaagggcatctcagagggaagacccaagaacaatatattaaaatgagctggggagccgttcccagggagaactgtgccctaatcaagaaacgtatctgcccctggagccaagggaaccgacaacatttgctctgtgggatttcagaatcgttatggaacagtgactgatatgtgcctcatggtcctcctctttttgaatgggagtgtctattacagttatcctgtacctatcccaccattgtatatattgggtgtatgttggggggcatgtaacttgtcatttagctcacaggtatctggatcaagaaactgaaaaactgtacccaaggaacctcagccacacctgaacctgatacagaagacttgagattctggattggagcttgatgccacaattttggatgagaaatttggaggtcctggaataggggtgaacacattttgcatggggtggtaatgtgaatactttgtgaccagaagacacactgtgttaggtagaaaaatgctacagatgtcttcatccctgtatatgtgtccttcttcagtctttatttctctttgtgtttcagttaggataatttctattgatctgtcttcaaattcactgatgttttttctctcaccctggctttgtcaagtctactgctgaacccattgaaggcattcttcaactcagttatgttttatttttatttgtaatatttccatttgattcttacaattttcatatatctgctgaaattccccatcttttcatgcatgttcatgttttcccctttaccctttgtcttagtcagtttgagctgctataataaagcaccatagacttggtggcttataaacaacagaaatttattcctcacagttctggagcctggaagtctgagatcagaatctagcaaggttaggtcttggtgacggccctcttcaaggttgcaaactgctcacttcttgcattttcccatgtctacagctagagaactctttgggatcccttttataagggcaccaatcccattcatgagttctccacccacattacctaactaccacccaaaggctccacctcctaataccatcacattgaggattaggattttaacatatgaattttgggggggatgcaatcattcagcccataataccctctaacatattaatcatagttatttttaactccctgtctgatagttccaactactaggtcaactgagtctaggtctgttgttgtcttctcttgctcttttgcatctaataatttttggctgaatgtcacagatgttgtatgtaggacagtagaaactgaggtaaatagtaattattcctggaaacagccatggttgcccttttgataggccattagcatggggagattgaatccatctaatcaggagttgggctgagtttgtgtttctttgttgccagtgttacctttgctgtaccatagacttaaaattcctctattgttatcttatgcttgaggtaggcactggtttgcccagagaatttttatttttcccagaccacacttgcctttaggcctgtaggcctttcctgtgtgcctgcatctcagggagggtctctctccatgttgttgcctctatgttagtagtagacaactgttattacttggttcttgctgacctggtgagttggggggcaggggttgtcttgggccagcctcagtttttgtcaggccatgaatccctgggtcttgagggtgggattttttagtgatcctgccctcttccactggtagaaggcctttaatgatctgggcccaggatgatttcctgcccttttatcatgggtggaatttttttttccatttccctcactctagtcacagtgaatctttaactgtgtcctgagggcaacagggtttgctgcacttcttttagtggcttaaggattttgttctgtaggggagtagggtttcattggagctttgtgccatttctatgttaacagcagcccccttgcaggcctaccccatggaggtaggctttctccagtcttcttccttgtccccgtgtttcttgagagcactcagtggatgactatggagaagagcctgcaagcagagaccaactacccttaggtctacagctctcatgagtctcccgcactcagcctttagcaattcattaaaaattcttgttgaattcttactgcttgtatagtggcctcatcttccttcctgctgtaccacagatggcccaggagaggcacttgtcttttattatatttcaagctagttggttgctctgtaatcttagctctctgatgggttcgagaaaacttatgtttttgcagattacccagctttgttcttgttataaagatgggagcagtgttctttccagatgtctacatgctaggcagaaactagaagtctggacagtctccatggtctcctactatcagaatatgtgcccttttcagtgtgactttgccacttcacccatcaagaggtagaatctatttcttcaacccctgcaactgagcttggctattttgttggccaatgggacattaacaagtatgatacaagcagaggcttgagaagtgcctgcacaatgaggcttgcccacttttgcagctctttggaatcctgaacccatgtgtggaaaagcctgaactgtgctgttggaaaatgagagcgatcacatggagcagtaatggagcaaagaccagccatcccagttgagataccctacaccaaccagattttcaactgctggacatatgaatgaagctatcctaggcatgcagtcttggtcaaggcaactttggctggcagtctctgagatgaccctgaatgatccccacctcctggtattctcactcttatataatcccctcctcttgagtttggactggaattagtgacttggttctagtgaatagaatgaggcagaggtaatgggatgtcatgttcaagattggttacaaaaagactgtggcttccattttgggtgcttgcttactctctcagatggctcatcataggggaaacctgctgctacatcatgagatagccctgtggaaaggtccacatgagtgaactttgaagcatatcctcccccagtttagcctttagatgaggaccacagccaaatagcttgactgtaagccagatagcttgactcatgagggaccttcagccagaggcatcttttgagccatacgaattcctgacccatagaaactgcaagacaataaatgttgttttaagttgctaaattttagggtaatttgttacacagtaataggttaataatacactggcccagattaggaaggttctgccatccatcccagccatcccaaacaactaccagaataatggattaaaacgttaactgttttaagtcactaagttttgggcagcatgataacaacccagcaaaaagctaactgatacattgattatttattgcatttcttcctccactattcttctctaacagatgaccaatactaataaactactgtgaacactt

SEQ ID NO: 340718 - DNA, 3573 bp, Artificial Sequence
  derived and/or modified sequence
ctgcctctgatcatatggacactgtctttccagagttcttggagtctctgcggagtccctgggccagatctcacagtgaaagctgcaggatcttccttctgaccccagcagtccccgttgagtccaccgatcccactggaattataaagttgtcagcaagaaagccccagggctgaagtccaagtccgtcgggaacatgccagctaacgaggacgctccccagccaggggaacatggcagtgcctgtgaggtatcagtgtcatttgaggatgtgactgtggacttcagtagagaggagtggcagcaactggactctactcaaagacgcctgtaccaggatgtaatgttggagaactacagccacctgctctcagtggggttcgaagttcctaaaccagaggtcatcttcaagttggagcaaggagaggggccatggacattggaaggggaagccccacatcagagctgttcagatgggaaatttggaattaagccttcccagaggagaatttctgggaaatctacatttcatagtgaaatggagggtgaagacacactgtgttaggtagaaaaatgctacagatgtcttcatccctgtatatgtgtccttcttcagtctttatttctctttgtgtttcagttaggataatttctattgatctgtcttcaaattcactgatgttttttctctcaccctggctttgtcaagtctactgctgaacccattgaaggcattcttcaactcagttatgttttatttttatttgtaatatttccatttgattcttacaattttcatatatctgctgaaattccccatcttttcatgcatgttcatgttttcccctttaccctttgtcttagtcagtttgagctgctataataaagcaccatagacttggtggcttataaacaacagaaatttattcctcacagttctggagcctggaagtctgagatcagaatctagcaaggttaggtcttggtgacggccctcttcaaggttgcaaactgctcacttcttgcattttcccatgtctacagctagagaactctttgggatcccttttataagggcaccaatcccattcatgagttctccacccacattacctaactaccacccaaaggctccacctcctaataccatcacattgaggattaggattttaacatatgaattttgggggggatgcaatcattcagcccataataccctctaacatattaatcatagttatttttaactccctgtctgatagttccaactactaggtcaactgagtctaggtctgttgttgtcttctcttgctcttttgcatctaataatttttggctgaatgtcacagatgttgtatgtaggacagtagaaactgaggtaaatagtaattattcctggaaacagccatggttgcccttttgataggccattagcatggggagattgaatccatctaatcaggagttgggctgagtttgtgtttctttgttgccagtgttacctttgctgtaccatagacttaaaattcctctattgttatcttatgcttgaggtaggcactggtttgcccagagaatttttatttttcccagaccacacttgcctttaggcctgtaggcctttcctgtgtgcctgcatctcagggagggtctctctccatgttgttgcctctatgttagtagtagacaactgttattacttggttcttgctgacctggtgagttggggggcaggggttgtcttgggccagcctcagtttttgtcaggccatgaatccctgggtcttgagggtgggattttttagtgatcctgccctcttccactggtagaaggcctttaatgatctgggcccaggatgatttcctgcccttttatcatgggtggaatttttttttccatttccctcactctagtcacagtgaatctttaactgtgtcctgagggcaacagggtttgctgcacttcttttagtggcttaaggattttgttctgtaggggagtagggtttcattggagctttgtgccatttctatgttaacagcagcccccttgcaggcctaccccatggaggtaggctttctccagtcttcttccttgtccccgtgtttcttgagagcactcagtggatgactatggagaagagcctgcaagcagagaccaactacccttaggtctacagctctcatgagtctcccgcactcagcctttagcaattcattaaaaattcttgttgaattcttactgcttgtatagtggcctcatcttccttcctgctgtaccacagatggcccaggagaggcacttgtcttttattatatttcaagctagttggttgctctgtaatcttagctctctgatgggttcgagaaaacttatgtttttgcagattacccagctttgttcttgttataaagatgggagcagtgttctttccagatgtctacatgctaggcagaaactagaagtctggacagtctccatggtctcctactatcagaatatgtgcccttttcagtgtgactttgccacttcacccatcaagaggtagaatctatttcttcaacccctgcaactgagcttggctattttgttggccaatgggacattaacaagtatgatacaagcagaggcttgagaagtgcctgcacaatgaggcttgcccacttttgcagctctttggaatcctgaacccatgtgtggaaaagcctgaactgtgctgttggaaaatgagagcgatcacatggagcagtaatggagcaaagaccagccatcccagttgagataccctacaccaaccagattttcaactgctggacatatgaatgaagctatcctaggcatgcagtcttggtcaaggcaactttggctggcagtctctgagatgaccctgaatgatccccacctcctggtattctcactcttatataatcccctcctcttgagtttggactggaattagtgacttggttctagtgaatagaatgaggcagaggtaatgggatgtcatgttcaagattggttacaaaaagactgtggcttccattttgggtgcttgcttactctctcagatggctcatcataggggaaacctgctgctacatcatgagatagccctgtggaaaggtccacatgagtgaactttgaagcatatcctcccccagtttagcctttagatgaggaccacagccaaatagcttgactgtaagccagatagcttgactcatgagggaccttcagccagaggcatcttttgagccatacgaattcctgacccatagaaactgcaagacaataaatgttgttttaagttgctaaattttagggtaatttgttacacagtaataggttaataatacactggcccagattaggaaggttctgccatccatcccagccatcccaaacaactaccagaataatggattaaaacgttaactgttttaagtcactaagttttgggcagcatgataacaacccagcaaaaagctaactgatacattgattatttattgcatttcttcctccactattcttctctaacagatgaccaatactaataaactactgtgaac

SEQ ID NO: 340719 - DNA, 2397 bp, Artificial Sequence
  derived and/or modified sequence
gcacacactcatcgaaaaaaatttggattattagaagagagaggtctgcggcttccacaccgtacagcgtggtttttcttctcggtataaaagcaaagttgtttttgatacgtgacagtttcccacaagccaggctgatccttttctgtcagtccacttcaccaagcctgcccttggacaaggacccgatgcccaaccccaggcctggcaagccctcggccccttccttggcccttggcccatccccaggagcctcgcccagctggagggctgcacccaaagcctcagacctgctgggggcccggggcccagggggaaccttccagggccgagatcttcgaggcggggcccatgcctcctcttcttccttgaaccccatgccaccatcgcagctgcagctgcccacactgcccctagtcatggtggcaccctccggggcacggctgggccccttgccccacttacaggcactcctccaggacaggccacatttcatgcaccagctctcaacggtggatgcccacgcccggacccctgtgctgcaggtgcaccccctggagagcccagccatgatcagcctcacaccacccaccaccgccactggggtcttctccctcaaggcccggcctggcctcccacctgggatcaacgtggccagcctggaatgggtgtccagggagccggcactgctctgcaccttcccaaatcccagtgcacccaggaaggacagcaccctttcggctgtgccccagagctcctacccactgctggcaaatggtgtctgcaagtggcccggatgtgagaaggtcttcgaagagccagaggacttcctcaagcactgccaggcggaccatcttctggatgagaagggcagggcacaatgtctcctccagagagagatggtacagtctctggagcagcagctggtgctggagaaggagaagctgagtgccatgcaggcccacctggctgggaaaatggcactgaccaaggcttcatctgtggcatcatccgacaagggctcctgctgcatcgtagctgctggcagccaaggccctgtcgtcccagcctggtctggcccccgggaggcccctgacagcctgtttgctgtccggaggcacctgtggggtagccatggaaacagcacattcccagagttcctccacaacatggactacttcaagttccacaacatgcgaccccctttcacctacgccacgctcatccgctgggccatcctggaggctccagagaagcagcggacactcaatgagatctaccactggttcacacgcatgtttgccttcttcagaaaccatcctgccacctggaagaacgccatccgccacaacctgagtctgcacaagtgctttgtgcgggtggagagcgagaagggggctgtgtggaccgtggatgagctggagttccgcaagaaacggagccagaggcccagcaggtgttccaaccctacacctggcccctgacctcaagatcaaggaaaggaggatggacgaacaggggccaaactggtgggaggcagaggtggtgggggcagggatgataggccctggatgtgcccacagggaccaagaagtgaggtttccactgtcttgcctgccagggcccctgttcccccgctggcagccaccccctcccccatcatatcctttgccccaaggctgctcagaggggccccggtcctggccccagcccccacctccgccccagacacaccccccagtcgagccctgcagccaaacagagccttcacaaccagccacacagagcctgcctcagctgctcgcacagattacttcagggctggaaaagtcacacagacacacaaaatgtcacaatcctgtccctcactcaacacaaaccccaaaacacagagagcctgcctcagtacactcaaacaacctcaaagctgcatcatcacacaatcacacacaagcacagccctgacaacccacacaccccaaggcacgcacccacagccagcctcagggcccacaggggcactgtcaacacaggggtgtgcccagaggcctacacagaagcagcgtcagtaccctcaggatctgaggtcccaacacgtgctcgctcacacacacggcctgttagaattcacctgtgtatctcacgcatatgcacacgcacagccccccagtgggtctcttgagtcccgtgcagacacacacagccacacacactgccttgccaaaaataccccgtgtctcccctgccactcacctcactcccattccctgagccctgatccatgcctcagcttagactgcagaggaactactcatttatttgggatccaaggcccccaacccacagtaccgtccccaataaactgcagccgagctccccacaaaaaaaaaaaaaaaa

SEQ ID NO: 340720 - DNA, 2382 bp, Artificial Sequence
  derived and/or modified sequence
gcacacactcatcgaaaaaaatttggattattagaagagagaggtctgcggcttccacaccgtacagcgtggtttttcttctcggtataaaagcaaagttgtttttgatacgtgacagtttcccacaagccaggctgatccttttctgtcagtccacttcaccaagcctgcccttggacaaggacccgatgcccaaccccaggcctggcaagccctcggccccttccttggcccttggcccatccccaggagcctcgcccagctggagggctgcacccaaagcctcagacctgctgggggcccggggcccagggggaaccttccagggccgagatcttcgaggcggggcccatgcctcctcttcttccttgaaccccatgccaccatcgcagctgcagctgcccacactgcccctagtcatggtggcaccctccggggcacggctgggccccttgccccacttacaggcactcctccaggacaggccacatttcatgcaccagctctcaacggtggatgcccacgcccggacccctgtgctgcaggtgcaccccctggagagcccagccatgatcagcctcacaccacccaccaccgccactggggtcttctccctcaaggcccggcctggcctcccacctgggatcaacgtggccagcctggaatgggtgtccagggagccggcactgctctgcaccttcccaaatcccagtgcacccaggaaggacagcaccctttcggctgtgccccagagctcctacccactgctggcaaatggtgtctgcaagtggcccggatgtgagaaggtcttcgaagagccagaggacttcctcaagcactgccaggcggaccatcttctggatgagaagggcagggcacaatgtctcctccagagagagatggtacagtctctggagcagcagctggtgctggagaaggagaagctgagtgccatgcaggcccacctggctgggaaaatggcactgaccaaggcttcatctgtggcatcatccgacaagggctcctgctgcatcgtagctgctggcagccaaggccctgtcgtcccagcctggtctggcccccgggaggcccctgacagcctgtttgctgtccggaggcacctgtggggtagccatggaaacagcacattcccagagttcctccacaacatggactacttcaagttccacaacatgcgaccccctttcacctacgccacgctcatccgctgggccatcctggaggctccagagaagcagcggacactcaatgagatctaccactggttcacacgcatgtttgccttcttcagaaaccatcctgccacctggaagaacgccatccgccacaacctgagtctgcacaagtgctttgtgcgggtggagagcgagaagggggctgtgtggaccgtggatgagctggagttccgcaagaaacggagccagaggcccagcaggtgttccaaccctacacctggcccctgacctcaagatcaaggaaaggaggatggacgaacaggggccaaactggtgggaggcagaggtggtgggggcagggatgataggccctggatgtgcccacagggaccaagaagtgaggtttccactgtcttgcctgccagggcccctgttcccccgctggcagccaccccctcccccatcatatcctttgccccaaggctgctcagaggggccccggtcctggccccagcccccacctccgccccagacacaccccccagtcgagccctgcagccaaacagagccttcacaaccagccacacagagcctgcctcagctgctcgcacagattacttcagggctggaaaagtcacacagacacacaaaatgtcacaatcctgtccctcactcaacacaaaccccaaaacacagagagcctgcctcagtacactcaaacaacctcaaagctgcatcatcacacaatcacacacaagcacagccctgacaacccacacaccccaaggcacgcacccacagccagcctcagggcccacaggggcactgtcaacacaggggtgtgcccagaggcctacacagaagcagcgtcagtaccctcaggatctgaggtcccaacacgtgctcgctcacacacacggcctgttagaattcacctgtgtatctcacgcatatgcacacgcacagccccccagtgggtctcttgagtcccgtgcagacacacacagccacacacactgccttgccaaaaataccccgtgtctcccctgccactcacctcactcccattccctgagccctgatccatgcctcagcttagactgcagaggaactactcatttatttgggatccaaggcccccaacccacagtaccgtccccaataaactgcagccgagctccccaca

SEQ ID NO: 340721 - protein, 396 aa, Artificial Sequence
  derived and/or modified sequence
MPNPRPGKPSAPSLALGPSPGASPSWRAAPKASDLLGARGPGGTFQGRDLRGGAHASSSSLNPMPPSQLQLSTVDAHARTPVLQVHPLESPAMISLTPPTTATGVFSLKARPGLPPGINVASLEWVSREPALLCTFPNPSAPRKDSTLSAVPQSSYPLLANGVCKWPGCEKVFEEPEDFLKHCQADHLLDEKGRAQCLLQREMVQSLEQQLVLEKEKLSAMQAHLAGKMALTKASSVASSDKGSCCIVAAGSQGPVVPAWSGPREAPDSLFAVRRHLWGSHGNSTFPEFLHNMDYFKFHNMRPPFTYATLIRWAILEAPEKQRTLNEIYHWFTRMFAFFRNHPATWKNAIRHNLSLHKCFVRVESEKGAVWTVDELEFRKKRSQRPSRCSNPTPGP

SEQ ID NO: 340722 - DNA, 2274 bp, Artificial Sequence
  derived and/or modified sequence
gcacacactcatcgaaaaaaatttggattattagaagagagaggtctgcggcttccacaccgtacagcgtggtttttcttctcggtataaaagcaaagttgtttttgatacgtgacagtttcccacaagccaggctgatccttttctgtcagtccacttcaccaagcctgcccttggacaaggacccgatgcccaaccccaggcctggcaagccctcggccccttccttggcccttggcccatccccaggagcctcgcccagctggagggctgcacccaaagcctcagacctgctgggggcccggggcccagggggaaccttccagggccgagatcttcgaggcggggcccatgcctcctcttcttccttgaaccccatgccaccatcgcagctgcagctctcaacggtggatgcccacgcccggacccctgtgctgcaggtgcaccccctggagagcccagccatgatcagcctcacaccacccaccaccgccactggggtcttctccctcaaggcccggcctggcctcccacctgggatcaacgtggccagcctggaatgggtgtccagggagccggcactgctctgcaccttcccaaatcccagtgcacccaggaaggacagcaccctttcggctgtgccccagagctcctacccactgctggcaaatggtgtctgcaagtggcccggatgtgagaaggtcttcgaagagccagaggacttcctcaagcactgccaggcggaccatcttctggatgagaagggcagggcacaatgtctcctccagagagagatggtacagtctctggagcagcagctggtgctggagaaggagaagctgagtgccatgcaggcccacctggctgggaaaatggcactgaccaaggcttcatctgtggcatcatccgacaagggctcctgctgcatcgtagctgctggcagccaaggccctgtcgtcccagcctggtctggcccccgggaggcccctgacagcctgtttgctgtccggaggcacctgtggggtagccatggaaacagcacattcccagagttcctccacaacatggactacttcaagttccacaacatgcgaccccctttcacctacgccacgctcatccgctgggccatcctggaggctccagagaagcagcggacactcaatgagatctaccactggttcacacgcatgtttgccttcttcagaaaccatcctgccacctggaagaacgccatccgccacaacctgagtctgcacaagtgctttgtgcgggtggagagcgagaagggggctgtgtggaccgtggatgagctggagttccgcaagaaacggagccagaggcccagcaggtgttccaaccctacacctggcccctgacctcaagatcaaggaaaggaggatggacgaacaggggccaaactggtgggaggcagaggtggtgggggcagggatgataggccctggatgtgcccacagggaccaagaagtgaggtttccactgtcttgcctgccagggcccctgttcccccgctggcagccaccccctcccccatcatatcctttgccccaaggctgctcagaggggccccggtcctggccccagcccccacctccgccccagacacaccccccagtcgagccctgcagccaaacagagccttcacaaccagccacacagagcctgcctcagctgctcgcacagattacttcagggctggaaaagtcacacagacacacaaaatgtcacaatcctgtccctcactcaacacaaaccccaaaacacagagagcctgcctcagtacactcaaacaacctcaaagctgcatcatcacacaatcacacacaagcacagccctgacaacccacacaccccaaggcacgcacccacagccagcctcagggcccacaggggcactgtcaacacaggggtgtgcccagaggcctacacagaagcagcgtcagtaccctcaggatctgaggtcccaacacgtgctcgctcacacacacggcctgttagaattcacctgtgtatctcacgcatatgcacacgcacagccccccagtgggtctcttgagtcccgtgcagacacacacagccacacacactgccttgccaaaaataccccgtgtctcccctgccactcacctcactcccattccctgagccctgatccatgcctcagcttagactgcagaggaactactcatttatttgggatccaaggcccccaacccacagtaccgtccccaataaactgcagccgagctcccc

SEQ ID NO: 340723 - DNA, 1213 bp, Artificial Sequence
  derived and/or modified sequence
cctgcccttggacaaggacccgatgcccaaccccaggcctggcaagccctcggccccttccttggcccttggcccatccccaggagcctcgcccagctggagggctgcacccaaagcctcagacctgctgggggcccggggcccagggggaaccttccagggccgagatcttcgaggcggggcccatgcctcctcttcttccttgaaccccatgccaccatcgcagctgcagctctcaacggtggatgcccacgcccggacccctgtgctgcaggtgcaccccctggagagcccagccatgatcagcctcacaccacccaccaccgccactggggtcttctccctcaaggcccggcctggcctcccacctgggatcaacgtggccagcctggaatgggtgtccagggagccggcactgctctgcaccttcccaaatcccagtgcacccaggaaggacagcaccctttcggctgtgccccagagctcctacccactgctggcaaatggtgtctgcaagtggcccggatgtgagaaggtcttcgaagagccagaggacttcctcaagcactgccaggcggaccatcttctggatgagaagggcagggcacaatgtctcctccagagagagatggtacagtctctggagcagcagctggtgctggagaaggagaagctgagtgccatgcaggcccacctggctgggaaaatggcactgaccaaggcttcatctgtggcatcatccgacaagggctcctgctgcatcgtagctgctggcagccaaggccctgtcgtcccagcctggtctggcccccgggaggcccctgacagcctgtttgctgtccggaggcacctgtggggtagccatggaaacagcacattcccagagttcctccacaacatggactacttcaagttccacaacatgcgaccccctttcacctacgccacgctcatccgctgggccatcctggaggctccagagaagcagcggacactcaatgagatctaccactggttcacacgcatgtttgccttcttcagaaaccatcctgccacctggaagaacgccatccgccacaacctgagtctgcacaagtgctttgtgcgggtggagagcgagaagggggctgtgtggaccgtggatgagctggagttccgcaagaaacggagccagaggcccagcaggtgttccaaccctacacctggcccctga

SEQ ID NO: 340724 - DNA, 785 bp, Artificial Sequence
  derived and/or modified sequence
taccttgtttagggttgttcaatgaatagcagggactcatcacctcagcagaggttggtcctaggccctcagccccctgattcacttatttctgccataagcactttttgagcatctactctgtgtcagtcactattccaggtcctcaggatatagccgtgacctaaacacagaaatctaccctggcggagctgatcttctagttgtggcgatcgccatggatcggatgaagaagatcaaacggcagctgtcaatgacactccgaggtggccgaggcatagacaagaccaatggtgcccctgagcagataggcctggatgagagtggtggtggtggcggcagtgaccctggagaggcccccacacgtgctgctcctggggaacttcgttctgcacggggcccactcagctctgcaccagagattgtgcacgaggacttgaagatggggtctgatggggagagtgaccaggcttcagccacgtcctcggatgaggtgcagtctccagtgagagtgcgtatgcgcaaccatcccccacgcaagatctccactgaggacatcaacaagcgcctatcactaccagctgacatccggctgcctgagggctacctggagaagctgaccctcaatagccccatctttgacaagcccctcagccgccgcctccgtcgtgtcagcctatctgagattggctttgggaaactggagacctacattaagctggacaaactgggcgagggtacctatgccaccgtctacaaaggcaaaagcaagctcacagacaacc

SEQ ID NO: 340725 - DNA, 943 bp, Artificial Sequence
  derived and/or modified sequence
gcatgcgcggagcgcggcgcgcgcggcggttgggccgttggctgttcggccctgggatccgccgccactccgcgatcagaccgctctgtgccgcgagccgccgtgagcactcggattcaagccggcgccaacgagtccgggggcatcgcccgcagcggccaagctcatggccggctgagcgggacgccgcctccgcctcagccaccgccgccgccgccgcctcctcctcctcagccggcggcggcccgggcccagcaaccatggctgaagactactgggacgggcgcctgcggcgaacaggaggagaaggaggtcgcgcggcctcatcccgggccgccgccccaggcgccgccgcgccggccccgcggctctgaggttgctcgcgcgcccccgccgtcactattccaggtcctcaggatatagccgtgacctaaacacagaaatctaccctggcggagctgatcttctagttgtggcgatcgccatggatcggatgaagaagatcaaacggcagctgtcaatgacactccgaggtggccgaggcatagacaagaccaatggtgcccctgagcagataggcctggatgagagtggtggtggtggcggcagtgaccctggagaggcccccacacgtgctgctcctggggaacttcgttctgcacggggcccactcagctctgcaccagagattgtgcacgaggacttgaagatggggtctgatggggagagtgaccaggcttcagccacgtcctcggatgaggtgcagtctccagtgagagtgcgtatgcgcaaccatcccccacgcaagatctccactgaggacatcaacaagcgcctatcactaccagctgacatccggctgcctgagggctacctggagaagctgaccctcaatagccccatctttgacaagcccctcagccgccgcctccgtcgtgtcagc

SEQ ID NO: 340726 - DNA, 601 bp, Artificial Sequence
  derived and/or modified sequence
gaaaagtcatcttctcgcgaacctttaaaatgccttcctccccaagcacctcaagggactagaactgagtgcttcatttgtcttttttcctccttgcaaaagtcccgtttgccaccatggggatgtaccaagtgagaccgagtagggggaacgagtggtgattgacgcgccaggttactggccactgctcacctaggcgctagcaaacttctgccaagatcggaactgagtactaaacagcctccacagttctccctggtgccgtctccggcttggcgccgcatcctcctctgggctcgcgatggccgcgtcccctcccgctgcggacgggtcctttggtacatgcagtccgaggtcctcaggatatagccgtgacctaaacacagaaatctaccctggcggagctgatcttctagttgtggcgatcgccatggatcggatgaagaagatcaaacggcagctgtcaatgacactccgaggtggccgaggcatagacaagaccaatggtgcccctgagcagataggcctggatgagagtggtggtggtggcggcagtgaccctggagaggcccccacacgtgctgctcctggggaacttcgt

SEQ ID NO: 340727 - protein, 1755 aa, Artificial Sequence
  derived and/or modified sequence
MLSATPLYGNVHSWMNSERVRMCGASEDRKILVNDGDASKARLELREENPLNHNVVDASTAHRIDGLAALSMDRTGLIREGLRVPGNIVYSSLCGLGSEKGREAATSTLGGLGFSSERNPEMQFKPNTPETVEASAVSGKPPNGFSAIYKTPPGIQKSAVATAEALGLDRPASDKQSPLNINGASYLRLPWVNPYMEGATPAIYPFLDSPNKYSLNMYKALLPQQSYSLAQPLYSPVCTNGERFLYLPPPHYVGPHIPSSLASPMRLSTPSASPAIPPLVHCADKSLPWKMGVSPGNPVDSHAYPHIQNSKQPRVPSAKAVTSGLPGDTALLLPPSPRPSPRVHLPTQPAADTYSEFHKHYARISTSPSVALSKPYMTVSSEFPAARLSNGKYPKAPEGGEGAQPVPGHARKTAVQDRKDGSSPPLLEKQTVTKDVTDKPLDLSSKVVDVDASKADHMKKMAPTVLVHSRAGSGLVLSGSEIPKETLSPPGNGCAIYRSEIISTAPSSWVVPGPSPNEENNGKSMSLKNKALDWAIPQQRSSSCPRMGGTDAVITNVSGSVSSAGRPASASPAPNANADGTKTSRSSVETTPSVIQHVGQPPATPAKHSSSTSSKGAKASNPEPSFKANENGLPPSSIFLSPNEAFRSPPIPYPRSYLPYPAPEGIAVSPLSLHGKGPVYPHPVLLPNGSLFPGHLAPKPGLPYGLPTGRPEFVTYQDALGLGMVHPMLIPHTPIEITKEEKPERRSRSHERARYEDPTLRNRFSEILETSSTKLHPDVPTDKNLKPNPNWNQGKTVVKSDKLVYVDLLREEPDAKTDTNVSKPSFAAESVGQSAEPPKPSVEPALQQHRDFIALREELGRISDFHETYTFKQPVFTVSKDSVLAGTNKENLGLPVSTPFLEPPLGSDGPAVTFGKTQEDPKPFCVGSAPPSVDVTPTYTKDGADEAESNDGKVLKPKPSKLAKRIANSAGYVGDRFKCVTTELYADSSQLSREQRALQMEGLQEDSILCLPAAYCERAMMRFSELEMKEREGGHPATKDSEMCKFSPADWERLKGNQDKKPKSVTLEEAIAEQNESERCEYSVGNKHRDPFEAPEDKDLPVEKYFVERQPVSEPPADQVASDMPHSPTLRVDRKRKVSGDSSHTETTAEEVPEDPLLKAKRRRVSKDDWPEREMTNSSSNHLEDPHYSELTNLKVCIELTGLHPKKQRHLLHLRERWEQQVSAADGKPGRQSRKEVTQATQPEAIPQGTNITEEKPGRKRAEAKGNRSWSEESLKPSDNEQGLPVFSGSPPMKSLSSTSAGGKKQAQPSCAPASRPPAKQQKIKENQKTDVLCADEEEDCQAASLLQKYTDNSEKPSGKRLCKTKHLIPQESRRGLPLTGEYYVENADGKVTVRRFRKRPEPSSDYDLSPAKQEPKPFDRLQQLLPASQSTQLPCSSSPQETTQSRPMPPEARRLIVNKNAGETLLQRAARLGYEEVVLYCLENKICDVNHRDNAGYCALHEACARGWLNIVRHLLEYGADVNCSAQDGTRPLHDAVENDHLEIVRLLLSYGADPTLATYSGRTIMKMTHSELMEKFLTDYLNDLQGRNDDDASGTWDFYGSSVCEPDDESGYDVLANPPGPEDQDDDDDAYSDVFEFEFSETPLLPCYNIQVSVAQGPRNWLLLSDVLKKLKMSSRIFRCNFPNVEIVTIAEAEFYRQVSASLLFSCSKDLEAFNPESKELLDLVEFTNEIQTLLGSSVEWLHPSDLASDNYW

SEQ ID NO: 340728 - DNA, 5268 bp, Artificial Sequence
  derived and/or modified sequence
atgctgagtgctactccactgtacgggaatgttcacagctggatgaacagtgagcgggtgcggatgtgtggcgcttctgaagacagaaaaatactggtgaacgatggcgacgcttccaaggcccgtctggagctaagagaggaaaatcccctgaaccataacgtagtggacgcttctactgcccacagaattgatggcctcgcagccctgagcatggacaggacaggcctgatacgagagggactgcgagtgccaggcaatatcgtgtactcttcactctgcggcctgggatcagagaagggacgcgaggcagcaacatctactttggggggcttgggcttttctagtgaacggaatcccgaaatgcagtttaagccgaatacgccagaaacagtggaggcctctgccgtttccgggaagcctcctaacgggttctctgccatctataagacgccccctggcatccagaaatctgctgtggctacagcggaagctctagggctggatcggccggctagcgataaacagtcacctcttaacatcaacggggccagttacctgcgtctgccttgggtgaacccctacatggaaggtgctacccctgccatctatccatttcttgactctcctaataaatactctttaaatatgtacaaagcactgctgccgcagcagtcctactccctcgcccaaccactgtactcacccgtgtgtacgaacggagaaaggtttttgtacttgccaccccctcactatgtcggcccccatattccttcttccttggcctctcccatgagactaagcaccccgagtgcgtcccctgccatcccaccgttggtgcactgtgcggataagagcctaccctggaaaatgggggtctcacccgggaacccggtggacagtcatgcttatcctcatatccagaacagtaaacagccaagggttccgtccgcaaaagcagtgacctctggcctacctggagatactgccctgctgttgccaccatccccccgaccatctcccagggttcatttgccaacccagcctgccgcagacacatatagcgaatttcacaagcattacgccaggataagcacaagccccagtgttgctctatccaagccgtacatgaccgtgtctagtgagtttcccgcagctcgcctgtccaatggaaagtacccaaaggctccggaagggggcgagggtgcgcagccggtgcctggccatgccagaaaaactgcagtgcaagatcggaaggacggctcttcaccacccttacttgagaagcagacggtcacaaaagacgtaacggataaacccctggatctgtcctccaaggttgtcgatgtggacgcaagcaaggcggatcacatgaaaaaaatggccccgaccgtgctcgtgcatagccgagccggatcagggctggtactttcaggctctgagataccaaaggagaccttgtcaccccccgggaatggctgcgcaatctacagatccgagattatctccaccgcaccatcaagctgggttgttccaggcccctcccccaatgaggaaaataacggtaaatctatgtccctgaagaacaaggccctcgactgggcaatcccacaacagcggagctctagctgcccgaggatgggcggcactgatgccgtgatcacaaatgtgagcgggagtgtatcctcagccggtagacccgctagcgcaagcccagccccgaacgctaacgccgatgggacaaaaacctcaaggagcagcgtggagactaccccctcagtcattcaacatgtgggccaaccgcccgcaactcctgccaagcactcttcctcgacttcctccaagggggccaaagcttccaatcctgagccctcctttaaggctaatgagaacggcctgccgccttctagtatctttctctctcctaacgaggcttttcggagccccccgatcccgtaccccagaagctatctcccttatcccgcgcctgaggggattgcagtgtcacctctcagccttcacggaaagggtcctgtctacccgcacccggtcctccttccaaacggtagtctgttccctgggcacctggcgcctaagcctggcctaccttacggccttcctacggggcggcctgagtttgttacttatcaggacgctttgggactagggatggtacacccaatgctgataccccacacgcccattgagattacaaaggaagagaagccagagcgacgaagccgaagtcacgaaagggccaggtacgaagacccgaccttgagaaaccggttctccgagatcctggaaacttcatccacaaaactacatcctgacgtaccaacagataaaaatctcaaacccaaccccaactggaatcagggaaaaacagtggtgaaatctgacaagttagtctacgttgatctcctgagagaagagcctgacgcgaaaacggacaccaacgtgagcaaaccttctttcgcggccgaaagcgttggccagtcagccgagcctccaaagcctagtgtggagcccgccttacagcagcatcgagactttatcgctcttcgtgaggagctcgggcgaatcagcgatttccacgaaacgtatacgttcaagcaaccagtgttcaccgtgagtaaggacagcgttctggccgggacaaataaagaaaatctcggcttacccgtttctacgccatttctggagccccctctcggtagcgacggacctgctgtgacatttggcaagacacaggaggaccctaaacctttctgtgtgggaagtgccccacccagtgtggatgtgaccccgacatataccaaagatggcgccgatgaagctgagagcaacgacggaaaagtccttaaacccaaaccctcaaagttggccaaaaggatagcaaatagcgctggatacgttggggacagatttaaatgcgttactaccgagctctatgcggattctagccaactgtctcgggagcagagggcactgcagatggagggattacaggaagacagtatactctgcctcccagcagcatactgtgagcgcgctatgatgcggttcagcgagttggagatgaaggagagagaaggagggcatccagccactaaagattcagagatgtgcaagttctctcccgctgattgggagcggctaaaggggaaccaggataaaaaaccaaaatccgtgacccttgaagaggcaatcgccgaacagaatgagagcgagagatgtgagtacagcgtggggaataagcacagagaccctttcgaggcgcccgaggataaagatctccctgttgaaaagtactttgtcgaaaggcagcccgtgtccgagccacctgccgaccaggtggcctcagatatgccccacagccccacactgcgggtcgatcggaagcgcaaggtaagcggagacagctcccacacagagactaccgcggaagaagtgccagaggatcccctcctgaaagccaagcggaggagggtgagcaaggacgattggccggaacgtgagatgacaaactcttcctccaaccacctggaggacccgcactacagtgaactgacaaacctaaaagtctgcatcgaacttacagggctgcaccctaagaagcagcgacatctgctgcacctccgcgaaagatgggaacagcaggtgtcagcagcagatgggaaacccggccgccagtccaggaaggaagtgactcaggctacgcagccagaagccatcccacagggcactaatataactgaggagaagcccggcagaaagcgggcagaagctaaagggaaccgcagctggagcgaggagagcttaaaacctagcgataatgagcagggtctgccagtcttctcgggtagcccgccaatgaaatccctctcctctaccagtgcagggggtaaaaagcaagcacagccttcttgcgcaccagcgagccgccctcctgctaaacaacagaaaatcaaggagaatcagaagacggacgtcttgtgtgccgatgaggaagaagattgtcaagcggcatcccttctccagaaatataccgacaatagcgagaagccgtccggaaaacggctgtgcaaaaccaaacacctgattccgcaggagtcccggaggggcctaccccttactggcgaatattatgtggaaaacgcggatggaaaagttacagtgcgccgtttccgcaagagacccgaaccttcttccgactatgatctgtcaccggccaagcaggagccaaaacctttcgataggctacaacagctgctccccgcaagtcagagcactcaactcccttgcagctcatcccctcaggaaacaacgcagtcccgccccatgccccccgaggcaagaagactaattgtcaacaaaaatgcgggagagacgctgttgcagcgggcagccaggctgggatatgaggaggttgtcctgtactgtttagagaacaaaatatgcgatgtgaaccatcgcgacaacgctgggtattgcgctctgcatgaggcctgcgcaaggggctggctgaacatcgttcggcacctgctagagtatggggcagatgttaattgttcggcacaggatggtacacgcccactgcatgacgcagtggagaatgatcatctggagatcgtgcgcctattgctgagttacggagcggaccctacgttagctacctacagcggcagaacgattatgaaaatgacccactccgagcttatggagaagttcctgacagactatctgaacgacctccagggcaggaatgacgatgacgccagtggcacctgggatttctatggtagctccgtttgtgaaccagacgacgagagcggatatgacgtactcgcgaatcccccaggacccgaagaccaagacgatgacgacgatgcctattctgatgtcttcgagtttgagttctctgaaactcctcttctgccctgctacaatatccaggtgtcagtggctcaagggccaaggaactggttactgttgtccgacgtgctgaagaagcttaagatgtcatcccggatcttccgctgcaactttccgaacgtcgaaattgtgactattgccgaggcggaattctataggcaagtgtctgcgtcccttttgttttcctgttctaaggatctggaagccttcaacccggagtccaaagaactgctggatttagtggaatttactaatgagatccaaacacttctgggaagcagtgtggagtggttgcaccccagcgacctggcctctgacaattactggtag

SEQ ID NO: 340729 - DNA, 87 bp, Artificial Sequence
  derived and/or modified sequence
atgctctccgccaccccactctacggcaacgtgcattcctggatgaattccgagagagtgcggatgtgcggggcctctgaagactag

SEQ ID NO: 340730 - DNA, 5268 bp, Artificial Sequence
  derived and/or modified sequence
atgctgagcgccacccccctgtatggaaatgtgcacagctggatgaacagcgagcgggtgaggatgtgtggggccagcgaggacaggaagatcctggtgaatgatggagatgccagcaaggcccggctggagctgcgggaggagaaccccctgaaccacaacgtggtggatgccagcacagcccacagaattgatggcctggccgccctgtccatggacagaacaggcctcatccgggagggcctgcgggtgcccggcaacatcgtgtacagcagcctgtgtggcctgggcagcgagaagggccgggaggccgccaccagcaccctgggcggcctgggcttcagcagcgagaggaaccctgagatgcagttcaagcccaacaccccagagaccgtggaggccagcgctgtgtctgggaagcccccaaatggcttcagcgccatctacaagaccccacctggcatccagaagtctgctgtggccacagctgaggccctgggcctggacaggcctgccagtgacaagcagagccccctgaacatcaacggggccagctacctgcggctgccctgggtgaacccctacatggagggcgccaccccagccatctaccccttcctggacagccccaacaagtacagcctgaacatgtacaaggccctgctgccccagcagagctacagcctggcccagcccctgtacagccctgtgtgcaccaacggggagcgcttcctgtacctgcccccaccccactacgtgggcccccacatccccagcagcctggccagccccatgaggctgagcaccccatctgccagccctgccatcccccccctggtgcactgtgccgacaagagcctgccctggaagatgggcgtgtccccaggcaaccctgtggacagccacgcctacccccacatccagaacagcaagcagccccgggtgcccagcgccaaggctgtgaccagcggcctgcccggggacacagccctgctgctgccccccagcccccggcccagcccccgggtgcacctgcccacccagcctgctgctgacacctacagcgagttccacaagcactacgcccgcatcagcaccagccccagcgtggccctgagcaagccctacatgacagtgtcctctgagttccctgctgcccggctgagcaatggcaagtaccccaaggcccctgagggcggggagggcgcccagcctgtgcccggccacgccaggaagacagctgtgcaggacaggaaggatggcagcagcccccccctgctggagaagcagacagtgaccaaggatgtgacagacaagcccctggacctgagcagcaaggtggtggatgtggatgccagcaaggctgaccacatgaagaagatggcccccaccgtgctggtgcacagcagagctggcagcggcctggtgctgagcggcagcgagatccccaaggagaccctgagccccccaggaaatggctgtgccatctacagaagtgagatcatcagcacagcccccagctcctgggtggtgcccggccccagccccaatgaagaaaataatggcaagtccatgagcctgaagaacaaggccctggactgggccatcccccagcagaggagcagcagctgccccaggatgggcggcacagatgctgtgatcaccaacgtgtctggctctgtgtcctctgctggccgcccagccagcgccagccctgccccaaatgccaatgctgatggcaccaagaccagccgcagctctgtggagaccaccccatctgtcatccagcacgtgggccagcccccagccaccccagccaagcacagcagcagcaccagcagcaaaggagccaaggccagcaaccctgagcccagcttcaaggccaatgaaaatggcctgccccccagcagcatcttcctgagccccaatgaggccttccgcagcccccccatcccctaccccaggagctacctgccctacccagcccctgagggcattgctgtgagccccctgagcctgcacggcaagggccctgtgtacccccaccctgtgctgctgcccaacggcagcctcttccctggccacctggcccccaagccaggcctgccctacggcctgcccaccggccggcctgagtttgtgacctaccaggatgccctgggcctgggcatggtgcaccccatgctgatcccccacacccccatcgagatcaccaaggaggagaagccagagaggaggagccgcagccatgagcgggcccgctatgaggaccccaccctgaggaaccgcttcagcgagatcctggagaccagcagcaccaagctgcacccagatgtgcccacagacaagaacctgaagcccaaccccaactggaaccagggcaagacagtggtgaagagtgacaagctggtgtatgtggacctgctgcgggaggagccagatgccaagacagacaccaacgtgtccaagcccagctttgctgctgagagcgtgggccagagcgctgagccccccaagcccagcgtggagcccgccctgcagcagcaccgggacttcatcgccctgcgggaggagctgggccgcatcagtgacttccacgagacctacaccttcaagcagcccgtcttcaccgtgtccaaggacagcgtgctggccggcaccaacaaggagaacctgggcctgcctgtgtccacccccttcctggagccccccctgggcagtgatggccctgctgtgaccttcggcaagacccaggaggaccccaagcccttctgtgtgggcagcgccccacccagcgtggatgtgacccccacctacaccaaggatggagcagatgaagctgagagcaatgatggcaaggtgctgaagcccaagcccagcaagctggccaagagaattgccaacagcgctggctacgtgggggaccgcttcaagtgtgtgaccacagagctgtatgctgacagcagccagctgagccgggagcagagggccctgcagatggagggcctgcaggaggacagcatcctgtgcctgcctgctgcctactgtgagcgggccatgatgaggttcagcgagctggagatgaaggagcgggagggcggccacccagccaccaaggacagcgagatgtgcaagttcagccctgctgactgggagcggctgaagggcaaccaggacaagaagcccaagtctgtgaccctggaggaggccatcgccgagcagaatgaaagtgagcgctgtgagtacagcgtgggcaacaagcaccgggacccctttgaggcccctgaggacaaggacctgcctgtggagaagtactttgtggagcggcagcctgtgtctgagcccccagctgaccaggtggccagtgacatgccccacagccccaccctgcgggtggacaggaagaggaaggtgtctggggacagcagccacacagagaccacagctgaggaggtgcctgaggaccccctgctgaaggccaagagaagaagagtgtccaaggatgactggccagagcgggagatgaccaacagcagcagcaaccacctggaggacccccactacagcgagctgaccaacctgaaggtgtgcatcgagctgaccggcctgcaccccaagaagcagaggcacctgctgcacctgcgggagcgctgggagcagcaggtgtctgctgctgatggcaagccaggccggcagagcaggaaggaggtgacccaggccacccagcctgaggccatcccccagggcaccaacatcacagaggagaagccaggcaggaagagagctgaggccaagggcaacagatcctggagcgaggagagcctgaagcccagcgacaatgagcagggcctgcctgtgttcagcggcagcccccccatgaagagcctgagcagcaccagcgctgggggcaagaagcaggcccagcccagctgtgccccagccagccggcccccagccaagcagcagaagatcaaggagaaccagaagacagatgtgctgtgtgctgatgaggaggaggactgccaggccgccagcctgctgcagaagtacacagacaacagcgagaagcccagcggcaagaggctgtgcaagaccaagcacctgatcccccaggagagccggcggggcctgcccctgaccggggagtactacgtggagaatgctgatggcaaggtgacagtgcggcgcttcaggaagaggcctgagcccagcagtgactatgacctgagccctgccaagcaggagcccaagccctttgaccggctgcagcagctgctgcctgccagccagagcacccagctgccctgcagcagcagcccccaggagaccacccagagccggcccatgcctcctgaggcccggcggctgattgtgaacaagaatgctggggagaccctgctgcagagagctgcccggctgggctatgaggaggtggtgctgtactgcctggagaacaagatctgtgatgtgaaccaccgggacaatgccggctactgtgccctgcacgaggcctgtgcccggggctggctgaacatcgtgcgccacctgctggagtatggagcagatgtgaactgcagcgcccaggacggcacccggcccctgcatgatgctgtggagaatgaccacctggagatcgtgcggctgctgctgtcctatggagctgaccccaccctggccacctacagcggccgcaccatcatgaagatgacccacagcgagctgatggagaagttcctgacagactacctgaatgacctgcagggcagaaatgatgatgatgccagcggcacctgggacttctacggcagctctgtgtgtgagccagatgatgagagcggctatgatgtgctggccaaccccccaggccctgaggaccaggatgatgatgatgatgcctacagtgatgtgtttgaatttgagttcagcgagacccccctgctgccctgctacaacatccaggtgtctgtggcccagggccccaggaactggctgctgctgagtgatgtgctgaagaagctgaagatgagcagccgcatcttccgctgcaacttccccaacgtggagatcgtgaccatcgccgaggccgagttctaccggcaggtgtctgccagcctgctcttcagctgcagcaaggacctggaggccttcaaccctgagagcaaggagctgctggacctggtggagttcaccaatgagatccagaccctgctgggcagctctgtggagtggctgcaccccagcgacctggccagtgacaactactggtag

SEQ ID NO: 340731 - DNA, 87 bp, Artificial Sequence
  derived and/or modified sequence
atgctgagcgccacccccctgtatggaaatgtgcacagctggatgaacagcgagcgggtgaggatgtgtggggcctctgaagattag

SEQ ID NO: 340732 - DNA, 5268 bp, Artificial Sequence
  derived and/or modified sequence
atgctgagcgccacccccctgtacggcaacgtgcacagctggatgaattccgagagagtgaggatgtgcggagcatccgaagatagaaagatactagttaatgacggagatgcgtccaaggctcgtctggaactgcgcgaagagaaccccctgaatcacaacgtcgtggatgcttccacagcccatagaatagacggcttggccgcgctgagcatggacaggaccgggttgattcgagaagggttaagggtcccaggaaatatcgtttattcctcgctctgcgggctgggaagcgaaaaagggagggaagctgccacttccaccctcggcggacttggcttctcatctgagcgcaatcccgaaatgcagttcaaacctaatacgccggagactgtcgaggccagcgccgtgagcgggaagcccccaaatgggttttcagccatttataaaacgcctcccggcatccaaaagtccgccgtggcaaccgccgaagctttgggactcgaccgaccagcatctgataagcagtcccctttgaacataaatggcgcatcttacctgcgactgccctgggtgaacccttacatggagggagctacacccgccatttatcctttcctggactcacccaacaagtattcactcaatatgtacaaagccctgctccctcagcagagttatagcctggcccagcctctctatagccctgtgtgtacaaatggagaaaggttcttatacttaccaccacctcactatgtgggcccccacatccccagctcattggcaagccctatgaggctgagcacgccaagcgccagtccagccataccccctctggtgcattgtgccgataagtccctaccatggaaaatgggtgtaagtcccggcaaccccgtggacagccatgcatatccacacattcaaaattctaagcagcctagggtccccagtgccaaggcagtgacgtctggtttgccaggcgatactgccctcctactccccccatcacctcgccccagtcctcgggtgcacctaccgacccagccagctgccgacacctactcagaatttcataaacattacgctaggatcagtaccagcccctccgttgcactgtcaaagccttacatgacagttagctccgagttccccgcagctcggctgtccaatggcaaatatcccaaggcaccggagggaggcgaaggagcacagcccgttcccgggcacgctaggaaaaccgccgttcaggaccgtaaggacggttccagccctccccttcttgaaaaacagacagtgaccaaggacgtcactgataaacctctggatctctctagtaaggttgtcgatgtggacgcctcaaaggctgaccacatgaagaagatggccccaactgtgctcgtgcactccagagcaggcagtggcctggtcttgtccggcagcgagatccccaaggagacactctccccccccggcaacggctgcgcaatttaccgctccgaaattatttcaaccgcacctagctcctgggttgtgcccggaccctccccgaacgaggagaataacggcaaatcgatgagcctgaagaacaaggctctagactgggccatcccacagcagaggtccagttcttgtcccagaatgggtgggaccgatgcagtgattaccaacgtgtcaggatcggttagtagtgctggaaggccggcctctgccagccccgctcccaatgcaaacgcggacggcacaaaaaccagtcggagctctgtggaaaccacaccctcggtgattcagcacgtgggacagcctcccgctacccccgccaaacattcctcaagcacctcttcaaagggggctaaagcctctaatccagagccctcattcaaggccaatgagaatgggctgcctccctcatcaatattcctgagtcccaatgaggcctttagatcccctcccataccctatcctcggagttaccttccctacccagcaccggaagggattgcagtgagtccactgagtcttcacggcaaaggtcccgtgtaccctcaccctgtgttgctaccaaacggatccttgtttcccggccatcttgcacctaaaccaggcctcccctatgggctgcctactggaaggcctgagttcgttacgtaccaagatgcccttgggcttgggatggtgcaccccatgttgattcctcacactccgatcgagatcaccaaggaggagaaacccgaacggcggtccaggtcccatgagagggcaagatatgaggatccaacattgagaaataggttcagtgagatcctggagacatcctccactaagttgcaccctgatgtgccaacagacaaaaatctgaagcccaacccgaactggaaccagggcaaaaccgtcgtaaagtcagataagctggtttacgtcgacctgctgcgcgaggaacccgacgccaagactgatactaatgtgtccaagccttcatttgccgcggagagtgtagggcaatccgccgaaccccccaagccatcagttgagcctgccctgcagcagcacagagacttcattgcactgcgggaggaattaggtcgaatctccgatttccacgagacttataccttcaagcaacctgtgtttactgtcagtaaggacagcgtgctggctggcactaataaagaaaatctcggacttccagtatcgacgccctttctggagcctcccctgggatctgatggccccgccgtgaccttcggcaaaacacaggaggatcctaaaccattttgcgtcggctccgccccccccagtgtggacgtaacgcccacgtatactaaggacggagcggacgaagctgagagtaacgacggcaaggtcctgaaacccaagccgtcaaaactcgccaagaggatcgctaattctgcaggatacgtaggggatagatttaaatgcgtcaccactgagttgtatgccgactcttcccagttgagccgagagcagcgggctttgcagatggaaggcctgcaggaggatagtatactgtgtctccccgctgcatactgtgaacgagctatgatgcgcttctctgaactggaaatgaaagagagagaaggcggacaccctgctactaaggattcagagatgtgtaaatttagccccgccgactgggagcgcctgaaaggaaaccaggacaagaagccgaagagcgtgacgctcgaggaagcgatagcggaacagaacgaaagcgagcgctgtgagtactctgtaggcaataagcacagggacccatttgaagcccctgaggacaaggaccttcctgtggaaaaatacttcgtggagcggcaacccgtcagcgaacccccggccgatcaggtggcaagtgacatgccacacagccccactcttcgcgtggataggaagcgcaaagtgagcggagattcatcccataccgagactacagcagaggaagtgcctgaggatcccttgctcaaagcgaagcgaaggcgcgtgagcaaggacgattggccagagagagaaatgactaactcctctagtaaccacctggaggacccgcactattcagaactgaccaacttaaaggtgtgtatcgagcttaccggcctgcaccccaagaaacagaggcatttgctccacttacgcgaaagatgggaacagcaggtttccgccgccgatggcaaacccgggaggcagtcccgcaaggaggttacacaggcgacacagccggaagccataccacagggcactaacattactgaagagaaacccggacgaaagcgggcagaggccaaggggaatagaagctggtctgaagaaagcttaaagcctagcgacaatgaacagggattgccggtcttttcaggctcacctcccatgaagagccttagctccacaagtgctggagggaagaagcaggcccagcctagttgcgctcccgcctcaagacctcctgcaaaacaacagaaaattaaggaaaatcagaagacggatgtgctctgtgccgatgaggaagaagactgtcaggccgcttcactcctccagaagtacaccgacaatagcgagaagccaagcggcaagcggctgtgcaagactaaacatctcataccacaggaatcgcgcagggggctgccactgacaggagagtactacgtcgaaaacgcggatggaaaggtgacagtgagaagatttaggaagcgcccggaacccagcagtgactatgacctgagccctgcgaagcaggaacccaagccatttgatcgactccagcaattgctgccagcttcacagtcaacccaactgccctgctctagctctcctcaggagactacccagtctcggccaatgccgccggaggctcgtcgccttatagtgaataaaaacgccggggaaaccttactccagcgggctgctagattgggatacgaggaggtagtcctgtactgtctcgagaataagatatgcgacgtcaatcaccgggacaatgcaggatactgcgctctgcacgaggcatgtgctcggggttggctcaatattgtccggcatctattagagtacggcgcagacgtgaactgcagtgcacaggacggtactcggccactgcacgacgcagtcgaaaacgatcatctggaaatcgtcaggttactgctgtcttacggtgcagacccaacattggctacatacagtggccgcacgattatgaagatgactcatagtgagcttatggagaagtttttaacagactacctgaacgatttgcagggccgaaacgatgacgacgcatccggcacctgggacttctatggttcaagtgtctgtgaacctgatgatgagagtggttatgacgtgcttgcaaatccacctggcccagaagatcaggatgatgacgatgacgcctatagcgacgtctttgagtttgagttcagtgagactcccctcctcccctgttacaatattcaagtatctgtggcccaaggaccccgtaactggctgcttctgtctgacgttcttaagaaactgaaaatgtcatcccggattttccgttgcaatttccccaatgttgagattgtaacgatcgcggaggccgaattttacaggcaagtttcggcttcactgctgttctcctgctctaaagatctggaggcattcaacccagagtctaaggaactcctcgacttggtcgagtttacaaatgagatacaaaccttactgggaagcagtgtggagtggctgcacccttcggatctcgcaagcgataactattggtag

SEQ ID NO: 340733 - DNA, 87 bp, Artificial Sequence
  derived and/or modified sequence
atgctgagcgccacccccctgtacggcaacgtgcacagctggatgaattctgaaagagtacgtatgtgtggggcctctgaggactag

SEQ ID NO: 340734 - DNA, 5267 bp, Artificial Sequence
  derived and/or modified sequence
atgctttctgccactcctttatatggaaatgtgcactcttggatgaattcagaaagggttcgcatgtgcggagcatccgaagaccggaaaatactcgtgaacgacggcgacgccagcaaggccagactagagctccgtgaggaaaaccctttaaatcataatgtggtggatgcttccaccgctcatcggattgacggtttggcagccttaagcatggaccgaactggactgatcagggaagggctccgagtgcccggtaacattgtgtattcttctctgtgcggtctcggttccgagaaagggagagaggctgctacctctaccctaggaggtctgggattctcgtccgagcggaatccagagatgcagttcaagcccaatactccagaaaccgtcgaggcctcagccgttagcggaaagccccctaacggcttttctgctatctataagactcctcctgggattcagaaatctgctgttgctaccgccgaggccttgggcctcgaccgaccagcatcagataagcagagtccacttaacattaacggagcctcttatctccggctgccctgggtgaacccctatatggaaggtgcaacacccgctatttatccatttctggattcacctaataagtacagcctgaatatgtataaggcactgttgcctcagcagtcatactcccttgcacagcctctttacagtcctgtctgcacgaacggtgaacggtttctgtacctgcctccaccacattacgtgggccctcacattccctcatctcttgctagtcccatgaggctcagcaccccgtccgcctcacccgctattccccctctggtgcactgcgccgataagtccctcccctggaaaatgggcgttagtcccggtaatccagttgatagccacgcttacccccacatccaaaattctaagcagccgagggtgccaagcgcgaaggctgtgacctccgggctgccaggagatacagccttgctgcttccaccctccccacgccctagccccagagtgcatttacccacacagcctgcagctgatacctacagcgaattccacaaacattacgctcggatctccacttctcctagtgtagccctttctaagccctatatgaccgtttcatccgagttcccggcagccaggttatccaatggcaagtacccaaaggctcctgaggggggagaaggtgcccaaccagtcccaggccatgctcgcaagactgcagtccaggacagaaaagacggctcctcacccccactactggaaaaacaaacagtcacaaaagacgtgaccgacaaaccactcgaccttagtagcaaagtcgtggacgtggacgcaagtaaggccgaccacatgaagaaaatggcacccacagtgctcgtccacagccgggctggctcggggctggtcctgagcggaagcgaaatccccaaagagacgctgagtccgcctggaaatggctgtgctatctacaggtccgagatcatctcaactgccccttcctcctgggtggttcccggaccgtcgccgaacgaagaaaacaatgggaagtctatgagcctgaaaaataaagccctcgactgggctatcccgcaacaacgatcctccagttgccccagaatgggtggtacagatgctgtgatcaccaatgtgagtgggtctgtcagctcagccggaagacctgcctccgcttctccagcacctaatgctaacgccgacggcacgaagacctctcggtcctccgttgagaccacaccttcagttatccagcacgtgggccagcctccggctacgcccgcaaagcacagttcttctactagttctaagggagcaaaggcgtccaacccggagcctagcttcaaagctaacgagaacggtctgcctccaagctcgattttcttgtctccaaatgaggcttttcgctccccccctataccatatccaaggtcatatctgccttatccagcccctgaaggaatcgctgtgtctccgctgagcctgcacgggaaaggcccagtctatccacacccagtgctgctccccaacggttctctgttcccaggacacctcgccccaaagccagggctgccgtatggcttgccaacaggcaggcccgaatttgttacatatcaggacgctcttggactcggaatggtgcacccgatgcttatccctcacacccctattgaaattaccaaagaggaaaagcccgagcggaggagtagatcccacgaacgcgctcgctacgaggacccaacactgcgaaaccggttttccgagatcctcgagacctcctcgactaaactgcatccagacgtgcccactgacaagaacctcaaacccaatcctaactggaaccagggtaaaactgtcgtcaagtccgacaagctggtgtatgtggatctgctcagggaggaacccgacgcgaagacggacaccaatgtcagcaagccgagttttgccgcagagagcgtaggacagtccgccgagccacccaagccttccgtggaaccagcattgcagcagcatagagacttcattgccctcagggaagaactaggcaggatttcagacttccatgaaacatatactttcaagcagcctgtctttacagtgagtaaagatagcgttctcgccggaacaaataaagagaatcttggcctgccagtgtccactcctttcctggagccccctctcggctccgatggacctgcggtgacatttgggaagactcaagaggatcccaagcctttttgtgtagggagtgctcccccatccgtggatgtgacgcctacgtataccaaggatggtgctgatgaagcagaaagcaatgacggaaaggtgctgaaaccaaaacctagcaaactggctaagaggatcgccaactctgcgggatacgtgggcgaccgcttcaagtgtgtcacaactgaactgtacgctgactcctctcaattgtccagagagcagagggctctccagatggagggcctccaagaagattctatcctgtgtttgcccgcagcctactgcgaacgtgcaatgatgaggttttcagagcttgagatgaaggagcgcgagggtggccacccagctaccaaggattcagagatgtgtaagtttagccccgcagactgggagagacttaagggaaaccaggataagaaaccgaagtccgtcactcttgaagaagcaatcgcagaacagaacgagagcgagagatgtgaatattcagtaggcaataaacacagggatccttttgaagccccagaagacaaggacttgcctgttgagaaatacttcgtggagcgccaaccagtgtccgaaccaccggcagatcaggtggcctccgatatgccacacagccctactctgcgggtggacagaaagagaaaagtctcaggggattcaagccacactgaaacgacggcggaagaagtgcccgaagatcctttgctcaaggctaaaagaaggagggtgagcaaggacgactggcctgagcgcgagatgaccaattcctctagcaaccatctggaggatccgcactatagtgagctgaccaatttaaaagtctgcatagagctgactggactgcacccaaagaagcagcgtcacctgctccatctcagagagcgttgggagcagcaggtctccgccgcagacggaaagccaggaagacagtcacggaaagaggttacgcaagctacccaacctgaggccatcccccagggtactaatattaccgaggagaaaccaggaagaaaaagggcagaggctaagggaaacagatcttggagtgaggaaagcctaaaaccgagcgataacgagcagggactgcctgtcttctccggtagccccccaatgaaatcactgtcttcaacatcagcgggtggaaaaaagcaagcgcagccatcttgcgccccagctagtcgcccaccggctaagcagcagaaaatcaaggaaaatcagaagactgacgtgctgtgcgccgatgaagaggaggactgccaagccgctagtctgcttcagaagtatacggataacagcgagaaaccaagtggcaagcggctttgcaagactaaacatctgattcctcaggagtcacgcagaggactcccgctgaccggcgagtattatgtagaaaatgctgacgggaaggttactgtccgcaggttcaggaagcgcccagaacccagcagcgattatgacttgtccccagccaagcaggaacccaagcccttcgacagactccagcagctgcttcccgcttctcagtccacacagctcccctgttcatcctctccacaagaaacaacacaaagccgacctatgccacctgaagcacggagactgatcgtgaataaaaacgcaggcgaaaccttgctgcaacgagcagcacgcctgggatacgaggaggttgtgttatactgtctcgagaacaagatctgtgacgtcaatcatagggacaatgccggatattgtgcgcttcatgaagcatgtgctagaggatggttaaacattgtgcgtcacctcctagagtatggtgcggatgtgaactgcagcgcccaagatggtacacggccacttcatgatgccgtggaaaacgatcatctcgagattgtccggctgctactgagttatggcgctgatccaaccctcgctacatatagcggtcgaaccataatgaagatgacacactctgaactgatggaaaagtttttgaccgattacctgaatgatctccaaggtcggaatgatgacgacgcaagtgggacatgggatttttacggcagttcagtttgcgagccagatgacgaaagcggttatgatgtgctggccaaccccccagggcctgaagatcaggacgacgatgacgatgcgtattccgacgtgtttgaattcgagttcagcgagacacctctgctcccatgctacaacattcaagtgagtgtggcccagggccctaggaattggctcctcctgtccgatgtgctgaagaagctgaaaatgtcaagtcggatcttcagatgcaattttccaaacgtagaaatagtgacgatcgctgaggctgaattttaccgacaagtttctgctagcttgttgttttcctgttccaaggacttggaagcctttaaccccgagtctaaggagctgcttgatctggttgagtttaccaatgagatccagactctgctgggcagctcagtggagtggctgcatccatctgacttggcttccgataattattggta

SEQ ID NO: 340735 - DNA, 87 bp, Artificial Sequence
  derived and/or modified sequence
atgctgagcgccacaccgctctatgggaatgtgcactcgtggatgaatagcgaacgcgtgcgcatgtgcggcgctagtgaagattag

SEQ ID NO: 340736 - DNA, 6358 bp, Artificial Sequence
  derived and/or modified sequence
gctcgccgcgcttctccggcccggctccttctccgctcgttaacgtcgccaaccccccccacccctcatatctctctccacccacccaaccgccccccgctccttctcgccgcctcgagtccgcttgggggaaaacttcaaagagccggatcgcaggctccctgcctactcccccaccggggatttcagactagacgcttgaagcaaagctgccatcccagaagacgacatgctctcagcaacccccctgtatgggaacgttcacagctggatgaacagcgagagggtccgcatgtgtggggcgagcgaagacaggaaaatccttgtaaatgatggtgacgcttcaaaagccagactggaactgagggaagagaatcccttgaaccacaacgtggtggatgcgagcacggcccataggatcgatggcctggcagcactgagcatggaccgcactggcctgatccgggaagggctgcgggtcccgggaaacatcgtctattctagcttgtgtggactgggctcagagaaaggtcgggaggctgccacaagcactctaggtggccttgggttttcttcggaaagaaatccagagatgcagttcaaaccgaatacacccgagacagtggaggcttctgccgtctctggaaaacccccaaatggcttcagtgctatatacaaaacaccgcctggaatacaaaaaagtgctgtagccacagcagaagcgctgggcttggacaggcctgccagcgacaaacagagccctctcaacatcaatggtgctagttatctgcggctgccctgggtcaatccttacatggagggtgccacgccagccatctaccctttcctcgactcgccaaataagtattcactgaacatgtacaaggccttgctacctcagcagtcctacagcttggcccagccgctgtattctccagtctgcaccaatggggagcgctttctctacctgccgccacctcactacgtcggtccccacatcccatcgtccttggcatcacccatgaggctctcgacaccttcggcctccccagccatcccgcctctcgtccattgcgcagacaaaagcctcccgtggaagatgggcgtcagccctgggaatcctgttgattcccacgcctatcctcacatccagaacagtaagcagcccagggttccctctgccaaggcggtcaccagtggcctgccgggggacacagctctcctgttgcccccctcgcctcggccgtcaccccgagtccaccttcccacccagcctgctgcagacacctactcggagttccacaagcactatgccaggatctccacctctccttcagttgccctgtcaaagccatacatgacagttagcagcgagttccccgcggccaggctctccaatggcaagtatcccaaggctccggaagggggcgaaggtgcccagccagtgcccgggcatgcccggaagacagcggttcaagacagaaaagatggcagctcacctcctctgttggagaagcagaccgttaccaaagacgtcacagataagccactagacttgtcttctaaagtggtggatgtagatgcttccaaagctgaccacatgaaaaagatggctcccacggtcctggttcacagcagggctggaagtggcttagtgctctccggaagtgagattccgaaagaaacactatctcctccaggaaatggttgtgctatctatagatctgaaatcatcagcactgctccctcatcctgggtggtgcccgggccaagtcctaacgaagagaacaatggcaaaagcatgtcgctgaaaaacaaggcattggactgggcgataccacagcagcggagttcatcatgcccgcgcatgggcggcaccgatgctgtcatcactaacgtttcagggtcagtgtcgagtgcaggccgcccagcctccgcatcacccgcccccaatgccaatgcagatggcaccaaaaccagcaggagctctgtagaaaccacaccatccgttattcagcacgtgggccagcccccggccactcctgccaagcacagtagcagcaccagcagcaagggcgccaaagccagcaacccagaaccgagtttcaaagcaaacgagaacggccttccaccaagctctatatttctgtctccaaatgaggcattcaggtccccaccaattccctaccccaggagttacctcccttacccagcccctgagggcattgctgtaagtcccctctccttacatggcaaaggacctgtctaccctcacccagttttgttacccaatggcagtctgtttcctgggcaccttgccccaaagcctgggctgccctatgggcttcccaccggccgtccagagtttgtgacctaccaagatgccctggggttgggcatggtgcatcccatgttgataccacacacgcccatagagattactaaagaggagaaaccagagaggagatcccggtcccatgagagagcccgttacgaggacccaaccctccggaatcggttttccgagattttggaaactagcagcaccaagttacatccagatgtccccaccgacaagaacctaaagccgaaccccaactggaatcaagggaagactgttgtcaaaagcgacaagcttgtctacgtagaccttctccgagaagaaccagatgctaaaactgacacaaacgtgtccaaacccagctttgcagcagagagtgttggccagagcgctgagccccccaagccctcagttgagccggccctgcagcagcaccgtgatttcatcgccctgagagaggagttggggcgcatcagtgacttccacgaaacttatactttcaaacagccagtcttcaccgtaagcaaggacagtgttctggcaggtaccaacaaagagaacctagggttgccagtctcgactccattcctggagccacctctggggagcgatggccctgctgtaacttttggtaaaacccaagaggatcccaaaccattttgtgtgggcagtgccccaccaagtgtggatgtgacccccacctataccaaagatggagctgatgaggctgaatcaaatgatggcaaagttctgaaaccgaagccatctaagctggcaaagagaatcgccaactcagcgggttacgtgggtgaccgattcaaatgtgtcactaccgaactgtatgcagattccagtcagctcagccgggagcaacgggcattgcagatggaaggattacaagaggacagtattttatgtctacccgctgcttactgtgagcgtgcaatgatgcgcttctcagagttggagatgaaagaaagagaaggtggccacccagcaaccaaagactccgagatgtgcaaattcagcccagccgactgggaaaggttgaaaggaaatcaggacaaaaagccaaagtcggtcaccctggaggaggccattgcagaacagaacgaaagtgagagatgcgagtatagtgttggaaacaagcaccgtgatccctttgaagccccagaggacaaagatcttcctgtggagaagtactttgtggagaggcagcctgtgagcgagcctcccgcagaccaggtggcctcggacatgcctcacagccccaccctccgggtggacaggaaacgcaaagtctcaggtgacagcagccacactgagaccactgcggaggaggtgccagaggaccctctgctgaaagccaaacgccgacgagtctctaaagatgactggcctgagagggaaatgacaaacagttcctctaaccacttagaagacccacattatagtgagctgaccaacctgaaggtgtgcattgaattaacagggctccatcctaaaaaacaacgccacttgctgcaccttagagaacgatgggagcagcaggtgtcggcagcagatggcaaacctggccggcaaagcaggaaggaagtgacccaggccactcagcctgaggccattcctcaggggactaacatcactgaagagaaacctggcaggaaaagggcagaggccaaaggcaacagaagctggtcggaagagtctcttaaacccagtgacaatgaacaaggcttgcctgtgttctccggctctccgcccatgaagagtctttcatccaccagtgcaggcggcaaaaagcaggctcagccaagctgcgcaccagcctccaggccgcctgccaaacagcagaaaattaaagaaaaccagaagacagatgtgctgtgtgcagacgaagaagaggattgccaggctgcctccctgctgcagaaatacaccgacaacagcgagaagccatccgggaagagactgtgcaaaaccaaacacttgatccctcaggagtccaggcggggattgccactgacaggggaatactacgtggagaatgccgatggcaaggtgactgtccggagattcagaaagcggccggagcccagttcggactatgatctgtcaccagccaagcaggagccaaagcccttcgaccgcttgcagcaactgctaccagcctcccagtccacacagctgccatgctcaagttcccctcaggagaccacccagtctcgccctatgccgccggaagcacggagacttattgtcaataagaacgctggcgagacccttctgcagcgggcagccaggcttggctatgaggaagtggtcctgtactgcttagagaacaagatttgtgatgtaaatcatcgggacaacgcaggttactgcgccctgcatgaagcttgtgctaggggctggctcaacattgtgcgacacctccttgaatatggcgctgatgtcaactgtagtgcccaggatggaaccaggcctctgcacgatgctgttgagaacgatcacttggaaattgtccgactacttctctcttatggtgctgaccccaccttggctacgtactcaggtagaaccatcatgaaaatgacccacagtgaacttatggaaaagttcttaacagattatttaaatgacctccagggtcgcaatgatgatgacgccagtggcacttgggacttctatggcagctctgtttgtgaaccagatgatgaaagtggctatgatgttttagccaaccccccaggaccagaagaccaggatgatgatgacgatgcctatagcgatgtgtttgaatttgaattttcagagacccccctcttaccgtgttataacatccaagtatctgtggctcaggggccacgaaactggctactgctttcggatgtccttaagaaattgaaaatgtcctcccgcatatttcgctgcaattttccaaacgtggaaattgtcaccattgcagaggcagaattttatcggcaggtttctgcaagtctcttgttctcttgctccaaagacctggaagccttcaaccctgaaagtaaggagctgttagatctggtggaattcacgaacgaaattcagactctgctgggctcctctgtagagtggctccaccccagtgatctggcctcagacaactactggtgagcaagctggacccaccatgtacagtgtgttatagtgttaatccttgtgcatatgtgtcataatacaactatttctgtaaagaaaggacactattacatatgaaaatatctcttctttatataagagaaattactccagtcagaaggacttagaaacatgtttttttccttttaaacttttaagtcagtttttatgaagttgttataatgtttctttacttttcaatgcacacatgctttgggatacgtttgtttttacttggaacatttgtttcttttcttttttaaggagaaaaaaaaatgagtaaaaggagctccacactttgacttaatttcatacaaagctctgatgacaggccatgactgtagagtggtcagaactgtgtggttggtttgagggagcgaattcggggaaggcacttggtgatataactttgttttgtttacagagtacctgctcgggccaggtaaatgctattggatgtaatccagtagtgtgtaatataaattcaaaccatatccacacacaacaactaattgtatgaaacttttatatcctaatttaaaagctgtgaaattagttttcacgcatcaaaccggattgtttatatgtttaaacattttatgctcttatttaaagaagactttgagctatttttttctgtaccctgtaaaatattgaaaactaacataatatgttgaggttgcttggaaatgtacataaaactaaaattttctgaatcgtgtgtttatgtttgaaatctgtgttttaactttgtaagtaaattctctgcctttgtatttatattttacaaaaattttcttaaaaggcaataaaactgttgaggaaaggagaaaattg

SEQ ID NO: 340737 - DNA, 5268 bp, Artificial Sequence
  derived and/or modified sequence
atgctgagcgccacccccctgtacggcaacgtgcacagctggatgaacagcgagagagtgagaatgtgcggcgccagcgaggacagaaagatcctggtgaacgacggcgacgccagcaaggccagactggagctgagagaggagaaccccctgaaccacaacgtggtggacgccagcaccgcccacagaatcgacggcctggccgccctgagcatggacagaaccggcctgatcagagagggcctgagagtgcccggcaacatcgtgtacagcagcctgtgcggcctgggcagcgagaagggcagagaggccgccaccagcaccctgggcggcctgggcttcagcagcgagagaaaccccgagatgcagttcaagcccaacacccccgagaccgtggaggccagcgccgtgagcggcaagccccccaacggcttcagcgccatctacaagaccccccccggcatccagaagagcgccgtggccaccgccgaggccctgggcctggacagacccgccagcgacaagcagagccccctgaacatcaacggcgccagctacctgagactgccctgggtgaacccctacatggagggcgccacccccgccatctaccccttcctggacagccccaacaagtacagcctgaacatgtacaaggccctgctgccccagcagagctacagcctggcccagcccctgtacagccccgtgtgcaccaacggcgagagattcctgtacctgccccccccccactacgtgggcccccacatccccagcagcctggccagccccatgagactgagcacccccagcgccagccccgccatcccccccctggtgcactgcgccgacaagagcctgccctggaagatgggcgtgagccccggcaaccccgtggacagccacgcctacccccacatccagaacagcaagcagcccagagtgcccagcgccaaggccgtgaccagcggcctgcccggcgacaccgccctgctgctgccccccagccccagacccagccccagagtgcacctgcccacccagcccgccgccgacacctacagcgagttccacaagcactacgccagaatcagcaccagccccagcgtggccctgagcaagccctacatgaccgtgagcagcgagttccccgccgccagactgagcaacggcaagtaccccaaggcccccgagggcggcgagggcgcccagcccgtgcccggccacgccagaaagaccgccgtgcaggacagaaaggacggcagcagcccccccctgctggagaagcagaccgtgaccaaggacgtgaccgacaagcccctggacctgagcagcaaggtggtggacgtggacgccagcaaggccgaccacatgaagaagatggcccccaccgtgctggtgcacagcagagccggcagcggcctggtgctgagcggcagcgagatccccaaggagaccctgagcccccccggcaacggctgcgccatctacagaagcgagatcatcagcaccgcccccagcagctgggtggtgcccggccccagccccaacgaggagaacaacggcaagagcatgagcctgaagaacaaggccctggactgggccatcccccagcagagaagcagcagctgccccagaatgggcggcaccgacgccgtgatcaccaacgtgagcggcagcgtgagcagcgccggcagacccgccagcgccagccccgcccccaacgccaacgccgacggcaccaagaccagcagaagcagcgtggagaccacccccagcgtgatccagcacgtgggccagccccccgccacccccgccaagcacagcagcagcaccagcagcaagggcgccaaggccagcaaccccgagcccagcttcaaggccaacgagaacggcctgccccccagcagcatcttcctgagccccaacgaggccttcagaagcccccccatcccctaccccagaagctacctgccctaccccgcccccgagggcatcgccgtgagccccctgagcctgcacggcaagggccccgtgtacccccaccccgtgctgctgcccaacggcagcctgttccccggccacctggcccccaagcccggcctgccctacggcctgcccaccggcagacccgagttcgtgacctaccaggacgccctgggcctgggcatggtgcaccccatgctgatcccccacacccccatcgagatcaccaaggaggagaagcccgagagaagaagcagaagccacgagagagccagatacgaggaccccaccctgagaaacagattcagcgagatcctggagaccagcagcaccaagctgcaccccgacgtgcccaccgacaagaacctgaagcccaaccccaactggaaccagggcaagaccgtggtgaagagcgacaagctggtgtacgtggacctgctgagagaggagcccgacgccaagaccgacaccaacgtgagcaagcccagcttcgccgccgagagcgtgggccagagcgccgagccccccaagcccagcgtggagcccgccctgcagcagcacagagacttcatcgccctgagagaggagctgggcagaatcagcgacttccacgagacctacaccttcaagcagcccgtgttcaccgtgagcaaggacagcgtgctggccggcaccaacaaggagaacctgggcctgcccgtgagcacccccttcctggagccccccctgggcagcgacggccccgccgtgaccttcggcaagacccaggaggaccccaagcccttctgcgtgggcagcgccccccccagcgtggacgtgacccccacctacaccaaggacggcgccgacgaggccgagagcaacgacggcaaggtgctgaagcccaagcccagcaagctggccaagagaatcgccaacagcgccggctacgtgggcgacagattcaagtgcgtgaccaccgagctgtacgccgacagcagccagctgagcagagagcagagagccctgcagatggagggcctgcaggaggacagcatcctgtgcctgcccgccgcctactgcgagagagccatgatgagattcagcgagctggagatgaaggagagagagggcggccaccccgccaccaaggacagcgagatgtgcaagttcagccccgccgactgggagagactgaagggcaaccaggacaagaagcccaagagcgtgaccctggaggaggccatcgccgagcagaacgagagcgagagatgcgagtacagcgtgggcaacaagcacagagaccccttcgaggcccccgaggacaaggacctgcccgtggagaagtacttcgtggagagacagcccgtgagcgagccccccgccgaccaggtggccagcgacatgccccacagccccaccctgagagtggacagaaagagaaaggtgagcggcgacagcagccacaccgagaccaccgccgaggaggtgcccgaggaccccctgctgaaggccaagagaagaagagtgagcaaggacgactggcccgagagagagatgaccaacagcagcagcaaccacctggaggacccccactacagcgagctgaccaacctgaaggtgtgcatcgagctgaccggcctgcaccccaagaagcagagacacctgctgcacctgagagagagatgggagcagcaggtgagcgccgccgacggcaagcccggcagacagagcagaaaggaggtgacccaggccacccagcccgaggccatcccccagggcaccaacatcaccgaggagaagcccggcagaaagagagccgaggccaagggcaacagaagctggagcgaggagagcctgaagcccagcgacaacgagcagggcctgcccgtgttcagcggcagcccccccatgaagagcctgagcagcaccagcgccggcggcaagaagcaggcccagcccagctgcgcccccgccagcagaccccccgccaagcagcagaagatcaaggagaaccagaagaccgacgtgctgtgcgccgacgaggaggaggactgccaggccgccagcctgctgcagaagtacaccgacaacagcgagaagcccagcggcaagagactgtgcaagaccaagcacctgatcccccaggagagcagaagaggcctgcccctgaccggcgagtactacgtggagaacgccgacggcaaggtgaccgtgagaagattcagaaagagacccgagcccagcagcgactacgacctgagccccgccaagcaggagcccaagcccttcgacagactgcagcagctgctgcccgccagccagagcacccagctgccctgcagcagcagcccccaggagaccacccagagcagacccatgccccccgaggccagaagactgatcgtgaacaagaacgccggcgagaccctgctgcagagagccgccagactgggctacgaggaggtggtgctgtactgcctggagaacaagatctgcgacgtgaaccacagagacaacgccggctactgcgccctgcacgaggcctgcgccagaggctggctgaacatcgtgagacacctgctggagtacggcgccgacgtgaactgcagcgcccaggacggcaccagacccctgcacgacgccgtggagaacgaccacctggagatcgtgagactgctgctgagctacggcgccgaccccaccctggccacctacagcggcagaaccatcatgaagatgacccacagcgagctgatggagaagttcctgaccgactacctgaacgacctgcagggcagaaacgacgacgacgccagcggcacctgggacttctacggcagcagcgtgtgcgagcccgacgacgagagcggctacgacgtgctggccaacccccccggccccgaggaccaggacgacgacgacgacgcctacagcgacgtgttcgagttcgagttcagcgagacccccctgctgccctgctacaacatccaggtgagcgtggcccagggccccagaaactggctgctgctgagcgacgtgctgaagaagctgaagatgagcagcagaatcttcagatgcaacttccccaacgtggagatcgtgaccatcgccgaggccgagttctacagacaggtgagcgccagcctgctgttcagctgcagcaaggacctggaggccttcaaccccgagagcaaggagctgctggacctggtggagttcaccaacgagatccagaccctgctgggcagcagcgtggagtggctgcaccccagcgacctggccagcgacaactactggtag

SEQ ID NO: 340738 - DNA, 87 bp, Artificial Sequence
  derived and/or modified sequence
atgctgagcgccacccccctgtacggcaacgtgcacagctggatgaacagcgagagagtgagaatgtgcggcgccagcgaggactag

SEQ ID NO: 340739 - protein, 169 aa, Artificial Sequence
  derived and/or modified sequence
MAPRTWCPAGIFGLFCPLTLACSSLTIALTDCQPIILVSPTLSLWMVVRSVWIMQASLLGEPEEVALGPMGVVAATLEVVGTRAMGVAGIMTVDLEGMDMDMDVPETIMAETRVVMTATQEEITETIMTTEMRHAHNIDTQGIISDPGSSFQMAVFIKVFGAAPKHLIL

SEQ ID NO: 340740 - protein, 155 aa, Artificial Sequence
  derived and/or modified sequence
MAPRTWCPAGIFGLFCPLTLACSSLTIALTDCQPIILVSPTLSLWMVVRSVWIMQASLLGEPEEVALGPMGVVAATLEVVGTRAMGVAGIMTVDLEGMDMDMDVPETIMAETRVVMTATQEEITETIMTTEMRHAHNIGETWISALSEPVCHTLS

SEQ ID NO: 340741 - DNA, 2011 bp, Artificial Sequence
  derived and/or modified sequence
gctgttcgtccgggttttttacgttttaatttccaggacttgaactgccatgtcctctgaagaaggaaagctcttcgtgggagggctcaactttaacaccgacgagcaggcactggaagaccacttcagcagtttcggacctatctctgaggtggtcgttgtcaaggaccgggagactcagcggtccaggggttttggtttcatcaccttcaccaacccagagcatgcttcagttgccatgagagccatgaacggagaggtggggcctcctatctgcagagggaccttgtccccatctgcggcttccttcattctttttgtttttccctctgtgtctgctcggggcagcgtggccaccaagccccgcagtgcccactcacaggagcatgactgccttttgttctagggggtggagggcagcggcagacagagcctggccgcctgggaggcgacgactggtcctgcatgaggccgagaagccacctgtggatggttgacctgccttgggcttaggtagtagagtctgcagacctgtgggcctggcccggagaggacctcgtgagtcttctgacatggactctgaagcctcaaaccaagagaggtgtctgtctagccctgatagtcgggcagcttagaggagtggggaggagaactcagcctgagttcagtcaagatgtaagtagtagcaaggggaacatggtgcattcaggtcattttgtgtgggattctatagctcctgatgaagccattctggggtaaaggagcttattctggaacatggcacccagaacctggtgcccagcaggaatttttggcctcttttgcccacttacccttgcctgctcttccctcaccattgccctgactgactgccaacccatcatccttgtgtctcccacacttagtctctggatggtcgtcagatccgtgtggatcatgcaggcaagtctgctcggggaaccagaggaggtggctttggggcccatgggcgtggtcgcagctactctagaggtggtggggaccagggctatgggagtggcaggtattatgacagtcgacctggagggtatggatatggatatggacgttccagagactataatggcagaaaccagggtggttatgaccgctactcaggaggaaattacagagacaattatgacaactgaaatgagacatgcacataatatagatacacaaggaataatttctgatccaggatcgtccttccaaatggctgtatttataaaggtttttggagctgcaccgaagcatcttattttatagtatatcaaccttttgtttttaaattgacctgccaaggtagctgaagaccttttagacagttccatctttttttttaaattttttctgcctatttaaagacaaattatgggacgtttgtagaacctgagtatttttctttttaccagttttttagtttgagctcttaggtttattggagctagcaataattggttctggcaagtttggccagactgacttcaaaaaattaatgtgtatccagggacattttaaaaacctgtacacagtgtttattgtggttaggaagcaatttcccaatgtacctataagaaatgtgcatcaagccagcctgaccaacatggtgaaaccccatctgtactaaacataaaaaaattagcctggcatggtggtgtacgcctgtaatcccagtgacttgggaggctgaggcaggagaatcgcttgaacccgggaggcggaggttgcagtgagctaagatcgcgccactgtactccagcctgggcaacagcgagactccatctcaaaaaaaaaggaaatgtgtatcaagaacatgattatccagcggtattttctaattcagatcatcaaactgattatatagaagagttggctttaaaatgtttgcaaatgtctttttttttttaatactggaagaaaaaatattctgttgtgtctcatacagtgcttaggatgtctttcacagagcttattaaaaagatgaaacctg

SEQ ID NO: 340742 - DNA, 2162 bp, Artificial Sequence
  derived and/or modified sequence
gctcctccgagctcgctgttcgtccgggttttttacgttttaatttccaggacttgaactgccatgtcctctgaagaaggaaagctcttcgtgggagggctcaactttaacaccgacgagcaggcactggaagaccacttcagcagtttcggacctatctctgaggtggtcgttgtcaaggaccgggagactcagcggtccaggggttttggtttcatcaccttcaccaacccagagcatgcttcagttgccatgagagccatgaacggagagtctctggatggtcgtcagatccgtgtggatcatgcaggcaagtctgctcggggaaccagaggaggtggctttggggcccatgggcgtggtcgcagctactctagaggtggtggggaccagggctatgggagtggcaggtattatgacagtcgacctggagggtatggatatggatatggacgttccagagactataatggcagaaaccagggtggttatgaccgctactcaggaggaaattacagagacaattatgacaactgaaatgagacatgcacataatatagatacacaaggaataatttctgatccaggatcgtccttccaaatggctgtatttataaaggtttttggagctgcaccgaagcatcttattttatagtatatcaaccttttgtttttaaattgacctgccaaggtagctgaagaccttttagacagttccatctttttttttaaattttttctgcctatttaaagacaaattatgggacgtttgtagaacctgagtatttttctttttaccagttttttagtttgagctcttaggtttattggagctagcaataattggttctggcaagtttggccagactgacttcaaaaaattaatgtgtatccagggacattttaaaaacctgtacacagtgtttattgtggttaggaagcaatttcccaatgtacctataagaaatgtgcatcaagccagcctgaccaacatggtgaaaccccatctgtactaaacataaaaaaattagcctggcatggtggtgtacgcctgtaatcccagtgacttgggaggctgaggcaggagaatcgcttgaacccgggaggcggaggttgcagtgagctaagatcgcgccactgtactccagcctgggcaacagcgagactccatctcaaaaaaaaaggaaatgtgtatcaagaacatgattatccagcggtattttctaattcagatcatcaaactgattatatagaagagttggctttaaaatgtttgcaaatgtctttttttttttaatactggaagaaaaaatattctgttgtgtctcatacagtgcttaggatgtctttcacagagcttattaaaaagatgaaacctgagaacaaactgctttattcttactcagcccattttgcaaattaaaagtgggggcagaggtgggcggatcacctgaggtcaggagttcgagaccagcctggccaacagggcaaaaccccatctctactaaaaatacaaaagttagcggggcgtggtggcgggtgcatgtaatcccagctactcgggaggctgaggcaggagaattgcttgaacccaggaggcggaagttgcagtgagctgagattgtgccactgcactccagcctaggtgacagcaagactctgtctcaaaaaaaaaaaaatggcacatcaacgagagggaggcttggagaatatttggttggtgggtgggcagggactgccagagggttaggtgtacattgaggcctgaggcctgctggaattgggtttccttaactggtctcttatcttagtcccattgttctgagaacataagcacctaatctcatggcgtgagctaatccctatcataaatagtggtaccagttcattccttcccctgaaatgatgggggttgggcagagatgcactgaactcatctttgtgtatgagggccatgagagaggcctggtttgaaaacaatgctaagagctcagattccaggatttatgtaggggctcttctacttcccaggtatttgacctcaggtgagtcatttaatttcagccttatgccattttacattttctgtggagggttaggttaattggcatataaagccactgagaagagttggcaaagctctcagtcacggggatttgatc

SEQ ID NO: 340743 - DNA, 1130 bp, Artificial Sequence
  derived and/or modified sequence
atgcgcaatgtggccccctaatggtggctgcgctgagccagctcctcagattaccaccttattggccgcctttctcagcttttctgtagttacccatattttgttcctctttcttgtctattttctgtgctttttctctgctttccgtctcgctattttctcacatctccattttctttctccttcctgccaccattcttcatgttcttcccacaggacttgaactgccatgtcctctgaagaaggaaagctcttcgtgggagggctcaactttaacaccgacgagcaggcactggaagaccacttcagcagtttcggacctatctctgaggtggtcgttgtcaaggaccgggagactcagcggtccaggggttttggtttcatcaccttcaccaacccagagcatgcttcagttgccatgagagccatgaacggagagtctctggatggtcgtcagatccgtgtggatcatgcaggcaagtctgctcggggaaccagaggaggtggctttggggcccatgggcgtggtcgcagctactctagaggtggtggggaccagggctatgggagtggcaggtattatgacagtcgacctggagggtatggatatggatatggacgttccagagactataatggcagaaaccagggtggttatgaccgctactcaggaggaaattacagagacaattatgacaactgaaatgagacatgcacataatatagatacacaaggaataatttctgatccaggatcgtccttccaaatggctgtatttataaaggtttttggagctgcaccgaagcatcttattttatagtatatcaaccttttgtttttaaattgacctgccaaggtagctgaagaccttttagacagttccatctttttttttaaattttttctgcctatttaaagacaaattatgggacgtttgtagaacctgagtatttttctttttaccagttttttagtttgagctcttaggtttattggagctagcaataattggttctggcaagtttggccagactgacttcaaaaaattaatgtgtatccagggacattttaaaaacctgtacacagtgtttattgtggttaggaagcaatttcccaatgtacctataag

SEQ ID NO: 340744 - DNA, 1884 bp, Artificial Sequence
  derived and/or modified sequence
tggttgacctgccttgggcttaggtagtagagtctgcagacctgtgggcctggcccggagaggacctcgtgagtcttctgacatggactctgaagcctcaaaccaagagaggtgtctgtctagccctgatagtcgggcagcttagaggagtggggaggagaactcagcctgagttcagtcaagatgtaagtagtagcaaggggaacatggtgcattcaggtcattttgtgtgggattctatagctcctgatgaagccattctggggtaaaggagcttattctggaacatggcacccagaacctggtgcccagcaggaatttttggcctcttttgcccacttacccttgcctgctcttccctcaccattgccctgactgactgccaacccatcatccttgtgtctcccacacttagtctctggatggtcgtcagatccgtgtggatcatgcaggcaagtctgctcggggaaccagaggaggtggctttggggcccatgggcgtggtcgcagctactctagaggtggtggggaccagggctatgggagtggcaggtattatgacagtcgacctggagggtatggatatggatatggacgttccagagactataatggcagaaaccagggtggttatgaccgctactcaggaggaaattacagagacaattatgacaactgaaatgagacatgcacataatataggtgagacttggatatcggcattgagtgaacctgtttgtcacactctgtcatgaccctctcaccttttctggcaagactgctctgcatttctgctgccctcatacctcacccagccaacctaccaaacattcctagctaggccttccttgctctcaggtgcatatcagagcaagtttgctagggggtgggatctgaaaacccatctcctataatcttctactcttgtgtgggatggaggaaatgaaggtgtgtccctgttgtccaaccctcagcatcttcatcagctctaggaggtgagcatgttgtcagctgttacttcatgacatcacaattctccccctcttgctgttcccagatacacaaggaataatttctgatccaggatcgtccttccaaatggctgtatttataaaggtttttggagctgcaccgaagcatcttattttatagtatatcaaccttttgtttttaaattgacctgccaaggtagctgaagaccttttagacagttccatctttttttttaaattttttctgcctatttaaagacaaattatgggacgtttgtagaacctgagtatttttctttttaccagttttttagtttgagctcttaggtttattggagctagcaataattggttctggcaagtttggccagactgacttcaaaaaattaatgtgtatccagggacattttaaaaacctgtacacagtgtttattgtggttaggaagcaatttcccaatgtacctataagaaatgtgcatcaagccagcctgaccaacatggtgaaaccccatctgtactaaacataaaaaaattagcctggcatggtggtgtacgcctgtaatcccagtgacttgggaggctgaggcaggagaatcgcttgaacccgggaggcggaggttgcagtgagctaagatcgcgccactgtactccagcctgggcaacagcgagactccatctcaaaaaaaaaggaaatgtgtatcaagaacatgattatccagcggtattttctaattcagatcatcaaactgattatatagaagagttggctttaaaatgtttgcaaatgtctttttttttttaatactggaagaaaaaatattctgttgtgtctcatacagtgcttaggatgtctttcacagagcttattaaaaagatgaaacctgagaacaaa

SEQ ID NO: 340745 - DNA, 468 bp, Artificial Sequence
  derived and/or modified sequence
atggccccacgtacctggtgtccagcaggaatttttggactgttttgtcctttaacccttgcatgctcaagtctgacaatcgccctcactgactgccagccaattattttggtgtcccccacattgtccctgtggatggtcgtgagatctgtctggataatgcaagcttccttactcggggaaccagaagaggtcgcacttgggccaatgggcgtggttgcagccacactggaagtggtcggtacccgtgctatgggtgtggccggcataatgactgtggacctggaagggatggatatggatatggatgtccccgaaaccatcatggctgaaaccagggttgtcatgaccgccacccaggaggagatcacagaaacgatcatgacgaccgaaatgagacatgcgcacaacatcggcgaaacatggatatccgctctctctgaacccgtgtgccacactctgtcctag

SEQ ID NO: 340746 - DNA, 510 bp, Artificial Sequence
  derived and/or modified sequence
atggcccctaggacctggtgtcctgctggcatctttggcctcttttgtcccctgaccctagcctgctccagcctcacgatagccctcacagattgtcagcccatcattctggtgagtcccaccctgagtttgtggatggtagtcagaagcgtttggattatgcaagccagtctccttggcgaacccgaggaagtggctctgggtcctatgggcgtggtggccgcgaccctcgaggtcgtgggtacccgggctatgggggttgcgggaattatgaccgtcgatctcgagggaatggatatggacatggatgtgcctgaaacaataatggcagagacacgggtggtgatgacggctacccaggaggagatcactgaaaccatcatgacgacggaaatgcgacacgctcacaacattgacacccagggtatcatatcagaccccggcagttcatttcagatggctgtcttcataaaagtcttcggcgcagcgcctaaacaccttatcctgtag

SEQ ID NO: 340747 - DNA, 468 bp, Artificial Sequence
  derived and/or modified sequence
atggcccccaggacctggtgcccagctggcatcttcggcctcttctgccccctgaccctggcctgcagcagcctgaccatcgccctgacagactgccagcccatcatcctggtgagccccaccctgagcctgtggatggtggtgcgctctgtgtggatcatgcaggccagcctgctgggggagcctgaggaggtggccctgggccccatgggcgtggtggccgccaccctggaggtggtgggcacccgggccatgggcgtggccggcatcatgacagtggacctggagggcatggacatggacatggatgtgcctgagaccatcatggccgagaccagggtggtgatgacagccacccaggaggagatcacagagaccatcatgaccacagagatgagacatgcccacaacatcggggagacctggatcagcgccctgtctgagcctgtgtgccacaccctgtcctag

SEQ ID NO: 340748 - DNA, 510 bp, Artificial Sequence
  derived and/or modified sequence
atggcccccaggacctggtgcccagctggcatcttcggcctcttctgccccctgaccctggcctgcagcagcctgaccatcgccctgacagactgccagcccatcatcctggtgagccccaccctgagcctgtggatggtggtgcgctctgtgtggatcatgcaggccagcctgctgggggagcctgaggaggtggccctgggccccatgggcgtggtggccgccaccctggaggtggtgggcacccgggccatgggcgtggccggcatcatgacagtggacctggagggcatggacatggacatggatgtgcctgagaccatcatggccgagaccagggtggtgatgacagccacccaggaggagatcacagagaccatcatgaccacagagatgagacatgcccacaacatcgacacccagggcatcatcagtgaccccggcagcagcttccagatggctgtgttcatcaaggtgtttggagctgcccccaagcacctgatcctgtag

SEQ ID NO: 340749 - DNA, 468 bp, Artificial Sequence
  derived and/or modified sequence
atggccccccggacctggtgccccgccggcatcttcggcctgttctgtccacttaccctggcatgttcctcactaacgattgccctgaccgattgccagcccattatactggtgagccccacactcagtctgtggatggtggtgcggagtgtctggatcatgcaggcctctctactgggggagccagaagaagtcgcactcggccccatgggtgtggtggctgcgaccttggaggttgtcggaacaagagctatgggcgtggccgggatcatgacagtggacttggaggggatggatatggacatggacgtgcccgaaaccatcatggcagaaacccgcgtcgtcatgactgctactcaagaggaaattaccgagactataatgacaacggagatgcgtcatgcgcacaatatcggggagacctggatttctgcactgagtgaaccagtctgtcataccctgtcttag

SEQ ID NO: 340750 - DNA, 510 bp, Artificial Sequence
  derived and/or modified sequence
atggccccccggacctggtgccccgccggcatcttcggcctgttctgccctctgacacttgcctgtagctctctgaccattgcgctgaccgactgccagccaatcatcctggtctctccgaccctgagtttgtggatggtagtaagatccgtgtggatcatgcaggcaagcctgttgggtgagccggaggaggttgccctgggtccaatgggcgtcgtggcagcaaccctggaagtggtggggacgcgggcgatgggcgtggcaggcatcatgactgtggacttagagggcatggacatggatatggacgtgcctgaaacgatcatggccgaaactcgcgtcgtgatgactgccacgcaagaagagatcaccgagaccataatgaccaccgagatgagacatgcccacaatatcgacacccagggcattatctcggatccgggctcaagttttcagatggccgtgtttattaaggttttcggtgccgcacccaaacatttgattctgtag

SEQ ID NO: 340751 - DNA, 468 bp, Artificial Sequence
  derived and/or modified sequence
atggccccacgaacttggtgccccgcagggattttcgggctgttctgccccctgacccttgcctgttcatctctgaccattgccctgaccgactgccagcctattatacttgtgagtccgacactgtcgctttggatggtggtcagatctgtgtggatcatgcaggcctctctgttaggggagcccgaagaagtcgccctgggtccgatgggtgttgtcgccgctacacttgaagtggtcggcacccgggcaatgggggttgccggaatcatgaccgtcgacctggaaggaatggatatggatatggacgtgcccgaaacaatcatggctgaaacccgggtggtgatgacagccacgcaggaggagataacagagaccattatgacaacggaaatgagacacgcccacaatatcggagaaacctggatctcagctctcagcgaaccagtatgccatacactgagttag

SEQ ID NO: 340752 - DNA, 510 bp, Artificial Sequence
  derived and/or modified sequence
atggcccctcgcacatggtgccccgcagggatttttggccttttctgccctctgacccttgcatgttcctctctgacaatcgccctgactgattgtcaacccataatcctggtctctcctactttgagtctttggatggttgtccgcagcgtatggattatgcaagcatccctcctgggcgagcctgaggaggtagcactggggcctatgggagttgttgcagccacactggaggtggttgggacacgtgccatgggtgtggccggtattatgacagtggaccttgaaggcatggatatggatatggatgtgccggaaacaatcatggctgagacccgtgtcgtcatgacagctacccaagaggaaattactgagacaattatgactacggaaatgcgccatgcccacaacattgacacacagggcatcatttcggatcctggttccagtttccagatggctgtatttattaaagtgttcggggcagcaccaaagcatctcattttgtag

SEQ ID NO: 340753 - DNA, 468 bp, Artificial Sequence
  derived and/or modified sequence
atggcccccagaacctggtgccccgccggcatcttcggcctgttctgccccctgaccctggcctgcagcagcctgaccatcgccctgaccgactgccagcccatcatcctggtgagccccaccctgagcctgtggatggtggtgagaagcgtgtggatcatgcaggccagcctgctgggcgagcccgaggaggtggccctgggccccatgggcgtggtggccgccaccctggaggtggtgggcaccagagccatgggcgtggccggcatcatgaccgtggacctggagggcatggacatggacatggacgtgcccgagaccatcatggccgagaccagagtggtgatgaccgccacccaggaggagatcaccgagaccatcatgaccaccgagatgagacacgcccacaacatcggcgagacctggatcagcgccctgagcgagcccgtgtgccacaccctgagctag

SEQ ID NO: 340754 - DNA, 510 bp, Artificial Sequence
  derived and/or modified sequence
atggcccccagaacctggtgccccgccggcatcttcggcctgttctgccccctgaccctggcctgcagcagcctgaccatcgccctgaccgactgccagcccatcatcctggtgagccccaccctgagcctgtggatggtggtgagaagcgtgtggatcatgcaggccagcctgctgggcgagcccgaggaggtggccctgggccccatgggcgtggtggccgccaccctggaggtggtgggcaccagagccatgggcgtggccggcatcatgaccgtggacctggagggcatggacatggacatggacgtgcccgagaccatcatggccgagaccagagtggtgatgaccgccacccaggaggagatcaccgagaccatcatgaccaccgagatgagacacgcccacaacatcgacacccagggcatcatcagcgaccccggcagcagcttccagatggccgtgttcatcaaggtgttcggcgccgcccccaagcacctgatcctgtag

SEQ ID NO: 340755 - protein, 581 aa, Artificial Sequence
  derived and/or modified sequence
MAMSQESLTFKDVFVDFTLEEWQQLDSAQKNLYRDVMLENYSHLVSVGHLVGKPDVIFRLGPGDESWMADGGTPVRTCAGEDRPEVWEVDEQIDHYKESQDKFLWQAAFIGKETLKDESGQECKICRKIIYLNTDFVSVKQRLPKYYSWERCSKHHLNFLGQNRSYVRKKDDGCKAYWKVCLHYNLHKAQPAERFFDPNQRGKALHQKQALRKSQRSQTGEKLYKCTECGKVFIQKANLVVHQRTHTGEKPYECCECAKAFSQKSTLIAHQRTHTGEKPYECSECGKTFIQKSTLIKHQRTHTGEKPFVCDKCPKAFKSSYHLIRHEKTHIRQAFYKGIKCTTSSLIYQRIHTSEKPQCSEHGKASDEKPSPTKHWRTHTKENIYECSKCGKSFRGKSHLSVHQRIHTGEKPYECSICGKTFSGKSHLSVHHRTHTGEKPYECRRCGKAFGEKSTLIVHQRMHTGEKPYKCNECGKAFSEKSPLIKHQRIHTGERPYECTDCKKAFSRKSTLIKHQRIHTGEKPYKCSECGKAFSVKSTLIVHHRTHTGEKPYECRDCGKAFSGKSTLIKHQRSHTGDKNL

SEQ ID NO: 340756 - DNA, 1746 bp, Artificial Sequence
  derived and/or modified sequence
atggccatgagccaggagagcctgaccttcaaggacgtgttcgtggacttcaccctggaggagtggcagcagctggacagcgcccagaagaacctgtacagagacgtgatgctggagaactacagccacctggtgagcgtgggccacctggtgggcaagcccgacgtgatcttcagactgggccccggcgacgagagctggatggccgacggcggcacccccgtgagaacctgcgccggcgaggacagacccgaggtgtgggaggtggacgagcagatcgaccactacaaggagagccaggacaagttcctgtggcaggccgccttcatcggcaaggagaccctgaaggacgagagcggccaggagtgcaagatctgcagaaagatcatctacctgaacaccgacttcgtgagcgtgaagcagagactgcccaagtactacagctgggagagatgcagcaagcaccacctgaacttcctgggccagaacagaagctacgtgagaaagaaggacgacggctgcaaggcctactggaaggtgtgcctgcactacaacctgcacaaggcccagcccgccgagagattcttcgaccccaaccagagaggcaaggccctgcaccagaagcaggccctgagaaagagccagagaagccagaccggcgagaagctgtacaagtgcaccgagtgcggcaaggtgttcatccagaaggccaacctggtggtgcaccagagaacccacaccggcgagaagccctacgagtgctgcgagtgcgccaaggccttcagccagaagagcaccctgatcgcccaccagagaacccacaccggcgagaagccctacgagtgcagcgagtgcggcaagaccttcatccagaagagcaccctgatcaagcaccagagaacccacaccggcgagaagcccttcgtgtgcgacaagtgccccaaggccttcaagagcagctaccacctgatcagacacgagaagacccacatcagacaggccttctacaagggcatcaagtgcaccaccagcagcctgatctaccagagaatccacaccagcgagaagccccagtgcagcgagcacggcaaggccagcgacgagaagcccagccccaccaagcactggagaacccacaccaaggagaacatctacgagtgcagcaagtgcggcaagagcttcagaggcaagagccacctgagcgtgcaccagagaatccacaccggcgagaagccctacgagtgcagcatctgcggcaagaccttcagcggcaagagccacctgagcgtgcaccacagaacccacaccggcgagaagccctacgagtgcagaagatgcggcaaggccttcggcgagaagagcaccctgatcgtgcaccagagaatgcacaccggcgagaagccctacaagtgcaacgagtgcggcaaggccttcagcgagaagagccccctgatcaagcaccagagaatccacaccggcgagagaccctacgagtgcaccgactgcaagaaggccttcagcagaaagagcaccctgatcaagcaccagagaatccacaccggcgagaagccctacaagtgcagcgagtgcggcaaggccttcagcgtgaagagcaccctgatcgtgcaccacagaacccacaccggcgagaagccctacgagtgcagagactgcggcaaggccttcagcggcaagagcaccctgatcaagcaccagagaagccacaccggcgacaagaacctgtag

SEQ ID NO: 340757 - DNA, 1746 bp, Artificial Sequence
  derived and/or modified sequence
atggctatgagccaggaatccctgaccttcaaggacgtttttgtggactttactctggaggagtggcaacagctggatagcgcacagaaaaatctgtatcgggacgtaatgctggaaaactacagtcacctcgtctcagtgggtcacttggtgggaaaacctgacgtgattttcagactgggcccaggcgacgaaagctggatggcggacggggggactccagtcagaacctgtgctggcgaggatagaccagaggtttgggaagttgatgagcagatcgatcactacaaggagagccaagacaagttcctgtggcaggcagcctttatcggcaaggaaactctcaaggacgagagcggtcaggaatgcaagatatgcagaaaaattatctatctcaacacagacttcgtttctgtgaagcaacgccttccaaaatattatagctgggagcgctgctcgaagcaccatctcaattttctcggtcaaaaccgctcctacgtgagaaagaaagatgatggctgtaaagcgtactggaaggtttgtctacactacaacctgcacaaggcccagcctgccgagcgcttttttgacccaaatcagcggggtaaagctctgcaccagaaacaggcactgcggaagagccagagatctcagactggcgaaaaactgtataagtgtacagaatgcggaaaggtgttcattcaaaaggccaatctggtggtgcatcagaggactcataccggggagaagccatatgagtgctgcgagtgcgccaaggctttctcccagaagagcacactgattgctcatcagagaacccataccggcgagaaaccctatgagtgttccgaatgcggaaaaactttcatacagaagagcaccttaattaagcatcagaggactcacaccggagaaaagccgtttgtgtgcgacaagtgccctaaggcattcaagtcctcctaccaccttatccggcatgaaaagacccatatccggcaggctttttacaaaggcatcaaatgtacaactagcagcctgatttatcagagaatacatacgtcggaaaaacctcagtgcagtgaacatggaaaagcaagcgatgagaagccctctccaactaaacactggagaacccatactaaggaaaatatctatgaatgtagcaaatgcggaaagtcattccggggtaaaagtcatttgtcagtccatcaacgcatccataccggcgaaaaaccgtatgaatgttccatttgcggcaagaccttctcaggcaagtcccatctctctgttcatcaccgaacccatactggcgaaaaaccctacgagtgccgaaggtgcggcaaagcattcggcgagaaatctacattaatcgtgcatcagcgcatgcacactggcgagaagccctacaaatgcaacgaatgtggaaaggctttctcagaaaagagtcctctaatcaaacaccagcgcatccacactggcgagaggccctatgagtgcaccgattgtaagaaggcctttagtagaaagagcactctcatcaagcaccaacgcattcacaccggagaaaaaccttataaatgtagcgagtgcggcaaggccttctcagtgaaaagcaccctcatagtgcaccaccggactcacacaggggaaaagccatatgagtgtcgtgattgcggaaaggcattcagtgggaagtccacccttatcaaacaccagagatcgcatacaggtgacaagaacttatag

SEQ ID NO: 340758 - DNA, 1746 bp, Artificial Sequence
  derived and/or modified sequence
atggccatgagccaggagagcctgaccttcaaggatgtgtttgtggacttcaccctggaggagtggcagcagctggacagcgcccagaagaacctgtacagagatgtgatgctggagaactacagccacctggtgtctgtgggccacctggtgggcaagccagatgtgatcttccggctgggccctggagatgagagctggatggctgatggcggcacccctgtgaggacctgtgctggagaagatagacctgaggtgtgggaggtggatgagcagattgaccactacaaggagagccaggacaagttcctgtggcaggccgccttcatcggcaaggagaccctgaaggatgaaagtggccaggagtgcaagatctgcaggaagatcatctacctgaacacagactttgtgtctgtgaagcagaggctgcccaagtactacagctgggagcgctgcagcaagcaccacctgaacttcctgggccagaacagaagctatgtgaggaagaaggatgatggctgcaaggcctactggaaggtgtgcctgcactacaacctgcacaaggcccagcctgctgagcgcttctttgaccccaaccagaggggcaaggccctgcaccagaagcaggccctgaggaagagccagaggagccagacaggagagaagctgtacaagtgcacagaatgtgggaaggtgttcatccagaaggccaacctggtggtgcaccagaggacccacactggagagaagccctatgagtgctgtgaatgtgccaaggccttcagccagaagagcaccctcatcgcccaccagaggacccacactggagagaagccctatgaatgttctgaatgtgggaagaccttcatccagaagagcaccctcatcaagcaccagaggacccacactggagagaagccctttgtgtgtgacaagtgccccaaggccttcaagagcagctaccacctgatcagacatgagaagacccacatccggcaggccttctacaagggcatcaagtgcaccaccagcagcctcatctaccagaggatccacaccagcgagaagccccagtgcagcgagcacggcaaggccagtgatgagaagcccagccccaccaagcactggaggacccacaccaaggagaacatctatgagtgcagcaaatgtgggaagagcttccggggcaagagccacctgtctgtgcaccagaggatccacactggagagaagccctatgagtgcagcatctgtgggaagaccttcagcggcaagagccacctgtctgtgcaccacaggacccacactggagagaagccctatgagtgccgccgctgtgggaaggccttcggggagaagagcaccctgattgtgcaccagaggatgcacactggagagaagccctacaagtgcaatgaatgtgggaaggccttcagcgagaagagccccctcatcaagcaccagaggatccacactggagagcggccctatgagtgcacagactgcaagaaggccttcagcaggaagagcaccctcatcaagcaccagaggatccacactggagagaagccctacaagtgcagtgaatgtgggaaggccttctctgtgaagagcaccctgattgtgcaccacaggacccacactggagagaagccctatgagtgccgggactgtgggaaggccttcagcggcaagagcaccctcatcaagcaccagaggagccacactggagacaagaacctgtag

SEQ ID NO: 340759 - DNA, 1746 bp, Artificial Sequence
  derived and/or modified sequence
atggccatgagccaggagagcctgaccttcaaggacgtgttcgtggattttacattagaagagtggcagcaacttgactctgcccagaagaatctataccgggacgtgatgctggagaattacagtcatttggtgagcgtgggccacctggttggaaagcccgatgtaattttcaggctgggtccaggcgacgagtcatggatggctgacggcggcaccccagtgagaacttgcgcaggcgaggataggcctgaggtgtgggaagtggatgaacagatagaccattataaggagagccaagacaagtttttgtggcaggcagcattcattgggaaggaaaccctcaaggatgagtcggggcaggaatgcaaaatttgtcggaaaattatatatcttaacacggacttcgtttccgtcaaacagcggttgccaaagtattattcttgggagcgttgcagcaagcaccatctgaatttcttagggcagaacaggtcttacgtccgtaagaaagatgatggatgcaaagcctattggaaagtctgccttcactataatctgcacaaggcccagcccgcagaacggttcttcgacccgaaccagcgggggaaggcccttcatcaaaagcaggccctcaggaagagccagcgcagccaaacaggagagaagctctacaagtgtaccgagtgtgggaaagtgtttattcagaaggccaatcttgttgttcaccagaggactcacaccggagaaaagccatacgagtgttgtgaatgtgcaaaggccttcagtcaaaaaagcacccttatcgcacaccagcggacacacacaggcgagaaaccctacgaatgctcggagtgtggaaaaacatttatccagaagagcactttgataaaacaccagaggactcatactggggaaaagccttttgtgtgcgataagtgtcctaaagccttcaaaagcagctatcacctcatccgccatgaaaagacccacatccggcaggccttctacaaaggaattaaatgtacaacatcttcactaatataccagaggatacatacatctgagaagcctcagtgcagcgagcacggaaaagcttcggacgaaaagcccagccctactaaacattggagaacccatacgaaggagaacatctacgagtgtagcaagtgtggaaagagttttaggggtaaatcccacctctccgtgcaccagaggatccatacaggggagaagccatacgagtgcagcatctgcggtaaaacgttctctgggaaatctcatctgtcagttcatcaccgaactcatacgggcgaaaaaccctatgagtgccgcaggtgcggcaaagcctttggcgaaaaatctactctgatcgttcatcagaggatgcacacaggtgagaaaccatacaagtgcaacgaatgcggaaaggccttctccgagaagagtcctctgattaaacatcagcgtatacacacaggagaacgcccatacgaatgtaccgactgtaagaaggcattcagcaggaagtctacgctcatcaagcaccagaggatacacacaggggaaaagccctacaagtgttcagagtgtggcaaagctttttctgtgaagtctacacttattgtgcatcacaggacacatacgggtgagaagccgtatgagtgccgggattgcggcaaagccttctctggcaaaagcactctgattaagcatcagcgaagccacaccggggataagaatctgtag

SEQ ID NO: 340760 - DNA, 1746 bp, Artificial Sequence
  derived and/or modified sequence
atggccatgagccaagagtcattaacatttaaagacgtgttcgttgatttcaccctcgaggaatggcagcagcttgacagtgcccagaaaaacctttatagagacgtcatgctggagaattactcccatttagtgagcgtgggacatctggtggggaagcccgacgtgatcttcaggttgggacccggagatgagagctggatggcagatggcggaacccctgtcagaacgtgtgcgggagaggatagacccgaggtgtgggaggtggatgaacaaattgaccattataaagaaagtcaagacaaattcctgtggcaagctgctttcattggaaaggaaacgctgaaggacgaaagtggtcaggaatgcaaaatttgcagaaagattatctatctcaataccgatttcgttagtgtgaaacagcgacttccaaaatactatagctgggagcgctgcagcaagcaccacctcaactttttgggacaaaatagatcttatgtgcggaagaaagacgatggatgcaaagcgtattggaaagtttgtctgcattataacctgcacaaggcacaaccagctgagaggttcttcgacccgaaccaacgcggaaaagccctccatcagaaacaggccctgaggaaatctcagcggagtcaaactggtgaaaaactgtacaaatgtacagaatgtggtaaggtgttcatccagaaggcaaatttggttgtccaccagagaacccatacgggggagaaaccttatgagtgttgcgagtgcgctaaggcctttagccagaaaagcactctgatcgcccaccagcggacccatactggcgagaagccatatgagtgctccgagtgtggcaaaacattcattcagaagtcaactctcattaagcatcaacgcactcatacaggagaaaaaccttttgtgtgtgacaaatgtcctaaagcctttaaaagttcttatcatttaatccgtcatgaaaagacccatattcgacaggcattttataagggaatcaaatgcactaccagtagcttgatatatcaacgcatccacacatccgaaaagcctcagtgcagcgaacacggcaaagcatcagatgagaaaccgtcacctacgaaacactggcgcacccacactaaagaaaacatctacgaatgttcgaagtgcggtaagagttttcgaggcaaatcccacctgtctgtgcatcagagaatccacacaggggagaagccctacgagtgcagtatttgcggcaaaaccttctctggaaaatctcatttgtccgtccatcatcgtacccacacaggcgaaaaaccttacgaatgtcgacgctgcggaaaggcatttggggagaagtctacgttgattgtccaccagagaatgcatacaggtgaaaagccgtataagtgcaacgaatgcggaaaagctttctccgaaaagtctcccctgattaagcaccagcgaatccatacaggtgagagaccctacgagtgcaccgactgcaagaaggctttttctagaaagagcactctaattaagcaccagagaattcacactggtgagaaaccatacaagtgttcagaatgcgggaaggcatttagcgtgaagagcactcttatcgtgcatcaccggacccacaccggtgagaagccatacgaatgtcgggattgcgggaaagccttttctggaaaatctaccctgatcaaacatcagcgctcccacactggtgataaaaatttatag

SEQ ID NO: 340761 - DNA, 2774 bp, Artificial Sequence
  derived and/or modified sequence
ctattcccaggagggtaaaaaagcgggaacaatggctttcaggacggagggacacaaacacccaatgccgcagcgactgggagggtcgcgatgcaggaggacgaaatgggagaagggggacaagggggacttcggcctccctgcgggcgggagctaggccgctggaaagtccgctcgcctctcgccggcaagggatgacgccctgggccttttgtaccactcgccacggaaaatggtcacacgcttttgtcctcaagccgaacactatcagaaacacggggtccctggaagccgccatcttggccattggcggtggcgcacccacccccgtgctactgcgcgtgcgcggcgctgcgacacactccgaccccatcccgcgttcccagggggcggtgggaagcggaagtgctccgctgacccgggagggcggtccctagttcacactggctgttgtcagcggcctctgaggtttcaggctcttggcggtgaaggtcagagtgcagacctgagaccactgctcaccgacttcagactccagtttatctgtgccccagcttcctcacttagtctcagaagacttaggctgaggcctcagaaggagatctccatcctttgtccagagcagaacaggatggccatgtcccaggaatcattgaccttcaaggacgtgtttgtggacttcaccctggaggagtggcagcaactggactctgcccagaagaacctctacagggatgtcatgcttgagaactacagccacctggtgtccgtggggtatctagttgcgaagccagatgtgatcttcaggttgggaccaggtgaagagtcctggatggcagatggggggaccccggtacggacctgtgcaggtgaggacaggccagaagtctggcaagttgatgagcagatagatcactacaaggaaagccaagacaaacttccttggcaagctgcattcataggcaaggaaacactgaaggatgaaagcggtcaagaatccagaacatgtagaaaaagcatttatctgagcacagaatttgattctgtaaggcaaagactccctaaatattattcgtgggaaaaggcattcaaaacatcatttaaactttcttggtcaaaatggaagctatgtaagaaagaaagatgatggatgtaaagcatattggaaagtatgcttccattataatcttcataaagctcaacctgcagagagattttttgaccctaatcaacgagggaaagccctccaccaaaagcaagcccttagaaaaagtcagagaagtcaaactggggagaaactctacaaatgtactgaatgtggaaaagtgtttatccagaaagcaaacttagttgtacatcaaagaactcacaccggagagaaaccttatgaatgctgcgaatgtgcaaaagccttcagccagaagtcaaccctcatagcacaccagagaactcacacaggggagaagccctatgaatgcagtgaatgtggaaaaacctttatccagaagtcaactctgattaaacataagaaaattcatatggagagagaccctataaatgcagtgtctgtgagaaagccttcagtaggaagtcaactctcattaaacatcagataattcatatgggagaaaccttatgaatgtaataaatgtgggaaatcttttagtgttaaatcaactctcattgtatgtcacagaacataaatgcataagttgcatgctattgtgaatagtgtgatgaaattttgcactgtcctgctctttcctgctcaggatgcaaatcagtgaatctttttttttttttttttgagacagagtcttgctctgtcatccaaactggagtgcagtggcacaatcttggctcactgcaacctccgcctcttgggttcaaccgattctcctgcctcaacctcccaaatagttgggattacaggcacatgccaccatacgcagctaatttgtatttttagtagagacagggtttcaccatgttggccagcctggtcttgaactcctgacctcaagtgatccgcctgcctcagcttcccaaagtgctgggattacaggcatgagccactgcacccggcttgaatcatccttttgtccagtattatatccatgctgtatatgctacccgcccactagtcccttagctgtctcagttgtcagattgactgtcatgggattgcagtgcttgcattaaagctacccttattgtataatgaccccaaagtgcaagagtagtgatgttggcaatttgcatacaccaaaaataagttataaagtgcttccttaaagtgaaatggttaaagttcttgacttaataaagaaaaaaaatgtatgctgaggttgttaagatttacagtaagaatgaatcttctatccaagaaattgtgaaggaggaaaaagaaacttgtgctagttttgctgtcacatctgaaactgcaaaagttgtggccacagtgcatcataagtgctaagacgaaaaagacattaaatttgcggatggaaggcgtgaatagaaatgggttctgacagcaatcaggttcggtactattcacagtttcaggcatccgctagggatcttggaacatatcccccatggataagggaggggtactgtaccttgtcatattgtgcattaaagaattcattgagtgtaatcatgtaagtctaacacacatttaaaaagctctcagatatcatttcgccttcggttgatgtaagaaaattcaaaagctactcaaatcattcaataaatgataaaattattta

SEQ ID NO: 340762 - DNA, 2142 bp, Artificial Sequence
  derived and/or modified sequence
gttgcaatgagccaagaatcattgaccttcaaggacgtgtttgtggacttcaccctggaggagtggcagcaactggactctgcccagaagaacctctacagggatgtcatgcttgagaactacagccacctggtgtccgtggggtatctagttgcgaagccagatgtgatcttcaggttgggaccaggtgaagagtcctggatggcagatggggggaccccggtacggacctgtgcaggtgaggacaggccagaagtctggcaagttgatgagcagatagatcactacaaggaaagccaagacaaacttccttggcaagctgcattcataggcaaggaaacactgaaggatgaaagcggtcaagaatccagaacatgtagaaaaagcatttatctgagcacagaatttgattctgtaaggcaaagactccctaaatattattcgtgggaaaaggcattcaaaacatcatttaaactttcttggtcaaaatggaagctatgtaagaaagaaagatgatggatgtaaagcatattggaaagtatgcttccattataatcttcataaagctcaacctgcagagagattttttgaccctaatcaacgagggaaagccctccaccaaaagcaagcccttagaaaaagtcagagaagtcaaactggggagaaactctacaaatgtactgaatgtggaaaagtgtttatccagaaagcaaacttagttgtacatcaaagaactcacaccggagagaaaccttatgaatgctgcgaatgtgcaaaagccttcagccagaagtcaaccctcatagcacaccagagaactcacacaggggagaagccctatgaatgcagtgaatgtggaaaaacctttatccagaagtcaactctgattaaacataagaaaattcatatggagagagaccctataaatgcagtgtctgtgagaaagccttcagtaggaagtcaactctcattaaacatcagataattcatatgggagaaaccttatgaatgtaataaatgtgggaaatcttttagtgttaaatcaactctcattgtatgtcacagaacataaatgcataagttgcatgctattgtgaatagtgtgatgaaattttgcactgtcctgctctttcctgctcaggatgcaaatcagtgaatctttttttttttttttttgagacagagtcttgctctgtcatccaaactggagtgcagtggcacaatcttggctcactgcaacctccgcctcttgggttcaaccgattctcctgcctcaacctcccaaatagttgggattacaggcacatgccaccatacgcagctaatttgtatttttagtagagacagggtttcaccatgttggccagcctggtcttgaactcctgacctcaagtgatccgcctgcctcagcttcccaaagtgctgggattacaggcatgagccactgcacccggcttgaatcatccttttgtccagtattatatccatgctgtatatgctacccgcccactagtcccttagctgtctcagttgtcagattgactgtcatgggattgcagtgcttgcattaaagctacccttattgtataatgaccccaaagtgcaagagtagtgatgttggcaatttgcatacaccaaaaataagttataaagtgcttccttaaagtgaaatggttaaagttcttgacttaataaagaaaaaaaatgtatgctgaggttgttaagatttacagtaagaatgaatcttctatccaagaaattgtgaaggaggaaaaagaaacttgtgctagttttgctgtcacatctgaaactgcaaaagttgtggccacagtgcatcataagtgctaagacgaaaaagacattaaatttgcggatggaaggcgtgaatagaaatgggttctgacagcaatcaggttcggtactattcacagtttcaggcatccgctagggatcttggaacatatcccccatggataagggaggggtactgtaccttgtcatattgtgcattaaagaattcattgagtgtaatcatgtaagtctaacacacatttaaaaagctctcagatatcatttcgccttcggttgatgtaagaaaattcaaaagctactcaaatcattcaataaatgataaaattattt

SEQ ID NO: 340763 - DNA, 4073 bp, Artificial Sequence
  derived and/or modified sequence
ccggagggtggcgcttcgttcacactggctgttgtcatccgcccctgaggtttcaggctgtcggcagtgaaggtcagagtgcagacctgagaccactgctcaccgatttcagactccagtttatctgtgcctcggcttccccacttagtcgcagaagacttaggctgaggccccaggaagagatctccatcctttgcaggagcacaacaagatggccatgtcccaggaatcattgaccttcaaggacgtgtttgtggacttcaccctggaggagtggcagcaactggactctgcccagaagaacctctacagggatgtcatgcttgagaactacagccacctggtgtccgtggggcatctagttgggaagccagatgtgatcttcaggttgggaccaggtgacgagtcctggatggcagatggagggaccccggtacggacctgtgcaggtgaggacaggccagaagtctgggaagttgacgagcagatagatcactacaaggaaagccaagacaaatttctgtggcaagctgcattcataggcaaggaaacactgaaggatgaaagtggtcaagaatgtaaaatatgtagaaaaatcatttatctcaacacagactttgtttctgtaaaacaaagactccctaaatattattcatgggaaaggtgttcaaaacatcatttaaactttcttggtcaaaatagaagctatgtaagaaagaaagatgatggatgtaaggcatattggaaagtatgcctccattataatcttcataaagctcaacctgcagagagattttttgaccctaatcaacgagggaaagccctccaccaaaagcaagcccttagaaaaagtcagagaagtcaaactggggagaaactctacaaatgtactgaatgtggaaaagtgtttatccagaaagcaaacttagttgtacatcaaagaactcacaccggagagaaaccttatgaatgctgcgaatgtgcaaaagccttcagccagaagtcaaccctcatagcacaccagagaactcacacaggggagaagccctatgaatgcagtgaatgtggaaaaacctttatccagaagtcaactctgattaaacatcaacgaactcatacaggagagaaaccatttgtatgtgacaaatgtccaaaagcctttaagagttcatatcatcttattagacatgaaaaaacacacattagacaagcattttataaaggtattaaatgtactacgtccagccttatatatcaaagaattcacacaagtgagaaacctcagtgcagtgaacatgggaaagcctctgatgagaagcccagtcccactaaacattggagaactcatacaaaagagaacatttatgagtgtagtaaatgtgggaaaagcttcagaggaaagtcacacctctctgttcatcagagaattcatacaggagagaaaccctatgaatgtagtatatgtgggaagactttcagtggaaagtcacacctctctgtccatcatagaactcatacaggagagaaaccttatgaatgcagaagatgtgggaaagcctttggggagaagtcaacccttattgtacatcagagaatgcatacaggagagaaaccctataaatgcaacgaatgtgggaaagcctttagtgagaagtcaccactgattaaacatcagagaattcatacaggagagagaccctatgaatgcactgactgtaaaaaagccttcagtaggaagtcaactctcatcaaacatcagagaattcatacaggagaaaaaccttacaaatgtagtgaatgtgggaaggccttcagtgtgaaatcaactctcattgtgcatcacagaactcatacaggagagaaaccttatgaatgcagagactgtgggaaagcattcagtgggaagtcaactctcattaaacatcagagaagtcacacaggagataaaaacctatgattatacttgagagtgggataattatactagtagttatttgtcatttgactattactagtctcattatttgtcaaataatcatggcgagtaatcttataaatgtccagaatattggaaattcttcatatgttaatgttcatttaacttaatacaaagtacaaaagtataattccagaggtgtcaataaatgtgatcagttttttcacccagaattcttcacccaggagtgaagaactgtatgtcaaataattcaaaaggggcaaaactgaatgtagttatgtgggaaagccttcagaaataatttaaatggcactgtttatcagagtatgtatgccgaggaaaactaagaatttagtgagcttataaaaccatggtagccaggcgtggtacgtagctcacacctgtaatcctagcacttttgggaggctgaggtgggcagattgcttgagctcacaagtttgagaccagcctgggcaacatggcaaaactctgtctctacaaaaaatacaaaagttatctgagtgtagtggtgcatacctttagtcccagctactcaggaggttgaagtaggagggtggcttgagcccaggaggcagaggttgcagtgaactgagatcgtgccactgcactccagcctgggcattatagccagaccttgtcaaataaataaataaacaaacccatggtataaatgagaggaatcatgctctatattcttttattaatagagacagggtcttgctatgttgcccaggctggtcttgaactcgtagcgttaattgatcctcccacctttgcctcccaaagcacttgtattatagatatgagccaccacacttaccatgttctttaccaaacattttgtggaagaggtgtagaggtggcaaacaattataaatttaagatatgttcactgtggagtagagtatgattatttatttatttagagatggagtttcgctcttctcgcccaggctggagtgcagtggcacgatcttggctcactgcagcctctgccttccaggttcaagtgattctcctgcctcagcctcccaagtagctgggattacaggcacccaccaccacacccggctaattctttttttttttttttttttttagtagagacgcagttttgccatgttgggcaggctggtctcgaactcctgacctcaggtaatccgcccgcctcagcctcccaaagtgctgggattataggcgagagccaccacgctcagtgagtatgacatttttaaaagaacagtataaagcataaaatatcccatgtggggcaaactcccagattattttcctaaacaaatagaaaaaatgcttcctgaaatagggtaagagaggatgagtcatcaggatccctgaaacaaagatctcaaacaggagaccttacgtatattattcatcaatatcttcagtgcaaaaatgcaaagccattacagaaagggcacatagtaagcttttacatactttccttaggaacagtgcttagaacttaaaattctccatgttttaataaagagtaataattttatggtgaagcaatataagatttaaaattttcagagtatcttccataacagcagtattatttaaagtagtgaaaaaataagacaatttaatatccaatgatagatgattaaaaattggtatgtcaggtgaaataacatgcaccaattaagactactggcaaatttgggaaaatgttcgtggtaaatcattaggtaaaaaatattataaaacaataaccatatgattaatattgtacaaacaggaagtatatgaaccattatatcagtgattctgggtggttgacatataaaaattttgtgatgagtaaagttatatgcacatataagtataaatttgtatttatttaagtataaatttgtattcacctatttcataggtgagtgtgtgtgtatagataaacacatggaacaaaaagttaggtatatctgtgtagtgtggagggaaaaagctaggaaagaaatacaccaaattattaagtaaattggcatttgaatgtggggattattgatgtgtaaaaatttttttgattgtagtctccagaaatcaccaataaagtatatcgtttaaagtg

SEQ ID NO: 340764 - DNA, 2485 bp, Artificial Sequence
  derived and/or modified sequence
ctactgcgcgtgcgcggcgctgcgacacactccgaccccatcccgcgttcccagggggcggtgggaagcggaagtgctccgctgacccgggagggcggtccctagttcacactggctgttgtcagcggcctctgaggtttcaggctcttggcggtgaaggtcagagtgcagacctgagaccactgctcaccgacttcagactccagtttatctgtgccccagcttcctcacttagtctcagaagacttaggctgaggcctcagaaggagatctccatcctttgtccagagcagaacaggatggccatgtcccaggaatcattgaccttcaaggacgtgtttgtggacttcaccctggaggagtggcagcaactggactctgcccagaagaacctctacagggatgtcatgcttgagaactacagccacctggtgtccgtggggtatctagttgcgaagccagatgtgatcttcaggttgggaccaggtgaagagtcctggatggcagatggggggaccccggtacggacctgtgcaggtgaggacaggccagatgtatccatttttgcctcatgtattttgaagtgctgttattagaagtctggcaagttgatgagcagatagatcactacaaggaaagccaagacaaacttccttggcaagctgcattcataggcaaggaaacactgaaggatgaaagcggtcaagaatccagaacatgtagaaaaagcatttatctgagcacagaatttgattctgtaaggcaaagactccctaaatattattcgtgggaaaaggcattcaaaacatcatttaaactttcttggtcaaaatggaagctatgtaagaaagaaagatgatggatgtaaagcatattggaaagtatgcttccattataatcttcataaagctcaacctgcagagagattttttgaccctaatcaacgagggaaagccctccaccaaaagcaagcccttagaaaaagtcagagaagtcaaactggggagaaactctacaaatgtactgaatgtggaaaagtgtttatccagaaagcaaacttagttgtacatcaaagaactcacaccggagagaaaccttatgaatgctgcgaatgtgcaaaagccttcagccagaagtcaaccctcatagcacaccagagaactcacacaggggagaagccctatgaatgcagtgaatgtggaaaaacctttatccagaagtcaactctgattaaacataagaaaattcatatggagagagaccctataaatgcagtgtctgtgagaaagccttcagtaggaagtcaactctcattaaacatcagataattcatatgggagaaaccttatgaatgtaataaatgtgggaaatcttttagtgttaaatcaactctcattgtatgtcacagaacataaatgcataagttgcatgctattgtgaatagtgtgatgaaattttgcactgtcctgctctttcctgctcaggatgcaaatcagtgaatctttttttttttttttttgagacagagtcttgctctgtcatccaaactggagtgcagtggcacaatcttggctcactgcaacctccgcctcttgggttcaaccgattctcctgcctcaacctcccaaatagttgggattacaggcacatgccaccatacgcagctaatttgtatttttagtagagacagggtttcaccatgttggccagcctggtcttgaactcctgacctcaagtgatccgcctgcctcagcttcccaaagtgctgggattacaggcatgagccactgcacccggcttgaatcatccttttgtccagtattatatccatgctgtatatgctacccgcccactagtcccttagctgtctcagttgtcagattgactgtcatgggattgcagtgcttgcattaaagctacccttattgtataatgaccccaaagtgcaagagtagtgatgttggcaatttgcatacaccaaaaataagttataaagtgcttccttaaagtgaaatggttaaagttcttgacttaataaagaaaaaaaatgtatgctgaggttgttaagatttacagtaagaatgaatcttctatccaagaaattgtgaaggaggaaaaagaaacttgtgctagttttgctgtcacatctgaaactgcaaaagttgtggccacagtgcatcataagtgctaagacgaaaaagacattaaatttgcggatggaaggcgtgaatagaaatgggttctgacagcaatcaggttcggtactattcacagtttcaggcatccgctagggatcttggaacatatcccccatggataagggaggggtactgtaccttgtcatattgtgcattaaagaattcattgagtgtaatcatgtaagtctaacacacatttaaaaagctctcagatatcatttcgccttcggttgatgtaagaaaattcaaaagctactcaaatcattcaataaatgataaaattattt

SEQ ID NO: 340765 - DNA, 1247 bp, Artificial Sequence
  derived and/or modified sequence
gacttcagactccagtttatctgtgccccagcttcctcacttagtctcagaagacttaggctgaggcctcagaaggagatctccatcctttgtccagagcagaacaggatggccatgtcccaggaatcattgaccttcaaggacgtgtttgtggacttcaccctggaggagtggcagcaactggactctgcccagaagaacctctacagggatgtcatgcttgagaactacagccacctggtgtccgtggggtatctagttgcgaagccagatgtgatcttcaggttgggaccaggtgaagagtcctggatggcagatggggggaccccggtacggacctgtgcaggtgaggacaggccagatgtatccatttttgcctcatgtattttgaagtgctgttattagtctggcaagttgatgagcagatagatcactacaaggaaagccaagacaaacttccttggcaagctgcattcataggcaaggaaacactgaaggatgaaagcggtcaagaatccagaacatgtagaaaaagcatttatctgagcacagaatttgattctgtaaggcaaagactccctaaatattattcgtgggaaaaggcattcaaaacatcatttaaactttcttggtcaaaatggaagctatgtaagaaagaaagatgatggatgtaaagcatattggaaagtatgcttccattataatcttcataaagctcaacctgcagagagattttttgaccctaatcaacgagggaaagccctccaccaaaagcaagcccttagaaaaagtcagagaagtcaaactggggagaaactctacaaatgtactgaatgtggaaaagtgtttatccagaaagcaaacttagttgtacatcaaagaactcacaccggagagaaaccttatgaatgctgcgaatgtgcaaaagccttcagccagaagtcaaccctcatagcacaccagagaactcacacaggggagaagccctatgaatgcagtgaatgtggaaaaacctttatccagaagtcaactctgattaaacataagaaaattcatatggagagagaccctataaatgcagtgtctgtgagaaagccttcagtaggaagtcaactctcattaaacatcagataattcatatgggagaaaccttatgaatgtaataaatgtgggaaatcttttagtgttaaatcaactctcattgtatgtcacagaacataaatgcataagttgcatgctattgtgaa

SEQ ID NO: 340766 - protein, 188 aa, Artificial Sequence
  derived and/or modified sequence
MNGDDAFVRRPRVGSQIPEKMQKAFDDIAKYFSEKEWEKMKASEKIIYVYMKRKYEAMTKLGFKATLPPFMRNKRVADFQGNDFDNDPNRGNQVEHPQMTFGRLQGIFPKITPEKPAEEGNDSKGVPEASGPQNNGKQLRPSGKLNTSEKVNKTSGPKRGKHAWTHRVRERKQLVIYEEISDPQEDDE

SEQ ID NO: 340767 - protein, 128 aa, Artificial Sequence
  derived and/or modified sequence
LITSAAECPHATEVSLEFGNLYQQRKILMYSLSVEHPQMTFGRLQGIFPKITPEKPAEEGNDSKGVPEASGPQNNGKQLRPSGKLNTSEKVNKTSGPKRGKHAWTHRVRERKQLVIYEEISDPQEDDE

SEQ ID NO: 340768 - DNA, 567 bp, Artificial Sequence
  derived and/or modified sequence
atgaacggcgatgatgcctttgttaggaggcccagggtagggagtcaaatcccagaaaagatgcagaaggctttcgatgatattgccaagtatttctcggaaaaggagtgggagaagatgaaagcaagtgaaaagatcatttacgtttacatgaaaaggaagtatgaagcaatgactaagcttggcttcaaggcgacgctgcctccattcatgcgtaataaaagggttgccgacttccaggggaatgactttgataacgatcctaacagaggaaaccaggtagaacatccccaaatgacttttgggcgactccaaggaatctttcccaaaatcacacctgaaaagcctgctgaggagggtaacgacagcaaaggagtgcctgaggcctctggaccccagaataacggcaaacagctgaggccgagtggtaaattaaacaccagcgaaaaggtgaataagacttccgggcccaaaagaggtaagcacgcatggacccaccgagttagagaacggaagcagttagtcatctacgaggagatttcagatcctcaggaagatgacgaatag

SEQ ID NO: 340769 - DNA, 567 bp, Artificial Sequence
  derived and/or modified sequence
atgaacggcgatgacgcttttgtccgcagacctagagtcggtagccagatccctgaaaagatgcagaaagcgttcgatgatattgcgaaatattttagcgagaaagagtgggagaaaatgaaagctagtgagaagatcatctatgtgtacatgaagcgaaaatatgaggccatgacgaaactcggctttaaggcgaccctacccccgtttatgcggaataagcgtgtggcagattttcagggtaatgactttgataatgatccaaataggggaaaccaggtggagcaccctcagatgacattcggcagattacagggcatcttccctaaaataacacccgaaaagcctgctgaggaaggcaacgacagcaagggtgtgcctgaggctagcgggcctcagaataacgggaaacagctgagaccttccggcaagctgaacaccagtgagaaagtgaataagacaagcggccccaagcgcggaaaacatgcatggacccatagagttagggagcgcaagcagctcgttatttatgaggaaatcagcgacccacaggaggacgacgaatag

SEQ ID NO: 340770 - DNA, 387 bp, Artificial Sequence
  derived and/or modified sequence
ttgataaccagcgccgctgaatgtcctcacgcaacagaggtgtccttggaatttggaaacctctaccagcaacgtaagatcctcatgtactcacttagcgtggagcatcctcagatgacttttgggcgtcttcagggcatctttccaaaaatcaccccagagaaaccagccgaggaagggaatgactctaagggagtacctgaagcctctgggccgcaaaataacgggaagcagctgagacccagcggaaaactgaatacatctgagaaggttaataagacaagcggccctaagcgtggcaagcatgcatggacacatcgcgtgcgtgagcggaaacagctggtcatttacgaagagatctccgatccccaggaagacgatgagtag

SEQ ID NO: 340771 - DNA, 567 bp, Artificial Sequence
  derived and/or modified sequence
atgaatggagatgatgcctttgtgagaagaccccgggtgggcagccagatccctgagaagatgcagaaggcctttgatgacatcgccaagtacttcagcgagaaggagtgggagaagatgaaggccagcgagaagatcatctacgtgtacatgaagaggaaatatgaggccatgaccaagctgggcttcaaggccaccctgccccccttcatgaggaacaagagggtggccgacttccagggcaatgactttgacaatgaccccaacagaggcaaccaggtggagcacccccagatgaccttcggccgcctgcagggcatcttccccaagatcaccccagagaagccagctgaggagggcaatgacagcaagggcgtgcctgaggccagcggcccccagaacaacgggaagcagctgcggcccagcggcaagctgaacaccagcgagaaggtgaacaagaccagcggccccaagaggggcaagcacgcctggacccaccgggtgcgggagaggaagcagctggtgatctatgaggagatcagtgacccccaggaggatgatgaatag

SEQ ID NO: 340772 - DNA, 387 bp, Artificial Sequence
  derived and/or modified sequence
ctcatcaccagcgctgctgaatgtccccacgccacagaggtgtccctggagtttggaaacctgtaccagcagaggaagatcctgatgtacagcctgtctgtggagcacccccagatgaccttcggccgcctgcagggcatcttccccaagatcaccccagagaagccagctgaggagggcaatgacagcaagggcgtgcctgaggccagcggcccccagaacaacgggaagcagctgcggcccagcggcaagctgaacaccagcgagaaggtgaacaagaccagcggccccaagaggggcaagcacgcctggacccaccgggtgcgggagaggaagcagctggtgatctatgaggagatcagtgacccccaggaggatgatgaatag

SEQ ID NO: 340773 - DNA, 567 bp, Artificial Sequence
  derived and/or modified sequence
atgaacggcgacgacgccttcgtgcggcggccccgggtgggcagccagatcccggaaaaaatgcaaaaagccttcgacgacattgccaaatatttttccgagaaagagtgggagaagatgaaggcctccgagaaaataatctatgtgtacatgaaaaggaagtatgaggccatgacaaagttaggattcaaagctactctgcccccctttatgcggaacaagagggtggctgactttcagggtaacgacttcgacaatgacccgaatagaggaaatcaggtggaacaccctcagatgacttttggccggctccagggtattttccctaaaatcacccccgagaaacccgctgaggaaggcaacgactccaaaggtgtccccgaagcatccggacctcagaacaatggaaagcagcttcgacctagcggaaagcttaatacctccgagaaagtaaataagacttctggaccaaagcgtggaaaacacgcatggactcaccgcgtcagggagcgaaagcagctcgtgatatatgaagaaatcagtgacccgcaggaagatgacgaatag

SEQ ID NO: 340774 - DNA, 567 bp, Artificial Sequence
  derived and/or modified sequence
atgaacggcgacgacgccttcgtgcggcggccccgggtgggcagccaaattccagagaaaatgcagaaagcatttgatgacattgccaaatacttcagcgagaaggaatgggagaagatgaaagcatctgaaaagatcatttacgtatatatgaaaaggaaatacgaggctatgacaaaactcggtttcaaggcaactctccccccttttatgagaaataagagggtggcagattttcaaggtaacgatttcgataacgacccaaaccgtggcaaccaggtggaacatccacagatgactttcggtagactccaggggatttttcctaaaatcacacccgagaagcctgcagaggaagggaacgactccaaaggcgtcccagaggcctccggccctcaaaacaatggaaagcagctgcgtccatccggaaagcttaacacatcagagaaagttaataagacatctggaccaaaacgcggaaaacatgcatggactcaccgggtgcgcgaacggaagcagttggttatttatgaggagatcagtgatcctcaagaagacgacgagtag

SEQ ID NO: 340775 - DNA, 387 bp, Artificial Sequence
  derived and/or modified sequence
ctgatcaccagcgccgccgagtgcccccacgccaccgaggtgagcctggagttcggcaatctttaccagcaacgtaaaatcctgatgtattcgctgagcgtcgagcacccgcagatgacgttcggtcgtctccagggaatcttccccaaaatcactcctgagaaacctgccgaggaggggaacgacagtaagggagttcccgaagcttctggcccccagaataatgggaagcagctgcgtccgtctgggaaactcaacactagcgagaaggtgaacaagaccagcggcccaaaaagaggaaagcatgcctggactcatagggtccgggagaggaagcagctagtaatttatgaggagatcagcgacccgcaggaagacgacgagtag

SEQ ID NO: 340776 - DNA, 1261 bp, Artificial Sequence
  derived and/or modified sequence
cgctctgattgtttcgattcttccaaaatcagagacagagtgctcccggtgccatgaacggagacgatgcctttgtacggagacctagggttggttctcaaataccagagaagatgcaaaaggccttcgatgatattgccaaatacttctctgagaaagagtgggaaaagatgaaagcctcggagaaaatcatctatgtgtatatgaagagaaagtatgaggccatgactaaactaggtttcaaggccaccctcccacctttcatgcgtaataaacgggtcgcagacttccaggggaatgattttgataatgaccctaaccgtgggaatcaggttgaacatcctcagatgactttcggcaggctccagggaatcttcccgaagatcacgcccgagaagccagcagaggaaggaaatgattcgaagggagtgccagaagcatctggcccacagaacaatgggaaacagctgcgcccctcaggaaaactaaatacctctgagaaggttaacaagacatctggacccaaaagggggaaacatgcctggacccacagagtgcgtgagagaaagcaactggtgatttatgaagagatcagcgaccctcaggaagatgacgagtaactcccctcggggatatgacacatgcccatgatgagaagcagaacgtggtgacctttcacgaacatgggcatggctgcggatccctcgtcatcaggtgtatagcaagtgaaagcaagtgttcacaacagtgaaaagttgagcgtcatttttcttagtgtgccaagagttcgatgttagtgtttctgttgtattttgttacagtgtgccattctgttagatattagcgttttcactgatgagcaagacatacttaatgcatatttcagtttgtgtatccatgcacctacctcagaaaacaagtatcgtcaggtattctctgcatagaacaacactaccctcctctcttcccagatgtgaccactgagggcagttctgagtgtttaatttcagattttttcctctgcatttacacaaacacacacacatgccacacagacacacatgcgcgcgcgcgcgcacacacacacacacacacacacacacacacacacacaccaagtaccagtataggcatctcccaactgcttttccccatgtgtcctggtcaagcccccctcactctgtttcctgttcagcatgtactcccctcatccgattcccctctatcagtcactgccagttaataaacctttgcaaacgtt

SEQ ID NO: 340777 - DNA, 1208 bp, Artificial Sequence
  derived and/or modified sequence
atgaacggagacgatgcctttgtacggagacctagggttggttctcaaataccagagaagatgcaaaaggccttcgatgatattgccaaatacttctctgagaaagagtgggaaaagatgaaagcctcggagaaaatcatctatgtgtatatgaagagaaagtatgaggccatgactaaactaggtttcaaggccaccctcccacctttcatgcgtaataaacgggtcgcagacttccaggggaatgattttgataatgaccctaaccgtgggaatcaggttgaacatcctcagatgactttcggcaggctccagggaatcttcccgaagatcacgcccgagaagccagcagaggaaggaaatgattcgaagggagtgccagaagcatctggcccacagaacaatgggaaacagctgcgcccctcaggaaaactaaatacctctgagaaggttaacaagacatctggacccaaaagggggaaacatgcctggacccacagagtgcgtgagagaaagcaactggtgatttatgaagagatcagcgaccctcaggaagatgacgagtaactcccctcggggatatgacacatgcccatgatgagaagcagaacgtggtgacctttcacgaacatgggcatggctgcggatccctcgtcatcaggtgtatagcaagtgaaagcaagtgttcacaacagtgaaaagttgagcgtcatttttcttagtgtgccaagagttcgatgttagtgtttctgttgtattttgttacagtgtgccattctgttagatattagcgttttcactgatgagcaagacatacttaatgcatatttcagtttgtgtatccatgcacctacctcagaaaacaagtatcgtcaggtattctctgcatagaacaacactaccctcctctcttcccagatgtgaccactgagggcagttctgagtgtttaatttcagattttttcctctgcatttacacaaacacacacacatgccacacagacacacatgcgcgcgcgcgcgcacacacacacacacacacacacacacacacacacacaccaagtaccagtataggcatctcccaactgcttttccccatgtgtcctggtcaagcccccctcactctgtttcctgttcagcatgtactcccctcatccgattcccctctatcagtcactgccagttaataaacctttgcaaacgtt

SEQ ID NO: 340778 - DNA, 473 bp, Artificial Sequence
  derived and/or modified sequence
ctcataacctctgctgcagaatgccctcatgcaactgaagtctctctagagtttggaaatctttaccaacaaagaaaaattctgatgtattctctttcagttgaacatcctcagatgactttcggcaggctccagggaatcttcccgaagatcacgcccgagaagccagcagaggaaggaaatgattcgaagggagtgccagaagcatctggcccacagaacaatgggaaacagctgcgcccctcaggaaaactaaatacctctgagaaggttaacaagacatctggacccaaaagggggaaacatgcctggacccacagagtgcgtgagagaaagcaactggtgatttatgaagagatcagcgaccctcaggaagatgacgagtaactcccctcggggatatgacacatgcccatgatgagaagcagaacgtggtgacctttcacgaacatgggcatggctgcggatccctc

SEQ ID NO: 340779 - DNA, 567 bp, Artificial Sequence
  derived and/or modified sequence
atgaacggtgacgatgcttttgtccgcaggcccagagttgggagtcagataccggagaagatgcaaaaggcattcgacgatattgcaaaatatttctctgaaaaagaatgggagaagatgaaggcatccgagaaaatcatctacgtttatatgaagcgcaaatacgaggccatgactaagttgggattcaaggccactttgcccccttttatgaggaataaacgcgtggccgatttccaagggaatgacttcgacaacgaccctaaccggggtaaccaagtggagcatccacagatgacattcgggcgactgcagggcatttttccgaaaattaccccggagaagccagccgaagaggggaacgattcgaagggagtgcctgaggcaagtggccctcagaacaacggcaagcagctgcggccttccgggaaacttaacactagcgaaaaggtgaacaaaacaagcggcccaaaacgaggcaagcacgcgtggactcatagggttcgggagcggaaacagttggtcatttacgaagagattagcgaccctcaggaggacgacgagtag

SEQ ID NO: 340780 - DNA, 567 bp, Artificial Sequence
  derived and/or modified sequence
atgaacggagatgatgcgtttgtgagaaggcctagggtcggaagccaaatcccggaaaaaatgcagaaggcgtttgatgacatcgcgaaatacttttcggagaaggaatgggagaaaatgaaggcatccgaaaagatcatatatgtttatatgaagcgcaagtacgaggccatgacaaaactcggctttaaggccacgttacccccattcatgcgcaacaagagagtcgccgacttccagggaaatgattttgacaatgatccaaaccggggaaatcaggtggaacacccccagatgacattcggcaggttgcagggaatcttcccaaagattactcccgagaagcccgctgaggagggcaacgatagcaagggagtacctgaggcatcagggcctcaaaacaacggcaagcaactgcgaccctccgggaaattgaataccagcgagaaagtgaataagacatccggcccaaagagagggaagcacgcttggacccaccgggtgagagaaaggaaacagctggttatatacgaagagataagcgatcctcaggaggatgatgaatag

SEQ ID NO: 340781 - DNA, 387 bp, Artificial Sequence
  derived and/or modified sequence
ctcattacaagtgccgcagagtgtccgcatgccaccgaagtgagcttggagttcgggaatctgtatcagcaaaggaagattctcatgtactctctgtcagtcgagcacccacagatgaccttcggccgactccagggcatcttccctaagattactcccgagaaacccgctgaagaaggcaatgattcaaaaggagtgcccgaagcttcagggcctcagaacaacgggaaacagctccgtcctagtggcaaactgaatacttcagaaaaggtcaacaaaacatccggcccaaaaagggggaagcacgcctggacccacagggttcgcgaaaggaaacagctcgtgatttacgaagagatctctgacccccaagaagatgatgagtag

SEQ ID NO: 340782 - DNA, 567 bp, Artificial Sequence
  derived and/or modified sequence
atgaacggcgacgacgccttcgtgagaagacccagagtgggcagccagatccccgagaagatgcagaaggccttcgacgacatcgccaagtacttcagcgagaaggagtgggagaagatgaaggccagcgagaagatcatctacgtgtacatgaagagaaagtacgaggccatgaccaagctgggcttcaaggccaccctgccccccttcatgagaaacaagagagtggccgacttccagggcaacgacttcgacaacgaccccaacagaggcaaccaggtggagcacccccagatgaccttcggcagactgcagggcatcttccccaagatcacccccgagaagcccgccgaggagggcaacgacagcaagggcgtgcccgaggccagcggcccccagaacaacggcaagcagctgagacccagcggcaagctgaacaccagcgagaaggtgaacaagaccagcggccccaagagaggcaagcacgcctggacccacagagtgagagagagaaagcagctggtgatctacgaggagatcagcgacccccaggaggacgacgagtag

SEQ ID NO: 340783 - DNA, 387 bp, Artificial Sequence
  derived and/or modified sequence
ctgatcaccagcgccgccgagtgcccccacgccaccgaggtgagcctggagttcggcaacctgtaccagcagagaaagatcctgatgtacagcctgagcgtggagcacccccagatgaccttcggcagactgcagggcatcttccccaagatcacccccgagaagcccgccgaggagggcaacgacagcaagggcgtgcccgaggccagcggcccccagaacaacggcaagcagctgagacccagcggcaagctgaacaccagcgagaaggtgaacaagaccagcggccccaagagaggcaagcacgcctggacccacagagtgagagagagaaagcagctggtgatctacgaggagatcagcgacccccaggaggacgacgagtag

SEQ ID NO: 340784 - DNA, 567 bp, Artificial Sequence
  derived and/or modified sequence
atgaatggtgatgacgcattcgtccgccgcccccgggtggggtcccagatccctgaaaagatgcagaaggcgttcgatgatatcgccaaatacttctccgagaaagaatgggagaaaatgaaggctagcgagaagatcatctatgtttacatgaagaggaaatacgaggccatgactaaactgggattcaaagccacactaccaccattcatgcggaacaaacgggtcgcagacttccaaggcaatgatttcgataacgatcccaaccgaggtaaccaggttgagcacccacagatgacattcggtaggcttcagggtattttccccaagatcacaccagagaagcccgccgaagaagggaacgactctaagggggtgccggaggccagtggtcctcagaataatggcaaacagctcaggccatctggcaaacttaatacttccgagaaggtgaataaaacctccggtcccaaacgggggaagcacgcgtggacacatcgcgtgagggaacggaaacagctcgtcatctatgaagagataagtgatcctcaagaggacgatgaatag

SEQ ID NO: 340785 - DNA, 567 bp, Artificial Sequence
  derived and/or modified sequence
atgaacggcgacgacgccttcgtgcggcggccccgggtgggcagccagattcccgagaaaatgcagaaggctttcgacgatatcgccaagtatttctctgaaaaagagtgggagaagatgaaggcttctgagaagatcatttatgtttacatgaaacgcaagtatgaagccatgacaaagttgggcttcaaagccacacttcccccatttatgaggaacaaacgggtagctgacttccagggtaacgatttcgataacgaccctaaccgggggaaccaggtggagcacccgcagatgacctttggcagattgcaagggatattccccaaaatcacgccagaaaaaccagcagaagagggaaacgacagcaagggggtaccagaagctagtggccctcagaataacggcaaacagttaagaccatctgggaaactgaatacttccgagaaagtgaataagaccagtggaccaaagagagggaaacatgcctggactcaccgggtccgcgaacgcaagcagttagtgatttatgaggagatcagtgatcctcaagaggacgacgagtag

SEQ ID NO: 340786 - DNA, 567 bp, Artificial Sequence
  derived and/or modified sequence
atgaatggcgacgacgctttcgtccgacggccaagggtcggaagccagattcccgagaagatgcagaaggcttttgacgacattgccaagtacttttctgaaaaggaatgggaaaaaatgaaggcatccgagaagatcatctacgtgtatatgaagcggaagtatgaggcgatgactaagcttggattcaaagctactctacccccattcatgaggaataagagggtcgcggacttccagggcaatgacttcgacaacgacccaaacagaggaaatcaggtggagcatccccagatgacattcgggaggctgcaaggaatattcccaaaaatcactccagagaagccggctgaagagggaaatgacagcaagggagtgcctgaagccagtggtcctcaaaacaacggaaagcagctcaggccatccggtaaactgaatacctcggaaaaggtgaacaaaacatccggcccaaagcgaggcaagcatgcctggacccatcgggtcagggagagaaagcagctggtgatctacgaagaaatctctgacccccaggaagacgatgagtag

SEQ ID NO: 340787 - DNA, 588 bp, Artificial Sequence
  derived and/or modified sequence
atgggcgccctggccacctacatcttcctgcagaacaagtacagagagaacaacaagggccccatgctggacttcctggccaccgccgtgttcgccttcatgtggctggtgagcagcagcgcctgggccaagggcctgagcgacgtgaagatggccaccgaccccgagaacatcatcaaggagatgcccgtgtgcagacagaccggcaacacctgcaaggagctgagagaccccgtgaccagcggcctgaacaccagcgtggtgttcggcttcctgaacctggtgctgtgggtgggcaacctgtggttcgtgttcaaggagaccggctgggccgcccccttcctgagagccccccccggcgcccccgagaagcagcccgcccccggcgacgcctacggcgacgccggctacggccagggccccggcggctacggcccccaggacagctacggcccccagggcggctaccagcccgactacggccagcccgccggcagcggcggcagcggctacggcccccagggcgactacggccagcagggctacggcccccagggcgcccccaccagcttcagcaaccagatgtag

SEQ ID NO: 340788 - DNA, 588 bp, Artificial Sequence
  derived and/or modified sequence
atgggggcccttgccacctacatctttctccagaacaaatatcgcgaaaataacaagggacctatgctcgacttcttggctactgctgtgtttgccttcatgtggctggtctcatcctcagcgtgggctaagggcttatctgatgttaagatggccaccgatcctgagaacatcatcaaggagatgcccgtgtgcagacagacaggcaacacctgtaaagagctgcgtgatcccgtgacatccggcctgaatacaagcgtcgttttcgggttcctaaacctggtgttatgggtcggcaacctgtggtttgtttttaaagagactggctgggccgcaccgtttctcagagccccacctggtgctcctgagaaacagcccgcgcccggcgacgcttatggcgatgctggctatgggcaggggcccggcggatacggaccccaggatagctatggaccccagggcggctaccagccagattacgggcagcctgcaggctcaggggggtctgggtatggtcctcagggcgactatggccaacaggggtacggaccccaaggagcccctacctccttctccaatcaaatgtag

SEQ ID NO: 340789 - DNA, 588 bp, Artificial Sequence
  derived and/or modified sequence
atgggcgccctggccacctacatcttcctgcagaacaagtaccgggagaacaacaagggccccatgctggacttcctggccacagctgtgtttgccttcatgtggctggtgagcagcagcgcctgggccaagggcctgagtgatgtgaagatggccacagatcctgagaacatcatcaaggagatgcctgtgtgccggcagacaggcaacacctgcaaggagctgcgggaccctgtgaccagcggcctgaacacctctgtggtgtttggcttcctgaacctggtgctgtgggtgggcaacctgtggtttgtgttcaaggagaccggctgggccgcccccttcctgcgggcccctcctggggcccctgagaagcagcctgcccctggagatgcctatggagatgctggctacggccagggccctgggggctacggcccccaggacagctatggcccccagggcggctaccagcctgactatggccagcctgctggcagcggcggcagcggctacggcccccagggcgactatggccagcagggctacggcccccagggcgcccccaccagcttcagcaaccagatgtag

SEQ ID NO: 340790 - DNA, 588 bp, Artificial Sequence
  derived and/or modified sequence
atgggcgccctggccacctacatcttcctgcagaacaagtaccgggagaataataaaggccctatgctggattttctggccaccgccgtgttcgcctttatgtggctggtgtccagcagcgcgtgggcaaaggggttaagcgacgttaagatggccaccgaccccgaaaacatcattaaggaaatgcccgtatgtagacagaccggcaatacctgcaaggagctgagagaccctgtcacctccgggctgaatacttcggtcgtcttcggattcctaaacctcgtgctttgggtaggtaatctctggttcgtatttaaggagactggatgggcagcccccttcctgagggctccaccaggcgcgcccgagaaacagcccgccccaggagatgcctacggtgatgccggctatggtcaggggcccggtggctatggcccccaggacagttacggcccacagggtggctatcagcctgactatggacagccagctggctctggcggctctggatacggcccacaaggcgactacggacagcagggctacggaccccagggagcaccaacatcttttagtaatcagatgtag

SEQ ID NO: 340791 - DNA, 588 bp, Artificial Sequence
  derived and/or modified sequence
atgggcgcattagctacatacatatttctgcaaaataaatacagggagaataacaagggcccaatgctggattttctcgcaactgccgtctttgcgtttatgtggctggtaagttcctcggcatgggctaagggtctctccgacgtgaagatggcaaccgatccagaaaacattattaaagagatgcccgtatgcaggcagacaggtaatacttgcaaggagctgagggaccctgtgacgtccggcctgaatacatcagtcgtctttggatttctgaacctggttctgtgggtcggcaatctttggttcgtgtttaaagaaactggatgggccgctccgtttctgcgcgctcccccaggggcacccgagaaacagcccgcacctggcgatgcatacggggatgccggatacggccagggtcctggtggttacggcccacaggatagttatggcccacagggcggatatcagccagattacggccagccagcaggatccggaggcagcggctatggcccacagggggattacgggcagcaggggtatggcccacagggtgccccaacatcttttagtaaccagatgtag

SEQ ID NO: 340792 - protein, 1058 aa, Artificial Sequence
  derived and/or modified sequence
MSSSPLSKKRRVSGPDPKPGSNCSPAQSVLSEVPSVPTNGMAKNGSEADIDEGLYSRQLYVLGHEAMKRLQTSSVLVSGLRGLGVEIAKNIILGGVKAVTLHDQGTAQWADLSSQFYLREEDIGKNRAEVSQPRLAELNSYVPVTAYTGPLVEDFLSGFQVVVLTNTPLEDQLRVGEFCHNRGIKLVVADTRGLFGQLFCDFGEEMILTDSNGEQPLSAMVSMVTKDNPGVVTCLDEARHGFESGDFVSFSEVQGMVELNGNQPMEIKVLGPYTFSICDTSNFSDYIRGGIVSQVKVPKKISFKSLVASLAEPDFVVTDFAKFSRPAQLHIGFQALHQFCAQHGRPPRPRNEEDAAELVALAQAVNARALPAVQQNNLDEDLIRKLAYVAAGDLAPINAFIGGLAAQEVMKACSGKFMPIMQWLYFDALECLPEDKEVLTEDKCLQRQNRYDGQVAVFGSDLQEKLGKQKYFLVGAGAIGCELLKNFAMIGLGCGEGGEIIVTDMDTIEKSNLNRQFLFRPWDVTKLKSDTAAAAVRQMNPHIRVTSHQNRVGPDTERIYDDDFFQNLDGVANALDNVDARMYMDRRCVYYRKPLLESGTLGTKGNVQVVIPFLTESYSSSQDPPEKSIPICTLKNFPNAIEHTLQWARDEFEGLFKQPAENVNQYLTDPKFVERTLRLAGTQPLEVLEAVQRSLVLQRPQTWADCVTWACHHWHTQYSNNIRQLLHNFPPDQLTSSGAPFWSGPKRCPHPLTFDVNNPLHLDYVMAAANLFAQTYGLTGSQDRAAVATFLQSVQVPEFTPKSGVKIHVSDQELQSANASVDDSRLEELKATLPSPDKLPGFKMYPIDFEKDDDSNFHMDFIVAASNLRAENYDIPSADRHKSKLIAGKIIPAIATTTAAVVGLVCLELYKVVQGHRQLDSYKNGFLNLALPFFGFSEPLAAPRHQYYNQEWTLWDRFEVQGLQPNGEEMTLKQFLDYFKTEHKLEITMLSQGVSMLYSFFMPAAKLKERLDQPMTEIVSRVSKRKLGRHVRALVLELCCNDESGEDVEVPYVRYTIR

SEQ ID NO: 340793 - protein, 271 aa, Artificial Sequence
  derived and/or modified sequence
MSSSPLSKKRRVSGPDPKPGSNCSPAQSVLSEVPSVPTNGMAKNGSEADIDEGLYSRQLYVLGHEAMKRLQTSSVLVSGLRGLGVEIAKNIILGGVKAVTLHDQGTAQWADLSSQFYLREEDIGKNRAEVSQPRLAELNSYVPVTAYTGPLVEDFLSGFQVVVLTNTPLEDQLRVGEFCHNRGIKLVVADTRGLFGQLFCDFGEEMILTDSNGEQPLSAMVSMVTKDNPGVVTCLDEARHGFESGDFVSFSEVQGMVELNGNQPMEIKVLG

SEQ ID NO: 340794 - protein, 173 aa, Artificial Sequence
  derived and/or modified sequence
MLCVIYHLDNPVGKMSSSPLSKKRRVSGPDPKPGSNCSPAQSVLSEVPSVPTNGMAKNGSEADIDEGLYSRQLYVLGHEAMKRLQTSSVLVSGLRGLGVEIAKNIILGGVKAVTLHDQGTAQWADLSSQFYLREEDIGKNRAEVSQPRLAELNSYVPVTAYTGPLVEDFLSGF

SEQ ID NO: 340795 - protein, 234 aa, Artificial Sequence
  derived and/or modified sequence
MSKPHFPPALPAPAAIPGIKGEENGCLLLPTYSVPGSMLCVIYHLDNPVGKMSSSPLSKKRRVSGPDPKPGSNCSPAQSVLSEVPSVPTNGMAKNGSEADIDEGLYSRQLYVLGHEAMKRLQTSSVLVSGLRGLGVEIAKNIILGGVKAVTLHDQGTAQWADLSSQFYLREEDIGKNRAEVSQPRLAELNSYVPVTAYTGPLVEDFLSGFQVVVLTNTPLEDQLRVGEFCHNRG

SEQ ID NO: 340796 - protein, 195 aa, Artificial Sequence
  derived and/or modified sequence
MSKPHFPPALPAPAAIPGIKGEENGCLLLPTYSVPGSMLCVIYHLDNPVGKMSSSPLSKKRRVSGPDPKPGSNCSPAQSVLSEVPSVPTNGMAKNGSEADIDEGLYSRQLYVLGHEAMKRLQTSSVLVSGLRGLGVEIAKNIILGGVKAVTLHDQGTAQWADLSSQFYLREEDIGKNRAEVSQPRLAELNSYVPV

SEQ ID NO: 340797 - DNA, 705 bp, Artificial Sequence
  derived and/or modified sequence
atgagcaagccccacttcccccccgccctgcccgcccccgccgccatccccggcatcaagggcgaggagaacggctgcctgctgctgcccacctacagcgtgcccggcagcatgctgtgcgtgatctaccacctggacaaccccgtgggcaagatgagcagcagccccctgagcaagaagagaagagtgagcggccccgaccccaagcccggcagcaactgcagccccgcccagagcgtgctgagcgaggtgcccagcgtgcccaccaacggcatggccaagaacggcagcgaggccgacatcgacgagggcctgtacagcagacagctgtacgtgctgggccacgaggccatgaagagactgcagaccagcagcgtgctggtgagcggcctgagaggcctgggcgtggagatcgccaagaacatcatcctgggcggcgtgaaggccgtgaccctgcacgaccagggcaccgcccagtgggccgacctgagcagccagttctacctgagagaggaggacatcggcaagaacagagccgaggtgagccagcccagactggccgagctgaacagctacgtgcccgtgaccgcctacaccggccccctggtggaggacttcctgagcggcttccaggtggtggtgctgaccaacacccccctggaggaccagctgagagtgggcgagttctgccacaacagaggctag

SEQ ID NO: 340798 - DNA, 588 bp, Artificial Sequence
  derived and/or modified sequence
atgagcaagccccacttcccccccgccctgcccgcccccgccgccatccccggcatcaagggcgaggagaacggctgcctgctgctgcccacctacagcgtgcccggcagcatgctgtgcgtgatctaccacctggacaaccccgtgggcaagatgagcagcagccccctgagcaagaagagaagagtgagcggccccgaccccaagcccggcagcaactgcagccccgcccagagcgtgctgagcgaggtgcccagcgtgcccaccaacggcatggccaagaacggcagcgaggccgacatcgacgagggcctgtacagcagacagctgtacgtgctgggccacgaggccatgaagagactgcagaccagcagcgtgctggtgagcggcctgagaggcctgggcgtggagatcgccaagaacatcatcctgggcggcgtgaaggccgtgaccctgcacgaccagggcaccgcccagtgggccgacctgagcagccagttctacctgagagaggaggacatcggcaagaacagagccgaggtgagccagcccagactggccgagctgaacagctacgtgcccgtgtag

SEQ ID NO: 340799 - DNA, 705 bp, Artificial Sequence
  derived and/or modified sequence
atgtctaaaccacattttccgccggccctccctgcccccgccgccatccccggaattaagggggaggagaatggctgcctgctgctgccaacctactccgtgccaggctccatgctgtgtgtgatctaccatctggataatcccgtggggaaaatgtcgtccagcccattatccaaaaaaagacgcgtgagtggcccggatcccaagcccggctctaactgtagtccagcccagagcgttctgagtgaggtcccctcagtacccacgaacggaatggctaagaatggcagcgaagcagacatcgacgaaggtttgtacagtcggcagttatatgtactcggacacgaggccatgaaaagattacaaacttctagtgtgctggtgtcaggtctgagggggctgggggtcgaaattgcaaaaaacataattttgggcggcgtcaaggctgtcactcttcatgatcaaggtaccgcacaatgggctgatttgtcatctcagttctacctccgggaagaggacataggcaaaaatcgcgccgaggtctcacagcccaggttggccgagttaaatagttatgtgcctgtcactgcctacacaggacccctggtcgaggatttcctgagcggattccaggttgtagttctgacaaacaccccacttgaagatcagctgcgggtcggggaattttgccacaacaggggatag

SEQ ID NO: 340800 - DNA, 588 bp, Artificial Sequence
  derived and/or modified sequence
atgagtaaaccacacttcccccccgcactccccgccccagccgctattcctgggatcaaaggggaggaaaacggatgtttgctgctgccaacttattcggtgcctggcagtatgctctgtgttatctatcatctggacaacccagtaggaaaaatgtcctcttctccgctgtcaaagaaacgacgagtgtctgggcccgacccaaagcccggtagtaactgcagcccagcccaaagcgtgctcagcgaggtgccgtctgttccgacaaacggcatggcaaaaaacggcagtgaagctgacatcgacgaggggctgtacagccgtcagctgtatgttctcggacatgaggccatgaagcgcttgcagacatcgtccgtactggtgtcgggcctgcgcgggctcggggtagagatcgccaagaacatcattttgggtggggtaaaagcagtcactctgcatgaccaggggaccgcccagtgggctgacctttctagtcagttctacctgagggaagaggatataggtaagaaccgggccgaagtgtcgcaaccgcgtctggctgagctgaacagctacgttccagtgtag

SEQ ID NO: 340801 - DNA, 705 bp, Artificial Sequence
  derived and/or modified sequence
atgagcaagccccacttccccccagccctgcctgccccagctgccatccctggcatcaagggggaggagaatggctgcctgctgctgcccacctacagcgtgcccggctccatgctgtgtgtgatctaccacctggacaaccctgtgggcaagatgagcagcagccccctgagcaagaagagaagagtgtctggccctgaccccaagccaggcagcaactgcagccctgcccagagcgtgctgtctgaggtgcccagcgtgcccaccaacggcatggccaagaatggaagtgaagctgacattgatgagggcctgtacagccggcagctgtatgtgctgggccacgaggccatgaagaggctgcagaccagctctgtgctggtgtctggcctgcggggcctgggcgtggagatcgccaagaacatcatcctgggcggcgtgaaggctgtgaccctgcatgaccagggcacagcccagtgggccgacctgagcagccagttctacctgcgggaggaggacatcggcaagaacagagctgaggtgtcccagccccggctggccgagctgaacagctatgtgcctgtgacagcctacacaggccccctggtggaggacttcctgagcggcttccaggtggtggtgctgaccaacacccccctggaggaccagctgcgggtgggggagttctgccacaacagaggatag

SEQ ID NO: 340802 - DNA, 588 bp, Artificial Sequence
  derived and/or modified sequence
atgagcaagccccacttccccccagccctgcctgccccagctgccatccctggcatcaagggggaggagaatggctgcctgctgctgcccacctacagcgtgcccggctccatgctgtgtgtgatctaccacctggacaaccctgtgggcaagatgagcagcagccccctgagcaagaagagaagagtgtctggccctgaccccaagccaggcagcaactgcagccctgcccagagcgtgctgtctgaggtgcccagcgtgcccaccaacggcatggccaagaatggaagtgaagctgacattgatgagggcctgtacagccggcagctgtatgtgctgggccacgaggccatgaagaggctgcagaccagctctgtgctggtgtctggcctgcggggcctgggcgtggagatcgccaagaacatcatcctgggcggcgtgaaggctgtgaccctgcatgaccagggcacagcccagtgggccgacctgagcagccagttctacctgcgggaggaggacatcggcaagaacagagctgaggtgtcccagccccggctggccgagctgaacagctatgtgcctgtgtag

SEQ ID NO: 340803 - DNA, 705 bp, Artificial Sequence
  derived and/or modified sequence
atgagcaagccccacttcccccccgccctgcccgcccccgccgccatcccaggtatcaagggcgaggaaaacgggtgcctcctcctgcctacctatagcgtgccaggatcaatgctgtgtgtaatttaccatcttgacaaccctgttggcaaaatgagtagttcgcccctgtctaagaaaaggcgcgtgtctggccctgacccaaaaccgggttcaaactgcagccccgcacagtccgtgctcagtgaagtgccttcggtgccaactaacggaatggctaagaatggcagtgaagccgacatcgatgagggcttatacagccgccaactgtatgtcctcggtcacgaggccatgaaacgcttacagacctccagcgtgctggtgtccgggctgcgtggcctgggcgtcgaaattgctaaaaatattatcctgggcggcgtgaaggctgttaccctgcacgatcagggcactgcccagtgggccgacctgagctctcagttttacttgagggaagaagacattggcaaaaacagagccgaggtttctcagcctaggttggcagaactcaattcctatgtcccagtcaccgcatacacaggacctctggtggaggatttcctgagtggatttcaagtagtcgtcctcactaatactcccctcgaggaccagctcagagtgggtgagttttgccacaaccgcggctag

SEQ ID NO: 340804 - DNA, 588 bp, Artificial Sequence
  derived and/or modified sequence
atgagcaagccccacttcccccccgccctgcccgcccccgccgccatccccggcatcaaaggcgaggagaatgggtgcttgttgctcccaacctatagcgtgccagggagtatgctgtgtgtgatctaccatctcgataacccagttgggaaaatgagtagttctcccctgtccaaaaaacggagagtcagtggtccagatcccaaaccagggagcaactgcagtcctgcccagagtgttctcagtgaggtgccatctgtccctaccaacggtatggcgaaaaatggttcggaggccgatatcgacgaaggactttacagtcgacaattatatgtgttggggcacgaggcgatgaaaagactgcagacatcttcagtccttgtctctgggttgcgagggctgggggttgaaatagcaaaaaacatcattctcggcggagtgaaggccgtgacactgcacgatcagggaaccgctcagtgggccgacctttcctcccagttctacctgcgggaagaggatatcggcaagaaccgcgcagaagtaagtcagccacgattagctgagttgaattcttatgtgccagtatag

SEQ ID NO: 340805 - DNA, 705 bp, Artificial Sequence
  derived and/or modified sequence
atgagtaagcctcacttccccccagccctcccagcccctgctgcaatccccggaataaaaggcgaagagaatgggtgtctgctactccccacttactctgtccccggttctatgctctgcgtgatatatcacctggacaatcccgttggcaaaatgtcttcatctcctctcagtaaaaagcggagagtgagcggtccagaccctaagcctggctcaaactgttctcccgcacaaagcgtgttgagtgaggtacctagcgttccaaccaacggaatggcaaagaatgggtccgaagccgacatcgatgagggcctctattctcgtcagctctacgtcctcggacacgaagcaatgaaacgcctgcagacctcctccgtgctcgtgagtggcttgcggggattaggagtcgaaattgccaaaaatatcatcctgggcggagttaaggccgtgacactgcacgatcaggggacagcccagtgggccgatttaagctcccagttttacttgagggaggaggacatcggcaaaaacagggcagaggtgtctcagcctaggctggctgagctgaatagttacgttcccgtaaccgcttatactgggcctctcgtcgaggatttcctgtcaggctttcaggtggtggtgctgaccaatactccgctagaggatcaactgcgtgtgggagagttttgtcacaaccgcggttag

SEQ ID NO: 340806 - DNA, 588 bp, Artificial Sequence
  derived and/or modified sequence
atgagcaagccccactttccgccagctctgcccgctccggctgccatccctgggatcaagggagaggagaatggatgcttactacttccaacatactcggtcccaggctccatgctatgtgtgatttatcatctcgacaatccagtcgggaaaatgagtagcagccctttatcaaagaagagaagagtcagcgggccagacccaaaacccggttctaactgctcgccagctcaatctgtgctgagcgaagtcccttcagttcccaccaacggaatggctaagaatggctccgaagcagacattgatgaagggttgtactcgaggcagctctatgtgctgggtcacgaagcaatgaagcgcctacagacctcttctgtgctagtgtctggtctgcgcggattgggcgtggagattgccaagaatattatcttggggggagtcaaagcagtcacgttgcacgatcaagggacggcacaatgggctgacttatcaagtcagttctacctccgcgaagaagatatcgggaaaaacagggccgaggtttcgcaacctaggttagctgagctgaatagttatgttccagtgtag

SEQ ID NO: 340807 - DNA, 671 bp, Artificial Sequence
  derived and/or modified sequence
aggactgcgagactggacacgtcgggggcccagatgtttctagggagaggagcctcccagctcaggctagggaagggacaccggagcccagctcttcctgagctgacgaggcgccacccggcctttattcattattcataataaggttctatgctctgtgttatttatcatctcgataaccccgtggggaagatgtccagctcgccgctgtccaagaaacgtcgcgtgtccgggcctgatccaaagccgggttctaactgctcccctgcccagtccgtgttgtccgaagtgccctcggtgccaaccaacggaatggccaagaacggcagtgaagcagacatagacgagggcctttactcccggcagctgtatgtgttgggccatgaggcaatgaagcggctccagacatccagtgtcctggtatcaggcctgcggggcctgggcgtggagatcgctaagaacatcatccttggtggggtcaaggctgttaccctacatgaccagggcactgcccagtgggctgatctttcctcccagttctacctgcgggaggaggacatcggtaaaaaccgggccgaggtatcacagccccgcctcgctgagctcaacagctatgtgcctgtcactgcctacactggacccctcgttgaggacttccttagtggtttcca

SEQ ID NO: 340808 - DNA, 1054 bp, Artificial Sequence
  derived and/or modified sequence
atcttgtgtcggcggctcggctgtaaggaggtggcagggacaaccacaaccacaacggccgggggaggagaaggcggcagcggcgattctaggcggcccaggcggcggggaggaggagaaggaggagggtggcggccgggcttggcttcggctccttgaggagttggcggcggcgcgacccggggaaccggcattggttctatgctctgtgttatttatcatctcgataaccccgtggggaagatgtccagctcgccgctgtccaagaaacgtcgcgtgtccgggcctgatccaaagccgggttctaactgctcccctgcccagtccgtgttgtccgaagtgccctcggtgccaaccaacggaatggccaagaacggcagtgaagcagacatagacgagggcctttactcccggcagctgtatgtgttgggccatgaggcaatgaagcggctccagacatccagtgtcctggtatcaggcctgcggggcctgggcgtggagatcgctaagaacatcatccttggtggggtcaaggctgttaccctacatgaccagggcactgcccagtgggctgatctttcctcccagttctacctgcgggaggaggacatcggtaaaaaccgggccgaggtatcacagccccgcctcgctgagctcaacagctatgtgcctgtcactgcctacactggacccctcgttgaggacttccttagtggtttccaggtggtggtgctcaccaacacccccctggaggaccagctgcgagtgggtgagttctgtcacaaccgtggcatcaagctggtggtggcagacacgcggggcctgtttgggcagctcttctgtgactttggagaggaaatgatcctcacagattccaatggggagcagccactcagtgctatggtttctatggttaccaaggacaaccccggtgtggttacctgcctggatgaggcccgacacgggtttgagagcggggactttgtctccttttcagaagtacagggcatggttgaactcaacggaaatcagcccatggagatcaaagtcctgg

SEQ ID NO: 340809 - DNA, 1706 bp, Artificial Sequence
  derived and/or modified sequence
tgggccctgagcccaggggcatttggcaaacagtcccccaccagctgcatgcctctgggcgagtgaatggggttctctaagcctttcttttcccatttgtgatttgggcatagggttatctgggtcatggggattgttaagattagacaaagccctttcctctttgattgacacacagtatgctcttggtagatagtagggagctcttgtcattgtggttggtgctagtgacaagtgccaagatggaatcttaggtacattgggatacttagtgtcataaaagtctcagtgtgggaggacttgtgtgaacagaagactcagtgcctagaggagcacttggggtgaggggaagtgacgctgggtcctcccatctccagcatgtggacccagtcacccccaccaccagatttcacttccacagcaggctttattgttctgtctctgggacctagcaggtgaccctgggcaagttacttctcatttgtccggcaaggacactaaactctgccttgctgggtcagggtcatggaggggatgaaacgtgataacacgaggaagcagcctgggcttcagagtcagcagatcctggtctggtcccagctcagtgtgtgggaaccttggtcaccgaacgtccctgagtgaatttttttccatcactttaaagttgggggtattattgatagcagtccaaaccccacaggagtaccctgaggacagagtgagacgaggtttagagaagtgcttactatggcatctggcacaaggaggactcctgatcaatctaatactcatttatcattgtggttaacctgtttaagggactccgcatgcagatgaggcttgggatgtgtttgttttctatctttttgcaacctcttttattggtctgtgtcggttttcccctcccaaagctgggggcagggttgggctttataaaacttgagcccctctggggactgggttctcagcaagttaccgctcctgccatcatgccaccctgatggatgtccaagcctcacttccctcctgcactccccgctcccgccgccatccctgggattaagggagaggagaatggctgcttgttactgcctacctactctgtgccaggttctatgctctgtgttatttatcatctcgataaccccgtggggaagatgtccagctcgccgctgtccaagaaacgtcgcgtgtccgggcctgatccaaagccgggttctaactgctcccctgcccagtccgtgttgtccgaagtgccctcggtgccaaccaacggaatggccaagaacggcagtgaagcagacatagacgagggcctttactcccggcagctgtatgtgttgggccatgaggcaatgaagcggctccagacatccagtgtcctggtatcaggcctgcggggcctgggcgtggagatcgctaagaacatcatccttggtggggtcaaggctgttaccctacatgaccagggcactgcccagtgggctgatctttcctcccagttctacctgcgggaggaggacatcggtaaaaaccgggccgaggtatcacagccccgcctcgctgagctcaacagctatgtgcctgtcactgcctacactggacccctcgttgaggacttccttagtggtttccaggtggtggtgctcaccaacacccccctggaggaccagctgcgagtgggtgagttctgtcacaaccgtggc

SEQ ID NO: 340810 - DNA, 809 bp, Artificial Sequence
  derived and/or modified sequence
tcggcggctcggctgtaaggaggtggcagggacaaccacaaccacaacggccgggggaggagaaggcggcagcggcgattctaggcggcccaggcggcggggaggaggagaaggaggagggtggcggccgggcttggcttcggctccttgaggagttggcggcggcgcgacccggggaaccggcattgcaagttaccgctcctgccatcatgccaccctgatggatgtccaagcctcacttccctcctgcactccccgctcccgccgccatccctgggattaagggagaggagaatggctgcttgttactgcctacctactctgtgccaggttctatgctctgtgttatttatcatctcgataaccccgtggggaagatgtccagctcgccgctgtccaagaaacgtcgcgtgtccgggcctgatccaaagccgggttctaactgctcccctgcccagtccgtgttgtccgaagtgccctcggtgccaaccaacggaatggccaagaacggcagtgaagcagacatagacgagggcctttactcccggcagctgtatgtgttgggccatgaggcaatgaagcggctccagacatccagtgtcctggtatcaggcctgcggggcctgggcgtggagatcgctaagaacatcatccttggtggggtcaaggctgttaccctacatgaccagggcactgcccagtgggctgatctttcctcccagttctacctgcgggaggaggacatcggtaaaaaccgggccgaggtatcacagccccgcctcgctgagctcaacagctatgtgcctgtc

SEQ ID NO: 340811 - protein, 284 aa, Artificial Sequence
  derived and/or modified sequence
MLCVIYHLDNPVGKMSSSPLSKKRRVSGPDPKPGSNCSPAQSVLSEVPSVPTNGMAKNGSEADIDEGLYSRQLYVLGHEAMKRLQTSSVLVSGLRGLGVEIAKNIILGGVKAVTLHDQGTAQWADLSSQFYLREEDIGKNRAEVSQPRLAELNSYVPVTAYTGPLVEDFLSGFQVVVLTNTPLEDQLRVGEFCHNRGIKLVVADTRGLFGQLFCDFGEEMILTDSNGEQPLSAMVSMVTKDNPGVVTCLDEARHGFESGDFVSFSEVQGMVELNGNQPMEIKVL

SEQ ID NO: 340812 - DNA, 522 bp, Artificial Sequence
  derived and/or modified sequence
atgctgtgcgtgatctaccacctggacaaccccgtgggcaagatgagcagcagccccctgagcaagaagagaagagtgagcggccccgaccccaagcccggcagcaactgcagccccgcccagagcgtgctgagcgaggtgcccagcgtgcccaccaacggcatggccaagaacggcagcgaggccgacatcgacgagggcctgtacagcagacagctgtacgtgctgggccacgaggccatgaagagactgcagaccagcagcgtgctggtgagcggcctgagaggcctgggcgtggagatcgccaagaacatcatcctgggcggcgtgaaggccgtgaccctgcacgaccagggcaccgcccagtgggccgacctgagcagccagttctacctgagagaggaggacatcggcaagaacagagccgaggtgagccagcccagactggccgagctgaacagctacgtgcccgtgaccgcctacaccggccccctggtggaggacttcctgagcggcttctag

SEQ ID NO: 340813 - DNA, 855 bp, Artificial Sequence
  derived and/or modified sequence
atgctgtgcgtgatctaccacctggacaaccccgtgggcaagatgagcagcagccccctgagcaagaagagaagagtgagcggccccgaccccaagcccggcagcaactgcagccccgcccagagcgtgctgagcgaggtgcccagcgtgcccaccaacggcatggccaagaacggcagcgaggccgacatcgacgagggcctgtacagcagacagctgtacgtgctgggccacgaggccatgaagagactgcagaccagcagcgtgctggtgagcggcctgagaggcctgggcgtggagatcgccaagaacatcatcctgggcggcgtgaaggccgtgaccctgcacgaccagggcaccgcccagtgggccgacctgagcagccagttctacctgagagaggaggacatcggcaagaacagagccgaggtgagccagcccagactggccgagctgaacagctacgtgcccgtgaccgcctacaccggccccctggtggaggacttcctgagcggcttccaggtggtggtgctgaccaacacccccctggaggaccagctgagagtgggcgagttctgccacaacagaggcatcaagctggtggtggccgacaccagaggcctgttcggccagctgttctgcgacttcggcgaggagatgatcctgaccgacagcaacggcgagcagcccctgagcgccatggtgagcatggtgaccaaggacaaccccggcgtggtgacctgcctggacgaggccagacacggcttcgagagcggcgacttcgtgagcttcagcgaggtgcagggcatggtggagctgaacggcaaccagcccatggagatcaaggtgctgtag

SEQ ID NO: 340814 - DNA, 522 bp, Artificial Sequence
  derived and/or modified sequence
atgctgtgtgtgatatatcacctcgacaatccagtcggaaagatgtcgtcgagcccactctctaagaagagacgcgtgtctggccctgatccgaagcctggatccaattgctcccccgctcagtcagtcctgagcgaggtccccagtgtacctaccaatgggatggcaaagaatgggtccgaagccgatattgatgagggcctgtacagccgccagctgtatgtattgggacacgaagccatgaagcggttgcagacttcttccgtactggtgagtggcttgagaggattgggcgtagagatcgccaaaaatataattctgggaggcgtgaaagccgtcacccttcacgaccagggtactgcccaatgggccgacttgtcaagccagttctacctgagggaggaagacattggcaagaatagagctgaagtttctcagcctagacttgcagagctgaactcttacgtgcccgtgaccgcatataccgggcctctagtggaggactttctatccggtttctag

SEQ ID NO: 340815 - DNA, 855 bp, Artificial Sequence
  derived and/or modified sequence
atgctttgcgtgatctaccacctagacaatcccgttggtaagatgtcaagcagtcccctgagtaaaaaacgccgggtgagtggtccggaccctaaaccaggcagcaattgttcccccgcgcaaagtgtgctgtccgaggtcccaagcgttcccacgaatgggatggctaagaatggctcggaggctgatatcgacgagggcctttattccagacagctgtatgttttgggccacgaggccatgaagagactgcaaactagttccgttttggtttcaggacttcgcggcctgggagtagaaatcgctaagaatattatcttgggcggagtaaaggccgtgacgctgcacgatcagggaaccgctcaatgggctgacctgtcctcccagttttacttacgggaagaagacattggtaaaaatcgcgccgaagtgtctcaaccacggctcgcagagttgaacagctacgttcctgttactgcctacactgggccattagtggaggactttctgagtggattccaggtggtcgtacttaccaacacgcccttagaggaccaacttcgggtgggcgagttctgtcacaacagaggtatcaagctggtagtagccgatacgaggggtctctttggccagttattctgcgactttggggaggagatgatactgaccgacagcaacggcgagcagcctctttccgcaatggtgtcgatggtgactaaagacaatcccggggtggtgacatgtctggatgaggctcgtcacggctttgagtcaggggacttcgtctccttttctgaggtgcaggggatggtggaactgaacggaaatcagcctatggagatcaaggtcctatag

SEQ ID NO: 340816 - DNA, 522 bp, Artificial Sequence
  derived and/or modified sequence
atgctgtgtgtgatctaccacctggacaaccctgtgggcaagatgagcagcagccccctgagcaagaagagaagagtgtctggccctgaccccaagccaggcagcaactgcagccctgcccagagcgtgctgtctgaggtgcccagcgtgcccaccaacggcatggccaagaatggcagcgaggccgacattgatgagggcctgtacagccggcagctgtatgtgctgggccacgaggccatgaagaggctgcagaccagctctgtgctggtgtctggcctgcggggcctgggcgtggagatcgccaagaacatcatcctgggcggcgtgaaggctgtgaccctgcatgaccagggcacagcccagtgggccgacctgagcagccagttctacctgcgggaggaggacatcggcaagaacagagctgaggtgtcccagccccggctggccgagctgaacagctatgtgcctgtgacagcctacacaggccccctggtggaggacttcctgagcggcttctag

SEQ ID NO: 340817 - DNA, 855 bp, Artificial Sequence
  derived and/or modified sequence
atgctgtgtgtgatctaccacctggacaaccctgtgggcaagatgagcagcagccccctgagcaagaagagaagagtgtctggccctgaccccaagccaggcagcaactgcagccctgcccagagcgtgctgtctgaggtgcccagcgtgcccaccaacggcatggccaagaatggcagcgaggccgacattgatgagggcctgtacagccggcagctgtatgtgctgggccacgaggccatgaagaggctgcagaccagctctgtgctggtgtctggcctgcggggcctgggcgtggagatcgccaagaacatcatcctgggcggcgtgaaggctgtgaccctgcatgaccagggcacagcccagtgggccgacctgagcagccagttctacctgcgggaggaggacatcggcaagaacagagctgaggtgtcccagccccggctggccgagctgaacagctatgtgcctgtgacagcctacacaggccccctggtggaggacttcctgagcggcttccaggtggtggtgctgaccaacacccccctggaggaccagctgcgggtgggggagttctgccacaacagaggcatcaagctggtggtggccgacacccggggcctgtttggccagctgttctgtgactttggagaggagatgatcctgacagacagcaatggagagcagcccctgagcgccatggtgtccatggtgaccaaggacaaccctggggtggtgacctgcctggatgaggcccggcacggctttgagagcggggactttgtgtccttcagcgaggtgcagggcatggtggagctgaatggaaaccagcccatggagatcaaggtgctgtag

SEQ ID NO: 340818 - DNA, 522 bp, Artificial Sequence
  derived and/or modified sequence
atgctgtgcgtgatctaccacctggacaaccccgtgggcaagatgagttcctcccccctctcgaagaaaagacgcgtctcaggtcccgacccgaaacccgggtccaactgctcccccgcacagtccgtgctgtccgaggttccgtcagttcccaccaatggaatggcgaagaatgggtcagaggcagacatcgacgagggcctgtattctcgccaactttacgttctagggcatgaagcgatgaagagactgcagactagttctgttctggtgagcggtctgaggggcctcggtgtcgaaatagcaaagaatattatcttgggaggggtcaaggccgtgaccctccatgatcaggggacagcacaatgggcagatctgtcttctcagttctaccttagagaagaggacattggaaagaaccgtgccgaggttagtcaaccccggcttgctgagttaaactcttacgttccagtgacagcttacaccggccccctggtagaggattttctttccggcttttag

SEQ ID NO: 340819 - DNA, 855 bp, Artificial Sequence
  derived and/or modified sequence
atgctgtgcgtgatctaccacctggacaaccccgtgggcaagatgtctagttctcccttgagcaaaaagcgtagggtctcaggccctgaccccaagcccgggtctaattgctctcctgcacaaagcgttctttccgaagtgccttctgttccaacgaatggaatggccaagaacggatcagaagctgacattgatgaaggcctttactctagacaactgtacgtcctgggccatgaagccatgaagaggcttcagacatcctccgttctggtgtccggattgcgggggctgggagtggagatcgcaaaaaatattatactcggaggcgttaaggccgtaacactgcatgaccagggcaccgcacagtgggctgatttgagttcacagttctaccttagagaagaagatatagggaagaatagagctgaggtgagccagccgcgcctcgcagagctgaatagctatgtcccagtgacagcttacaccggccctctggtggaagactttctgagcggattccaggtggtggttctgacgaacacacctcttgaggatcagctccgggtgggagagttctgtcacaaccgaggaattaagcttgttgttgcggacactcggggactttttggccaactcttctgcgactttggcgaggaaatgatattgactgactccaacggggaacagccgctgtcagcaatggtgagcatggttacaaaagataacccaggcgtggtcacctgcctggacgaggctcggcatggcttcgagtcaggagactttgtgagtttcagcgaggtccagggaatggtcgaactcaatggcaatcagcccatggaaattaaggttctgtag

SEQ ID NO: 340820 - DNA, 522 bp, Artificial Sequence
  derived and/or modified sequence
atgctctgcgtcatttatcatcttgacaatcccgtcggcaaaatgagctccagtccgctgtccaaaaagcgacgggtatctggccctgatccaaagcctggcagcaattgtagtcctgcccagtcggtgttatccgaggttccgtctgttcccaccaacggaatggcgaagaacgggtctgaggctgatattgacgagggtctgtacagccgccagttatacgtcctggggcatgaggccatgaaacgtctccagacctcgagtgtcctagtctctgggttaagagggttgggcgtcgagatcgcgaaaaacattatactaggcggtgtgaaggccgtcacccttcacgaccaaggtacggcccagtgggcagacctaagctcccaattctacttgcgcgaggaagacattggcaaaaacagggcagaagtgtcacaacctaggctagctgagctgaactcctacgtgccagtgacggcctacaccgggcctctggttgaggacttcctgtcaggcttttag

SEQ ID NO: 340821 - DNA, 855 bp, Artificial Sequence
  derived and/or modified sequence
atgctgtgtgtgatataccaccttgacaacccagtgggaaaaatgtctagttcccccctgtcgaagaagaggagggtgtctggtccggatcctaagcccggttcaaattgtagccccgcacagagtgtgctttccgaggtaccctccgtgcctacaaatggcatggcgaaaaatggaagcgaggccgacattgacgaagggctctactcacgccagctgtacgtcctgggccatgaggccatgaagaggcttcagacatcctccgtcctagtgtctggtctgcgtggcctgggagtagaaatcgcgaaaaatattatccttggcggagtgaaagcggttactttacatgatcaaggcacggcacagtgggctgacctatctagtcagttttacctacgggaagaggatattggcaagaacagagctgaggtgtcgcagcccagactcgccgaactcaatagttatgtgcctgtgactgcctataccgggccattagtggaagactttctgtcaggattccaggtagtggtgctgacaaacacaccgctggaagaccagctgcgcgttggagagttctgtcataacaggggaatcaagctcgtggttgcagacaccagaggcctgttcggccagctgttctgtgacttcggggaagagatgatcctgactgactccaacggcgaacaacctttatcagctatggtgtctatggtcaccaaggataatcccggagtcgttacctgcctcgacgaagctcgccacggctttgaatcaggcgacttcgtgtctttctccgaagtgcaggggatggtggaactaaacggcaatcagccaatggagattaaagtgttatag

SEQ ID NO: 340822 - DNA, 3466 bp, Artificial Sequence
  derived and/or modified sequence
cttgtacgacagaggtggtttgctcttccgttgccccgtggcttcagctcatctttggcaggaaggcgaggcttccgcccggcacaggggatgtccagctcgccgctgtccaagaaacgtcgcgtgtccgggcctgatccaaagccgggttctaactgctcccctgcccagtccgtgttgtccgaagtgccctcggtgccaaccaacggaatggccaagaacggcagtgaagcagacatagacgagggcctttactcccggcagctgtatgtgttgggccatgaggcaatgaagcggctccagacatccagtgtcctggtatcaggcctgcggggcctgggcgtggagatcgctaagaacatcatccttggtggggtcaaggctgttaccctacatgaccagggcactgcccagtgggctgatctttcctcccagttctacctgcgggaggaggacatcggtaaaaaccgggccgaggtatcacagccccgcctcgctgagctcaacagctatgtgcctgtcactgcctacactggacccctcgttgaggacttccttagtggtttccaggtggtggtgctcaccaacacccccctggaggaccagctgcgagtgggtgagttctgtcacaaccgtggcatcaagctggtggtggcagacacgcggggcctgtttgggcagctcttctgtgactttggagaggaaatgatcctcacagattccaatggggagcagccactcagtgctatggtttctatggttaccaaggacaaccccggtgtggttacctgcctggatgaggcccgacacgggtttgagagcggggactttgtctccttttcagaagtacagggcatggttgaactcaacggaaatcagcccatggagatcaaagtcctgggtccttatacctttagcatctgtgacacctccaacttctccgactacatccgtggaggcatcgtcagtcaggtcaaagtacctaagaagattagctttaaatccttggtggcctcactggcagaacctgactttgtggtgacggacttcgccaagttttctcgccctgcccagctgcacattggcttccaggccctgcaccagttctgtgctcagcatggccggccacctcggccccgcaatgaggaggatgcagcagaactggtagccttagcacaggctgtgaatgctcgagccctgccagcagtgcagcaaaataacctggacgaggacctcatccggaagctggcatatgtggctgctggggatctggcacccataaacgccttcattgggggcctggctgcccaggaagtcatgaaggcctgctccgggaagttcatgcccatcatgcagtggctatactttgatgcccttgagtgtctccctgaggacaaagaggtcctcacagaggacaagtgcctccagcgccagaaccgttatgacgggcaagtggctgtgtttggctcagacctgcaagagaagctgggcaagcagaagtatttcctggtgggtgcgggggccattggctgtgagctgctcaagaactttgccatgattgggctgggctgcggggagggtggagaaatcatcgttacagacatggacaccattgagaagtcaaatctgaatcgacagtttcttttccggccctgggatgtcacgaagttaaagtctgacacggctgctgcagctgtgcgccaaatgaatccacatatccgggtgacaagccaccagaaccgtgtgggtcctgacacggagcgcatctatgatgacgattttttccaaaacctagatggcgtggccaatgccctggacaacgtggatgcccgcatgtacatggaccgccgctgtgtctactaccggaagccactgctggagtcaggcacactgggcaccaaaggcaatgtgcaggtggtgatccccttcctgacagagtcgtacagttccagccaggacccacctgagaagtccatccccatctgtaccctgaagaacttccctaatgccatcgagcacaccctgcagtgggctcgggatgagtttgaaggcctcttcaagcagccagcagaaaatgtcaaccagtacctcacagaccccaagtttgtggagcgaacactgcggctggcaggcactcagcccttggaggtgctggaggctgtgcagcgcagcctggtgctgcagcgaccacagacctgggctgactgcgtgacctgggcctgccaccactggcacacccagtactcgaacaacatccggcagctgctgcacaacttccctcctgaccagctcacaagctcaggagcgccgttctggtctgggcccaaacgctgtccacacccgctcacctttgatgtcaacaatcccctgcatctggactatgtgatggctgctgccaacctgtttgcccagacctacgggctgacaggctctcaggaccgagctgctgtggccacattcctgcagtctgtgcaggtccccgaattcacccccaagtctggcgtcaagatccatgtttctgaccaggagctgcagagcgccaatgcctctgttgatgacagtcgtctagaggagctcaaagccactctgcccagcccagacaagctccctggattcaagatgtaccccattgactttgagaaggatgatgacagcaactttcatatggatttcatcgtggctgcatccaacctccgggcagaaaactatgacattccttctgcagaccggcacaagagcaagctgattgcagggaagatcatcccagccattgccacgaccacagcagccgtggttggccttgtgtgtctggagctgtacaaggttgtgcaggggcaccgacagcttgactcctacaagaatggtttcctcaacttggccctgcctttctttggtttctctgaaccccttgccgcaccacgtcaccagtactataaccaagagtggacattgtgggatcgctttgaggtacaagggctgcagcctaatggtgaggagatgaccctcaaacagttcctcgactattttaagacagagcacaaattagagatcaccatgctgtcccagggcgtgtccatgctctattccttcttcatgccagctgccaagctcaaggaacggttggatcagccgatgacagagattgtgagccgtgtgtcgaagcgaaagctgggccgccacgtgcgggcgctggtgcttgagctgtgctgtaacgacgagagcggcgaggatgtcgaggttccctatgtccgatacaccatccgctgaccccgtctgctcctctaggctggccccttgtccacccctctccacaccccttccagcccagggttcccatttggcttctggcagtggcccaactagccaagtctggtgttccctcatcatccccctacctgaacccctcttgccactgccttctaccttgtttgaaacctgaatcctaataaagaattaataactccca

SEQ ID NO: 340823 - DNA, 1148 bp, Artificial Sequence
  derived and/or modified sequence
ggtcctccccgcgcctggaggctcaggactgcgagactggacacgtcgggggcccagatgtttctagggagaggagcctcccagctcaggctagggaagggacaccggagcccagctcttcctgagctgacgaggcgccacccggcctttattcattattcataataaggtggggctgtggtaggcggcagtttttttgcctctttcgcacctggtccgctgaaggttctcggcttgtgaattattcacgaggggcggatcagcgtgccgaagggacgtgctgaaggggcgttctgaagtctgccgcgcaaacgagttcattgatgattcgcaaaaatgtccagctcgccgctgtccaagaaacgtcgcgtgtccgggcctgatccaaagccgggttctaactgctcccctgcccagtccgtgttgtccgaagtgccctcggtgccaaccaacggaatggccaagaacggcagtgaagcagacatagacgagggcctttactcccggcagctgtatgtgttgggccatgaggcaatgaagcggctccagacatccagtgtcctggtatcaggcctgcggggcctgggcgtggagatcgctaagaacatcatccttggtggggtcaaggctgttaccctacatgaccagggcactgcccagtgggctgatctttcctcccagttctacctgcgggaggaggacatcggtaaaaaccgggccgaggtatcacagccccgcctcgctgagctcaacagctatgtgcctgtcactgcctacactggacccctcgttgaggacttccttagtggtttccaggtggtggtgctcaccaacacccccctggaggaccagctgcgagtgggtgagttctgtcacaaccgtggcatcaagctggtggtggcagacacgcggggcctgtttgggcagctcttctgtgactttggagaggaaatgatcctcacagattccaatggggagcagccactcagtgctatggtttctatggttaccaaggacaaccccggtgtggttacctgcctggatgaggcccgacacgggtttgagagcggggactttgtctccttttcagaagtacagggcatggttgaactcaacggaaatcagcccatggagatcaaagtcctggg

SEQ ID NO: 340824 - protein, 506 aa, Artificial Sequence
  derived and/or modified sequence
MGFHHVGQAGLEPLTSGDPSALASQSAGITGVSYCAWPGFSIEVGEWGRLEGFPTSRVAVRLVLALFTDGPSNNACGNPFCQLWPHVICLLCLQWARDEFEGLFKQPAENVNQYLTDPKFVERTLRLAGTQPLEVLEAVQRSLVLQRPQTWADCVTWACHHWHTQYSNNIRQLLHNFPPDQLTSSGAPFWSGPKRCPHPLTFDVNNPLHLDYVMAAANLFAQTYGLTGSQDRAAVATFLQSVQVPEFTPKSGVKIHVSDQELQSANASVDDSRLEELKATLPSPDKLPGFKMYPIDFEKDDDSNFHMDFIVAASNLRAENYDIPSADRHKSKLIAGKIIPAIATTTAAVVGLVCLELYKVVQGHRQLDSYKNGFLNLALPFFGFSEPLAAPRHQYYNQEWTLWDRFEVQGLQPNGEEMTLKQFLDYFKTEHKLEITMLSQGVSMLYSFFMPAAKLKERLDQPMTEIVSRVSKRKLGRHVRALVLELCCNDESGEDVEVPYVRYTIR

SEQ ID NO: 340825 - DNA, 3177 bp, Artificial Sequence
  derived and/or modified sequence
atgagcagcagccccctgagcaagaagagaagagtgagcggccccgaccccaagcccggcagcaactgcagccccgcccagagcgtgctgagcgaggtgcccagcgtgcccaccaacggcatggccaagaacggcagcgaggccgacatcgacgagggcctgtacagcagacagctgtacgtgctgggccacgaggccatgaagagactgcagaccagcagcgtgctggtgagcggcctgagaggcctgggcgtggagatcgccaagaacatcatcctgggcggcgtgaaggccgtgaccctgcacgaccagggcaccgcccagtgggccgacctgagcagccagttctacctgagagaggaggacatcggcaagaacagagccgaggtgagccagcccagactggccgagctgaacagctacgtgcccgtgaccgcctacaccggccccctggtggaggacttcctgagcggcttccaggtggtggtgctgaccaacacccccctggaggaccagctgagagtgggcgagttctgccacaacagaggcatcaagctggtggtggccgacaccagaggcctgttcggccagctgttctgcgacttcggcgaggagatgatcctgaccgacagcaacggcgagcagcccctgagcgccatggtgagcatggtgaccaaggacaaccccggcgtggtgacctgcctggacgaggccagacacggcttcgagagcggcgacttcgtgagcttcagcgaggtgcagggcatggtggagctgaacggcaaccagcccatggagatcaaggtgctgggcccctacaccttcagcatctgcgacaccagcaacttcagcgactacatcagaggcggcatcgtgagccaggtgaaggtgcccaagaagatcagcttcaagagcctggtggccagcctggccgagcccgacttcgtggtgaccgacttcgccaagttcagcagacccgcccagctgcacatcggcttccaggccctgcaccagttctgcgcccagcacggcagaccccccagacccagaaacgaggaggacgccgccgagctggtggccctggcccaggccgtgaacgccagagccctgcccgccgtgcagcagaacaacctggacgaggacctgatcagaaagctggcctacgtggccgccggcgacctggcccccatcaacgccttcatcggcggcctggccgcccaggaggtgatgaaggcctgcagcggcaagttcatgcccatcatgcagtggctgtacttcgacgccctggagtgcctgcccgaggacaaggaggtgctgaccgaggacaagtgcctgcagagacagaacagatacgacggccaggtggccgtgttcggcagcgacctgcaggagaagctgggcaagcagaagtacttcctggtgggcgccggcgccatcggctgcgagctgctgaagaacttcgccatgatcggcctgggctgcggcgagggcggcgagatcatcgtgaccgacatggacaccatcgagaagagcaacctgaacagacagttcctgttcagaccctgggacgtgaccaagctgaagagcgacaccgccgccgccgccgtgagacagatgaacccccacatcagagtgaccagccaccagaacagagtgggccccgacaccgagagaatctacgacgacgacttcttccagaacctggacggcgtggccaacgccctggacaacgtggacgccagaatgtacatggacagaagatgcgtgtactacagaaagcccctgctggagagcggcaccctgggcaccaagggcaacgtgcaggtggtgatccccttcctgaccgagagctacagcagcagccaggacccccccgagaagagcatccccatctgcaccctgaagaacttccccaacgccatcgagcacaccctgcagtgggccagagacgagttcgagggcctgttcaagcagcccgccgagaacgtgaaccagtacctgaccgaccccaagttcgtggagagaaccctgagactggccggcacccagcccctggaggtgctggaggccgtgcagagaagcctggtgctgcagagaccccagacctgggccgactgcgtgacctgggcctgccaccactggcacacccagtacagcaacaacatcagacagctgctgcacaacttcccccccgaccagctgaccagcagcggcgcccccttctggagcggccccaagagatgcccccaccccctgaccttcgacgtgaacaaccccctgcacctggactacgtgatggccgccgccaacctgttcgcccagacctacggcctgaccggcagccaggacagagccgccgtggccaccttcctgcagagcgtgcaggtgcccgagttcacccccaagagcggcgtgaagatccacgtgagcgaccaggagctgcagagcgccaacgccagcgtggacgacagcagactggaggagctgaaggccaccctgcccagccccgacaagctgcccggcttcaagatgtaccccatcgacttcgagaaggacgacgacagcaacttccacatggacttcatcgtggccgccagcaacctgagagccgagaactacgacatccccagcgccgacagacacaagagcaagctgatcgccggcaagatcatccccgccatcgccaccaccaccgccgccgtggtgggcctggtgtgcctggagctgtacaaggtggtgcagggccacagacagctggacagctacaagaacggcttcctgaacctggccctgcccttcttcggcttcagcgagcccctggccgcccccagacaccagtactacaaccaggagtggaccctgtgggacagattcgaggtgcagggcctgcagcccaacggcgaggagatgaccctgaagcagttcctggactacttcaagaccgagcacaagctggagatcaccatgctgagccagggcgtgagcatgctgtacagcttcttcatgcccgccgccaagctgaaggagagactggaccagcccatgaccgagatcgtgagcagagtgagcaagagaaagctgggcagacacgtgagagccctggtgctggagctgtgctgcaacgacgagagcggcgaggacgtggaggtgccctacgtgagatacaccatcagatag

SEQ ID NO: 340826 - DNA, 1521 bp, Artificial Sequence
  derived and/or modified sequence
atgggcttccaccacgtgggccaggccggcctggagcccctgaccagcggcgaccccagcgccctggccagccagagcgccggcatcaccggcgtgagctactgcgcctggcccggcttcagcatcgaggtgggcgagtggggcagactggagggcttccccaccagcagagtggccgtgagactggtgctggccctgttcaccgacggccccagcaacaacgcctgcggcaaccccttctgccagctgtggccccacgtgatctgcctgctgtgcctgcagtgggccagagacgagttcgagggcctgttcaagcagcccgccgagaacgtgaaccagtacctgaccgaccccaagttcgtggagagaaccctgagactggccggcacccagcccctggaggtgctggaggccgtgcagagaagcctggtgctgcagagaccccagacctgggccgactgcgtgacctgggcctgccaccactggcacacccagtacagcaacaacatcagacagctgctgcacaacttcccccccgaccagctgaccagcagcggcgcccccttctggagcggccccaagagatgcccccaccccctgaccttcgacgtgaacaaccccctgcacctggactacgtgatggccgccgccaacctgttcgcccagacctacggcctgaccggcagccaggacagagccgccgtggccaccttcctgcagagcgtgcaggtgcccgagttcacccccaagagcggcgtgaagatccacgtgagcgaccaggagctgcagagcgccaacgccagcgtggacgacagcagactggaggagctgaaggccaccctgcccagccccgacaagctgcccggcttcaagatgtaccccatcgacttcgagaaggacgacgacagcaacttccacatggacttcatcgtggccgccagcaacctgagagccgagaactacgacatccccagcgccgacagacacaagagcaagctgatcgccggcaagatcatccccgccatcgccaccaccaccgccgccgtggtgggcctggtgtgcctggagctgtacaaggtggtgcagggccacagacagctggacagctacaagaacggcttcctgaacctggccctgcccttcttcggcttcagcgagcccctggccgcccccagacaccagtactacaaccaggagtggaccctgtgggacagattcgaggtgcagggcctgcagcccaacggcgaggagatgaccctgaagcagttcctggactacttcaagaccgagcacaagctggagatcaccatgctgagccagggcgtgagcatgctgtacagcttcttcatgcccgccgccaagctgaaggagagactggaccagcccatgaccgagatcgtgagcagagtgagcaagagaaagctgggcagacacgtgagagccctggtgctggagctgtgctgcaacgacgagagcggcgaggacgtggaggtgccctacgtgagatacaccatcagatag

SEQ ID NO: 340827 - DNA, 816 bp, Artificial Sequence
  derived and/or modified sequence
atgagcagcagccccctgagcaagaagagaagagtgagcggccccgaccccaagcccggcagcaactgcagccccgcccagagcgtgctgagcgaggtgcccagcgtgcccaccaacggcatggccaagaacggcagcgaggccgacatcgacgagggcctgtacagcagacagctgtacgtgctgggccacgaggccatgaagagactgcagaccagcagcgtgctggtgagcggcctgagaggcctgggcgtggagatcgccaagaacatcatcctgggcggcgtgaaggccgtgaccctgcacgaccagggcaccgcccagtgggccgacctgagcagccagttctacctgagagaggaggacatcggcaagaacagagccgaggtgagccagcccagactggccgagctgaacagctacgtgcccgtgaccgcctacaccggccccctggtggaggacttcctgagcggcttccaggtggtggtgctgaccaacacccccctggaggaccagctgagagtgggcgagttctgccacaacagaggcatcaagctggtggtggccgacaccagaggcctgttcggccagctgttctgcgacttcggcgaggagatgatcctgaccgacagcaacggcgagcagcccctgagcgccatggtgagcatggtgaccaaggacaaccccggcgtggtgacctgcctggacgaggccagacacggcttcgagagcggcgacttcgtgagcttcagcgaggtgcagggcatggtggagctgaacggcaaccagcccatggagatcaaggtgctgggctag

SEQ ID NO: 340828 - DNA, 3177 bp, Artificial Sequence
  derived and/or modified sequence
atgtcatccagccctctaagtaagaaacggagggtcagcggccccgaccccaagcccgggtcaaactgttcacccgcccagtctgtcctctcagaggttccatctgtcccgaccaacgggatggcgaagaatggctccgaagctgatatcgatgaaggcttgtacagcagacaactgtacgtgttgggtcacgaggccatgaagaggctccagacctcttccgtgcttgtgagcggactgcgggggctgggcgtagagatagccaagaatatcatcctgggaggggtgaaagctgtcaccctgcacgatcagggcaccgcccagtgggctgatctttcgagccagttctacttgagagaagaggatatcgggaagaatagagccgaagtgtcgcagccaaggctagccgaactgaattcgtatgtgcccgtgacagcctatacgggacccctcgttgaagatttcttgtccggtttccaggtagtcgtgttgactaacacccccctcgaagaccagttgagggttggagaattttgtcacaatcgtggcatcaagcttgtagtggcagatactcgcggattgttcggtcagttgttctgcgattttggcgaagagatgatcttgacagatagtaacggcgaacagcccctgagcgccatggtcagcatggtaacaaaggataatccaggggtggtgacatgtttggatgaggccagacacggattcgaatctggcgactttgtttcattctctgaggtccaggggatggtggaattaaacggaaaccaaccgatggaaattaaagtgcttggcccctacacattcagtatatgtgacacctctaatttttccgattatattcgtggcggaattgtttctcaggtgaaagtcccaaaaaagatctcttttaagagcctggtcgcgtcactggcagagcccgattttgtggtgacagattttgctaagttcagtcgccctgcacaacttcacatcggcttccaggcgttgcaccagttttgtgcacagcacggacgaccaccacggccacgaaacgaagaggacgcagcagaactggtggcgttggcgcaagctgtcaacgcacgcgctctgcctgcagtacagcaaaacaatttggacgaagaccttattcgtaaactggcttatgtggctgcaggtgacctggcccccatcaacgcttttattggagggctggccgcccaggaagtgatgaaggcctgctctggaaaattcatgccaattatgcaatggctgtattttgacgctctggagtgcctccccgaggacaaagaggtcctgacagaggataagtgcctgcaaagacagaaccgctacgatgggcaggttgccgtgtttggcagtgatctccaggagaaattgggtaaacaaaagtattttctggttggagccggagcaattggatgtgagctgctaaagaactttgcaatgattggcttgggttgcggggaaggaggtgagattattgttactgatatggatactattgagaaatcaaatctaaataggcagtttctgtttagaccatgggatgtcactaagctgaagagtgataccgccgcagccgccgtcaggcagatgaatccacatatccgcgtgacaagccaccagaatagggtcggaccagacaccgaaaggatctatgacgacgacttcttccagaatcttgatggagtggctaatgcattggataacgtcgacgctagaatgtacatggaccggcgatgtgtctattatcggaagccactactggaatctggaaccctggggactaagggaaacgtccaggtggtgatccctttcctaaccgaatcttattcctcatcccaggaccccccagaaaagagtatccccatctgtaccctgaaaaacttccccaacgctatcgaacacaccttgcagtgggccagagatgagttcgagggattgttcaaacagcccgcagaaaatgtcaatcaatatttaacggatcccaagtttgtggagaggaccctgcggcttgccgggacgcagccactcgaagttctggaggcagtgcagcgcagcctcgtgctgcagcggccccaaacctgggcagactgtgtgacctgggcctgccatcactggcacactcagtactccaacaacattaggcagctactgcacaattttccgcccgaccaactaacttcctcaggtgcccctttttggagcgggcccaagcgttgcccacaccctctcacctttgacgtgaataacccacttcacctcgattatgtcatggccgccgcaaacctgtttgcccaaacatacggtctcacagggtcacaggatcgtgccgccgtcgccactttcctgcagtcagtccaggtgcctgaattcacacctaaatcaggcgtgaaaattcacgtgtcagatcaggaattgcagagcgctaacgcatcagttgatgactcccgtctcgaagagctgaaggctaccctgccatctcccgacaaactacctgggttcaagatgtatccaattgacttcgaaaaagacgatgactccaacttccacatggatttcattgtggctgcatcaaatctgcgtgcggaaaattacgatatcccttccgccgaccgacataagagcaagctgatcgctggtaagatcattcccgcgatcgcaacaaccacggccgcagttgttgggcttgtgtgcctcgaactatacaaggttgtccaggggcatcgtcagcttgatagctataaaaacggattcttgaatttagcactgcccttcttcggtttctctgaaccacttgcggcccctaggcaccagtactacaaccaagagtggactctgtgggaccgcttcgaggtccagggcctccagcccaacggcgaggagatgacgctgaaacagtttctggattactttaagactgagcacaaactggagattactatgttaagccaaggagtgagtatgctctattctttctttatgcctgctgccaagttaaaagagcggttggaccagcccatgaccgagatcgtttctcgtgttagcaaacgcaagcttggtcggcacgtacgggcacttgttttagaactttgctgcaatgatgaatcaggagaagatgtcgaggtgccgtatgtgcgctatactatcagatag

SEQ ID NO: 340829 - DNA, 1521 bp, Artificial Sequence
  derived and/or modified sequence
atggggtttcatcatgtaggacaggcaggtctcgagccactgacctccggcgaccctagtgctctcgcaagtcaatcagcaggaatcactggagttagctattgtgcctggcctggcttcagtattgaagtcggtgagtgggggaggctcgaaggcttccccaccagtcgggtagcggtgaggctagtcctggctctgttcaccgacggcccctcaaacaatgcctgtgggaaccccttctgccagctgtggcctcacgttatctgtctgctttgtctccagtgggcccgagatgaattcgagggattatttaagcagccagccgagaatgttaaccaatatctcactgacccaaaattcgtcgagagaactctgcgattggcagggacccagccactggaggtcttagaagccgtgcagcgaagcctcgtgctgcagaggccgcagacctgggcagactgcgtgacatgggcctgccaccactggcacacacagtactccaacaacatcagacagcttctgcataacttccccccagaccagctcacctcatccggggcacccttttggagcggccctaagagatgcccccacccccttacattcgatgtcaacaaccccctgcacctggactacgtaatggcggccgccaacttgttcgcccagacatatgggttgaccggctcacaagatcgggccgctgtcgcaaccttccttcaatccgtccaggttcccgagttcactccaaagtcaggagtgaaaatacatgttagtgaccaggagttgcagtccgcgaacgcttctgtggacgactcacgcctcgaagagctgaaagctaccctgccatcaccggataaacttcctggttttaagatgtaccccattgactttgaaaaggacgatgactcaaactttcatatggactttattgtcgcggcttccaacctgcgtgcagagaactacgatatcccttctgccgatagacacaagtctaaactcatcgccggtaagatcattcccgcaatcgctactacaaccgctgctgtcgtgggcctggtctgtctggaactctataaggtggtgcaggggcatagacagctcgatagctacaaaaacggttttcttaatctggcattacctttttttgggttctctgaacccttggccgctccccgccaccagtactataatcaggaatggactctctgggatcgatttgaggtccagggcctgcagcccaatggcgaggagatgactcttaaacagttccttgattattttaagacagagcacaagttggaaatcaccatgctgtcccaaggagtgtccatgctgtattccttcttcatgcctgccgccaagctgaaggaacgactggaccagccaatgacggaaattgtgtcaagggtgagtaaacggaagttgggtcggcacgtgcgcgccctcgttctggaactgtgttgcaacgatgaatcaggcgaagacgtggaagtgccttatgttagatacaccatccgttag

SEQ ID NO: 340830 - DNA, 3177 bp, Artificial Sequence
  derived and/or modified sequence
atgtctagttcccccttaagcaaaaagcggcgcgttagcggaccagatcccaaacccggcagtaactgcagtcctgctcagtccgtgctttctgaagtgcccagcgtgcccaccaatggaatggcaaaaaatggttctgaggcagacattgatgagggcctctactctagacagctgtatgtgcttgggcatgaggctatgaagcgactccagacctcatcagtcctggtgtccggactgcgggggctgggagtggagattgccaagaatatcatcctgggcggggtgaaagctgtgactctgcatgatcagggcaccgcccagtgggccgacttgtcctcacaattttacctgcgggaggaggacattggcaaaaaccgagccgaagtgtctcagccccggcttgccgagctgaactcctatgtccctgtaactgcctacactggccctttggtcgaggactttctgtcaggcttccaagtagtagtgttaactaacacacccctggaggatcaactccgcgtgggcgaattctgtcacaatagaggcatcaagctcgtggttgctgatactcgcggtctctttggacagctattctgtgacttcggtgaggagatgattctcacggattccaacggtgaacaaccgctgtctgcgatggtgagtatggtcacaaaagataacccgggagtggtaacatgcttggacgaagcacggcatgggttcgagagcggtgatttcgtgtccttctcagaggtgcaagggatggtggagttgaatgggaatcagccaatggagatcaaggtccttggtccttacacatttagcatttgcgataccagcaatttcagcgattacatccggggcggcattgtttcacaggtgaaggttcccaagaaaattagttttaaaagcctggtggcaagcctggccgaacccgattttgttgtgactgactttgcaaagttcagtaggccagcacagctgcacatagggtttcaggcgcttcatcagttctgtgcccagcacggacgaccacctcggccccggaacgaggaagatgccgccgagcttgtggcactggctcaggctgtgaatgctcgcgccctgcccgccgtgcagcaaaataacctcgacgaagacctgattcggaagctggcctatgtcgccgctggtgacctcgccccgatcaacgcctttattggtggtctcgctgcacaggaggtgatgaaggcatgtagcggaaagttcatgccgattatgcagtggctgtacttcgacgcactagagtgtctccccgaggacaaagaggtgctcaccgaggacaagtgtttacaaagacagaatcgctatgacgggcaagtggccgtctttgggtctgatctccaggaaaagttgggtaaacagaaatattttctggtcggcgccggggccatcggctgcgagctattgaaaaacttcgccatgatcggactggggtgcggggagggaggagagattatagtgaccgacatggataccatcgaaaagagcaacctaaacagacaattcctcttcagaccgtgggatgtcacgaagctgaaatctgacaccgccgccgctgcagtccgccagatgaatcctcatatcagagtgacatctcaccagaatcgggtgggtcccgacacggaacgaatctatgatgatgattttttccagaatctcgatggagttgctaatgccctcgacaatgtggacgctaggatgtatatggatcgcaggtgcgtgtattaccggaaaccgttgctggaaagtgggaccctgggcaccaagggcaacgttcaggtggtaatccccttcctgacagagagctacagttccagccaggacccccctgagaagagtatccctatttgcacacttaagaacttcccaaacgccatagaacacaccttacagtgggcacgcgatgaatttgagggattgttcaagcaaccagccgaaaatgttaaccaatatctaaccgacccgaaatttgtagagcgcacgctgcggcttgctgggacacagccattggaggtgctagaggctgtgcagcggtcactggtgctgcagcgcccacagacttgggcagactgtgtcacctgggcctgccatcactggcacacacagtattcgaacaatattcgccaactgcttcacaattttccccccgatcagcttacgagctcgggagcccccttctggtctggacctaaaagatgcccgcatccactgaccttcgacgtcaacaacccactccacctcgactatgtcatggccgccgccaacctgtttgcgcagacctatgggctgacaggttctcaagatcgtgccgccgtcgccacattcctgcagagtgttcaggtgcccgaattcactcccaagagcggggtgaaaatccatgtgtcagaccaggagctgcaaagtgccaacgcgtcagtagacgactctcggctggaggagctcaaagccacattaccatcccccgacaaactgcccgggttcaagatgtatccgatagattttgagaaagacgatgactccaacttccatatggatttcatagtcgctgcctcgaatctcagagcagagaactacgatatcccttccgctgatcgacacaagtcaaaactgatcgccgggaagatcattccggcaatcgctaccacaacagccgcggtcgttggactggtctgtctggagctatacaaggtggtccaggggcaccgtcaactggacagctacaagaacggcttcctgaatctggcattgccgttcttcgggttcagtgaaccccttgccgccccgagacatcagtattacaatcaggagtggaccctttgggacagattcgaagtgcagggtttgcagccaaatggtgaagaaatgacgctgaagcaattcctggactatttcaaaactgaacataaactggagatcacgatgctcagccagggagtgagcatgctgtactccttcttcatgcccgcggccaagttaaaggagaggctcgatcaacctatgacagagattgtgagcagggtgtccaaacggaagttgggacgtcacgtgagggccctcgtgttggagctttgttgcaacgacgaatctggcgaggacgtggaagttccgtatgtcaggtatacaattaggtag

SEQ ID NO: 340831 - DNA, 816 bp, Artificial Sequence
  derived and/or modified sequence
atgtcaagttcgccattgtcaaagaaaagaagagtctctgggcccgacccaaaacccggaagcaattgctctcccgcacagagcgttctgtctgaagtccccagtgttcctactaacgggatggctaagaatggatcggaggctgacattgatgagggactgtatagtagacagctgtacgtgcttggccatgaggcaatgaaacggctgcagacatcatctgttctggtttccggcctcaggggtctaggagttgaaatcgccaagaacattattctaggcggtgtaaaagctgtgacccttcacgaccaggggacagcacagtgggccgacctgtcctcgcaattctacctgcgcgaggaagacatcggcaagaatagggctgaagtgtcccagccacggctggccgaactgaactcttacgtccccgtgacagcctatacgggacctctcgtggaggactttctctccggcttccaggtggtggtgctcacaaacacgccgctggaagatcaattgcgcgtgggggaattttgccataaccggggaatcaaattggtggtcgctgacactcgcgggcttttcggacagttattctgcgacttcggcgaggaaatgatcctaacagacagtaacggggaacagcctctttcagccatggtgtctatggtgaccaaagataatccaggggtggtaacgtgtcttgacgaagcaagacacgggtttgagagcggagatttcgtatccttctccgaggtccagggaatggtcgagttgaacggcaatcaaccgatggagataaaggttctgggctag

SEQ ID NO: 340832 - DNA, 3177 bp, Artificial Sequence
  derived and/or modified sequence
atgagcagcagccccctgagcaagaagagaagagtgtctggccctgaccccaagccaggcagcaactgcagccctgcccagagcgtgctgtctgaggtgcccagcgtgcccaccaacggcatggccaagaatggcagcgaggccgacattgatgagggcctgtacagccggcagctgtatgtgctgggccacgaggccatgaagaggctgcagaccagctctgtgctggtgtctggcctgcggggcctgggcgtggagatcgccaagaacatcatcctgggcggcgtgaaggctgtgaccctgcatgaccagggcacagcccagtgggccgacctgagcagccagttctacctgcgggaggaggacatcggcaagaacagagctgaggtgtcccagccccggctggccgagctgaacagctatgtgcctgtgacagcctacacaggccccctggtggaggacttcctgagcggcttccaggtggtggtgctgaccaacacccccctggaggaccagctgcgggtgggggagttctgccacaacagaggcatcaagctggtggtggccgacacccggggcctgtttggccagctgttctgtgactttggagaggagatgatcctgacagacagcaatggagagcagcccctgagcgccatggtgtccatggtgaccaaggacaaccctggggtggtgacctgcctggatgaggcccggcacggctttgagagcggggactttgtgtccttcagcgaggtgcagggcatggtggagctgaatggaaaccagcccatggagatcaaggtgctgggcccctacaccttcagcatctgtgacaccagcaacttcagtgactacatccggggcggcatcgtgtcccaggtgaaggtgcccaagaagatctccttcaagagcctggtggccagcctggccgagccagactttgtggtgacagactttgccaagttcagcaggcctgcccagctgcacatcggcttccaggccctgcaccagttctgtgcccagcacggccggcccccccggcccagaaatgaagaagatgctgctgagctggtggccctggcccaggccgtgaatgcccgggccctgcctgctgtgcagcagaacaacctggatgaggacctgatcaggaagctggcctacgtggccgccggggacctggcccccatcaatgccttcatcggcggcctggccgcccaggaggtgatgaaggcctgcagcggcaagttcatgcccatcatgcagtggctgtactttgatgccctggagtgcctgcctgaggacaaggaggtgctgacagaggacaagtgcctgcagaggcagaacagatatgatggccaggtggccgtgtttggaagtgacctgcaggagaagctgggcaagcagaagtacttcctggtgggcgctggggccatcggctgtgagctgctgaagaactttgccatgattggcctgggctgtggggagggcggggagatcatcgtgacagacatggacaccatcgagaagagcaacctgaaccggcagttcctgttccggccctgggatgtgaccaagctgaagagtgacacagctgctgctgctgtgcggcagatgaacccccacatccgggtgaccagccaccagaacagagtgggccctgacacagagcgcatctatgatgatgacttcttccagaacctggatggagtggccaatgccctggacaacgtggatgccaggatgtacatggaccggcgctgtgtgtactacaggaagcccctgctggagagcggcaccctgggcaccaagggaaatgtgcaggtggtgatccccttcctgacagagagctacagcagcagccaggaccccccagagaagagcatccccatctgcaccctgaagaacttccccaatgccatcgagcacaccctgcagtgggccagagatgaatttgagggcctcttcaagcagcctgcagaaaatgtgaaccagtacctgacagaccccaagtttgtggagaggaccctgcggctggccggcacccagcccctggaggtgctggaggccgtgcagaggagcctggtgctgcagaggccccagacctgggccgactgtgtgacctgggcctgccaccactggcacacccagtacagcaacaacatccggcagctgctgcacaacttccccccagaccagctgaccagcagcggggcccccttctggagcggccccaagcgctgcccccaccccctgacctttgatgtgaacaaccccctgcacctggactatgtgatggccgccgccaacctgtttgcccagacctacggcctgaccggcagccaggacagagctgctgtggccaccttcctgcagagcgtgcaggtgcctgagttcacccccaagtctggagtgaagatccacgtgtctgaccaggagctgcagagcgccaatgcctctgtggatgacagccggctggaggagctgaaggccaccctgcccagcccagacaagctgcccggcttcaagatgtaccccatcgactttgagaaggatgatgacagcaacttccacatggacttcatcgtggccgccagcaacctgcgggcagaaaattatgacatccccagcgctgacagacacaagagcaagctgattgctgggaagatcatcccagccatcgccaccaccacagctgctgtggtgggcctggtgtgcctggagctgtacaaggtggtgcagggccaccggcagctggacagctacaagaatggcttcctgaacctggccctgcccttcttcggcttcagcgagcccctggccgcccccaggcaccagtactacaaccaggagtggaccctgtgggacagatttgaggtgcagggcctgcagcccaacggggaggagatgaccctgaagcagttcctggactacttcaagacagagcacaagctggagatcaccatgctgagccagggcgtgtccatgctgtacagcttcttcatgcctgctgccaagctgaaggagcggctggaccagcccatgacagagatcgtgtcccgggtgtccaagaggaagctgggccgccacgtgcgggccctggtgctggagctgtgctgcaatgatgagagcggggaggatgtggaggtgccctacgtgcgctacaccatcagatag

SEQ ID NO: 340833 - DNA, 1521 bp, Artificial Sequence
  derived and/or modified sequence
atgggcttccaccacgtgggccaggccggcctggagcccctgaccagcggggaccccagcgccctggccagccagagcgctggcatcaccggggtgtcctactgtgcctggccaggcttcagcattgaggtgggggagtggggccgcctggagggcttccccaccagccgggtggccgtgcggctggtgctggccctcttcacagatggccccagcaacaatgcctgtggcaaccccttctgccagctgtggccccacgtgatctgcctgctgtgcctgcagtgggccagagatgaatttgagggcctcttcaagcagcctgcagaaaatgtgaaccagtacctgacagaccccaagtttgtggagaggaccctgcggctggccggcacccagcccctggaggtgctggaggccgtgcagaggagcctggtgctgcagaggccccagacctgggccgactgtgtgacctgggcctgccaccactggcacacccagtacagcaacaacatccggcagctgctgcacaacttccccccagaccagctgaccagcagcggggcccccttctggagcggccccaagcgctgcccccaccccctgacctttgatgtgaacaaccccctgcacctggactatgtgatggccgccgccaacctgtttgcccagacctacggcctgaccggcagccaggacagagctgctgtggccaccttcctgcagagcgtgcaggtgcctgagttcacccccaagtctggagtgaagatccacgtgtctgaccaggagctgcagagcgccaatgcctctgtggatgacagccggctggaggagctgaaggccaccctgcccagcccagacaagctgcccggcttcaagatgtaccccatcgactttgagaaggatgatgacagcaacttccacatggacttcatcgtggccgccagcaacctgcgggcagaaaattatgacatccccagcgctgacagacacaagagcaagctgattgctgggaagatcatcccagccatcgccaccaccacagctgctgtggtgggcctggtgtgcctggagctgtacaaggtggtgcagggccaccggcagctggacagctacaagaatggcttcctgaacctggccctgcccttcttcggcttcagcgagcccctggccgcccccaggcaccagtactacaaccaggagtggaccctgtgggacagatttgaggtgcagggcctgcagcccaacggggaggagatgaccctgaagcagttcctggactacttcaagacagagcacaagctggagatcaccatgctgagccagggcgtgtccatgctgtacagcttcttcatgcctgctgccaagctgaaggagcggctggaccagcccatgacagagatcgtgtcccgggtgtccaagaggaagctgggccgccacgtgcgggccctggtgctggagctgtgctgcaatgatgagagcggggaggatgtggaggtgccctacgtgcgctacaccatcagatag

SEQ ID NO: 340834 - DNA, 816 bp, Artificial Sequence
  derived and/or modified sequence
atgagcagcagccccctgagcaagaagagaagagtgtctggccctgaccccaagccaggcagcaactgcagccctgcccagagcgtgctgtctgaggtgcccagcgtgcccaccaacggcatggccaagaatggcagcgaggccgacattgatgagggcctgtacagccggcagctgtatgtgctgggccacgaggccatgaagaggctgcagaccagctctgtgctggtgtctggcctgcggggcctgggcgtggagatcgccaagaacatcatcctgggcggcgtgaaggctgtgaccctgcatgaccagggcacagcccagtgggccgacctgagcagccagttctacctgcgggaggaggacatcggcaagaacagagctgaggtgtcccagccccggctggccgagctgaacagctatgtgcctgtgacagcctacacaggccccctggtggaggacttcctgagcggcttccaggtggtggtgctgaccaacacccccctggaggaccagctgcgggtgggggagttctgccacaacagaggcatcaagctggtggtggccgacacccggggcctgtttggccagctgttctgtgactttggagaggagatgatcctgacagacagcaatggagagcagcccctgagcgccatggtgtccatggtgaccaaggacaaccctggggtggtgacctgcctggatgaggcccggcacggctttgagagcggggactttgtgtccttcagcgaggtgcagggcatggtggagctgaatggaaaccagcccatggagatcaaggtgctgggctag

SEQ ID NO: 340835 - DNA, 3177 bp, Artificial Sequence
  derived and/or modified sequence
atgagcagcagccccctgagcaagaagcggcgggtgagcggccccgatcccaaaccaggttctaattgtagtccagcacaatctgtgctgtcggaggtgccttctgtgcccacaaacggtatggctaaaaacggctctgaggcagacattgatgagggcctgtattcacgacaactgtacgtccttgggcacgaggcaatgaagcggcttcaaacatcctcagtgttggtttctggattgcggggcctcggtgttgagatcgctaaaaatatcatactgggtggagtgaaggccgtcacccttcacgaccaggggaccgcacaatgggcagatctctcctctcagttctacctgcgcgaagaggacataggcaagaacagagcagaggtgtcccagccccggctggcagagctgaactcgtacgtgcctgttaccgcgtataccggacccctagtagaggacttcctttccgggttccaggttgtcgtgctgacgaatactccacttgaagaccagctccgcgtgggcgagttctgccataaccggggaatcaagcttgtcgttgccgacacaagggggttgttcggtcaattgttctgtgacttcggcgaggaaatgatccttactgacagcaacggcgagcagcctctgtctgccatggtctcaatggttacgaaagataatccaggtgtagtgacctgtctggatgaggcacgccatggattcgaaagcggagacttcgtgtcattcagcgaggtacagggaatggtcgagcttaatggaaaccagcctatggaaatcaaggtgcttggcccttacactttctccatatgcgatacatcaaacttttctgactatattcgaggtgggattgtgtcccaggtcaaggtgccaaaaaagatttcttttaaatcactggttgcgtcccttgctgagcctgacttcgtggtaacagacttcgctaaattctcccgaccagctcagcttcacatcgggttccaagccctacaccagttctgtgcgcagcatggtaggccaccaaggccaaggaatgaagaggacgccgcagaacttgtagccctcgcccaagcagtcaacgccagagccctgcccgcagtacagcagaacaacttggatgaggacctgattcgaaagttggcttacgtcgctgccggggacctcgcacctattaacgcttttattggagggctggcagctcaagaggtgatgaaggcatgttcagggaagttcatgcccataatgcagtggctctacttcgacgccttagagtgtctccctgaggacaaggaagtccttacagaggataagtgcctccagaggcaaaatcgctatgacggccaagtggccgtgttcggtagtgatctgcaggagaaattaggcaagcagaagtattttttggtcggcgccggcgcaatagggtgcgaattactgaaaaacttcgccatgatcgggctggggtgtggtgaaggaggggagatcattgtcaccgacatggataccatagagaaaagcaatctgaatcgtcagtttttgttccggccatgggatgtcacaaaactcaagtctgatacagccgctgccgccgtgagacagatgaacccacatatacgggtgactagtcatcaaaatcgagtggggccagataccgagcgcatctatgacgacgacttcttccagaatctggacggtgtcgccaacgcactggataatgtagacgctagaatgtatatggatcggcgctgcgtgtactacaggaaaccactgttggaatccggcacgctggggactaaagggaacgtgcaggtcgttattccctttctcaccgaaagctattcatcttctcaggatccccctgagaagtcgattcctatctgtacattgaaaaacttccctaatgcaatcgagcataccctccagtgggcaagagacgaattcgaggggctgtttaagcagccggcagaaaacgtgaatcaatacttgactgacccaaagtttgttgagagaacactgcggctagcagggacccagcctttggaggtgctggaggccgtccagaggtccctcgttctgcaaaggccacagacctgggcagactgcgtcacatgggcttgtcaccactggcacactcagtatagtaataatatacggcagctcctccacaattttccacctgaccaattaacctcttccggcgcacctttttggtcaggcccaaaaagatgtccccacccccttactttcgatgtgaacaacccgcttcacttagactacgtaatggctgccgctaatctgttcgcacagacgtatgggcttacgggtagtcaggaccgggctgccgtggccacgttcttacagtctgttcaggtgcctgagtttactccaaagagcggggttaagatccatgtaagtgatcaggagttacaatctgcaaatgcgtccgtggatgactcacgactggaggaattaaaagccaccctgccctcccctgataaactgccaggatttaaaatgtatccaattgactttgagaaagacgacgactccaattttcatatggatttcattgtcgcagcttcgaacctgcgagccgaaaactatgacatcccttccgcagaccggcacaagtccaaacttatagccggaaagatcattcctgccatcgctaccacaacggctgcggtcgtcggattggtctgtttggaattgtacaaggtggtgcagggtcatcggcagttagatagctacaaaaatgggtttctcaatctcgctctgcccttctttggcttttctgaacccctcgccgccccacgacatcaatactacaatcaggagtggacgctgtgggatagattcgaagtccagggcctacagccaaacggcgaagaaatgactctgaaacagttcctcgactactttaaaacagagcacaagctggagattacaatgctgtcacagggggtgagcatgttgtatagtttcttcatgccggctgctaaactcaaagagaggctagatcagcccatgacagagattgtgtcccgggtcagtaaacggaagctgggacgccacgtgcgggcactcgtgctggaattatgttgcaatgacgagagcggcgaagatgtcgaagttccctacgtgagatacacgatcaggtag

SEQ ID NO: 340836 - DNA, 1521 bp, Artificial Sequence
  derived and/or modified sequence
atgggcttccaccacgtgggccaggccggcctggagcccctgacctcaggagacccttcagccctggcctcccaatctgctggtatcaccggtgtctcttactgtgcgtggcctgggttctctatcgaggttggcgaatgggggagattagagggattccctacctcaagagtggctgtgcgcctggtcctcgctttgttcacagacggccccagcaataacgcctgtggcaaccctttttgtcagctctggccacacgttatctgcctcctgtgtctgcaatgggccagggatgagtttgaagggctgttcaagcagccagctgagaatgtgaatcaatacctcacagaccctaagtttgtggagcgaactctgcgtttagccggcacccagcctctcgaagtgcttgaagccgtgcagaggagcctagttctccagcggcctcaaacatgggctgattgtgtgacatgggcctgtcatcactggcacacacaatactcaaacaacatcagacagctcttacataactttccaccggaccagttgacatcttcaggtgcccccttttggtctggccccaagagatgtccccatcctctcacgttcgatgtcaacaaccccctccatctggactacgtgatggccgctgctaacctgttcgcccagacttacggtttgacggggagccaggaccgggccgcagtcgccacgtttcttcagagcgtccaagtacccgaattcacccctaaatccggcgttaagatacatgtgtctgaccaggagctccagtccgccaacgccagtgtggacgatagcaggcttgaggagcttaaggcaaccctgccctcgcccgataaactacctggcttcaagatgtatcccattgacttcgagaaggacgacgattctaacttccatatggacttcatcgtggcagcaagtaatctgagagctgagaattatgatatcccctccgccgaccgacataagagcaagttgatcgccggaaagataattcctgcgatcgctactacaaccgctgccgtggtgggcttggtttgtttggaattgtacaaggtggtgcaaggccaccgccagcttgatagttataaaaatgggtttctgaaccttgctttgccttttttcggattttccgagcctcttgcagccccccgtcaccagtattacaatcaggagtggacactgtgggaccgattcgaggtgcaaggcctgcagcccaacggtgaggagatgaccttgaagcaattcctcgactatttcaagaccgagcacaaacttgaaatcacgatgctctcccagggggtaagcatgctctactctttcttcatgccagcggctaagctcaaggaacgactcgaccaaccaatgactgaaatcgtgtctcgcgtctccaagaggaagttaggaagacatgtgcgggccctggtgctggaactttgctgtaatgatgagtctggagaagatgtggaagtgccctatgtcaggtatactatcaggtag

SEQ ID NO: 340837 - DNA, 3177 bp, Artificial Sequence
  derived and/or modified sequence
atgagcagcagccccctgagcaagaagcggcgggtgagcggccccgacccaaagcctggcagcaactgcagcccagcgcaatcagtgctttcagaggtgccctccgtacccacaaacggaatggccaaaaacgggtcagaagcagacattgatgagggcttgtattctagacaactgtatgttctgggacatgaggccatgaaacggttacagacgagcagtgtgctggtgagcggcttaaggggattgggtgtagaaatcgcgaaaaacataattttaggaggagtgaaggccgtcaccctccacgaccagggaaccgctcagtgggccgacctgagctcgcaattttacctccgggaagaggacattgggaaaaacagagccgaggtctctcaaccgcggttagctgagttgaatagctatgtgcctgtcacagcgtacacaggacccctagttgaggacttcttgagtggcttccaggtcgtggtgctcaccaacaccccgctggaggatcagttaagagtgggagaattctgccataataggggcattaagctggttgtggccgatacccgcgggttgttcggccagctgttctgcgatttcggtgaagaaatgatcctcactgactcaaacggtgagcagcctctgtccgccatggtctccatggtgactaaagataatcctggagtggtaacctgcctggatgaggccagacacgggtttgagtccggtgactttgtcagtttcagcgaggtgcagggcatggtagagttgaatgggaatcagcctatggagattaaagtgttggggccctataccttttcaatttgtgatacctcaaacttttctgattacatcagaggtggtatagtcagccaggtgaaggtgccaaagaaaatttccttcaagtccctcgttgccagcctggccgaaccagacttcgtcgtcaccgatttcgctaaattcagtcgacctgcacagttgcacatcgggtttcaagctctccaccaattctgcgcccagcatgggcggcccccccgaccgagaaatgaggaggatgccgccgagctggtggccctagcccaagcagtaaacgccagagctctgcctgctgtgcaacagaataatctggacgaagacctcattcggaagcttgcctatgtggctgctggagacttagcgcccattaacgcttttatcgggggactagccgcccaggaagtcatgaaagcttgttccggaaaattcatgccgatcatgcaatggttatacttcgatgcactcgaatgtcttcccgaggacaaggaggtgctcaccgaggataaatgtctgcagagacagaaccggtacgacggtcaggtggctgtgttcggctcagacttgcaagaaaagctgggaaaacagaagtactttttggtcggcgctggggctattggttgcgaactgctcaaaaacttcgccatgatcggcctgggttgtggagagggcggcgagatcatagttactgacatggatacaatcgagaaatccaatctgaacagacagttccttttcaggccttgggatgtgactaagctaaaatctgacaccgctgctgcagcagttcgccagatgaatccgcatatccgggtgacctcacaccagaacagggtcgggcctgacacagagcgcatatacgatgacgatttcttccagaacttagatggagtagccaatgccctggacaacgtggatgcacgaatgtatatggatcggcggtgtgtctactatcgcaaacctctcctggagtccggaactttgggtaccaagggaaatgtacaggtcgtgatcccctttctcactgaatcgtatagcagttcacaggatccaccagagaaaagcatccccatctgcacattaaaaaattttcctaacgccatcgaacacacactccagtgggctcgcgacgagtttgagggcctcttcaaacagcctgcagaaaacgttaatcagtacctcacagatcccaaatttgtggaaagaactctgcgccttgctgggactcagcccctcgaggtgttagaagctgtacagagaagtcttgtgctgcaaagaccgcaaacctgggcggattgcgtgacttgggcctgtcatcactggcacacccagtactccaataacataaggcagctccttcataattttccacctgatcaactgacatcaagcggggccccgttttggagcggcccaaaacggtgccctcatcccttgaccttcgacgttaacaatcctcttcacctggactacgtcatggccgctgcaaatttgttcgcccaaacctatggcctcacaggcagtcaggaccgcgctgccgtagccacattcttacagagcgtccaggtgcccgagtttacacctaagagcggcgtgaaaattcacgtcagtgatcaggagctgcaaagcgctaatgcgagtgtggatgattctagactggaggagcttaaagccacgttgccaagtcccgataaactgccgggtttcaaaatgtatcccattgactttgagaaggacgatgactccaacttccacatggactttatcgtcgccgcaagcaacttgagagcagaaaattacgacattcctagtgccgacaggcataaaagtaagctcatagctggaaagattataccagccattgccacgacaaccgctgcggtggtgggtctcgtgtgtctagaactgtataaagtggtacagggacatcggcagttagacagttacaagaacgggttcctgaaccttgccttgccattctttggattctcagaaccactggcagccccgaggcatcagtactataatcaggagtggaccctttgggaccgcttcgaggtgcaaggccttcagcccaacggggaggagatgacccttaagcagttcctcgactattttaagaccgaacacaagctcgaaatcacaatgttgtctcagggcgtgagtatgctgtattcattctttatgccagcagccaaactcaaggaacgcttagatcagcctatgaccgagatcgtctcacgagtttccaaacgcaagctgggacggcacgtgcgtgcactggtgctggagctgtgttgcaatgacgagtcgggtgaggatgtcgaagtaccctacgtgcggtacactattcgctag

SEQ ID NO: 340838 - DNA, 816 bp, Artificial Sequence
  derived and/or modified sequence
atgagcagcagccccctgagcaagaagcggcgggtgagcggccccgacccgaaacctgggagcaattgcagtccagcacagagtgttttatccgaagtaccgagtgtacctaccaacggaatggcaaagaacggcagtgaggctgacattgacgaagggctgtactctcgccaactttatgtgttaggccacgaggctatgaagagactccagacctcctctgtgctcgtgtcaggcttgcgaggactgggagttgaaatcgctaagaatatcattctgggtggcgtcaaagccgttacccttcatgatcagggcactgcacagtgggccgatctgagctcgcagttctatctgagggaagaggatattggcaagaatagagcggaagtgagccagcctcggcttgcagaactgaatagttacgttcctgtgacagcctacaccggccccctagtggaggatttcctcagtggattccaggtggttgtgttgacaaacactccccttgaagatcagttgcgcgtcggagaattctgccacaaccgaggaattaaacttgtcgtcgctgatactcgcggactcttcgggcagctgttctgtgacttcggagaagaaatgatcctgacggactctaatggtgagcagccgttgtcagctatggtgagcatggtcactaaggacaaccccggcgtggtaacctgtcttgatgaagccagacacggcttcgagtccggggattttgtgagcttttctgaggtgcagggtatggtagagctaaatggaaatcagccgatggaaattaaggtcctggggtag

SEQ ID NO: 340839 - DNA, 3177 bp, Artificial Sequence
  derived and/or modified sequence
atgagcagctcccctctgagcaaaaagaggcgcgtatccggcccagaccccaagcccggttcaaactgctcaccagcccagtcagtgctgagcgaggtaccctccgtaccaactaacggaatggctaaaaatggatctgaagctgacatcgatgagggcctctattcccgccagctatacgtgctgggccacgaggcgatgaaaaggctacagaccagcagcgtcctcgtatccggtctccgtgggttgggtgtcgagatagcaaaaaacataatcctcggtggggtgaaggctgtaaccctgcatgatcagggaacagcacagtgggcagacctgagcagtcagttctaccttcgagaagaagacatcgggaaaaaccgggctgaagtcagtcagccgcgattggccgagctgaatagctatgtgccagttaccgcctatactgggccactcgtggaagatttcctgagtggcttccaggtggttgtcctcacaaacactccactggaagaccagctaagagtgggggaattctgccataacaggggtatcaaactggtggtggctgatacaagaggactgtttggacagttgttttgcgattttggggaagagatgattcttacagatagcaacggtgagcagcccctctcagctatggtctccatggtcaccaaggataaccctggggtcgttacctgcctcgatgaggcccgacacggattcgaatctggggactttgtgtcctttagtgaggtccaggggatggtagaactgaacggcaaccagcctatggagattaaggttctcggcccttacacatttagcatttgcgatacctcaaacttcagtgattatatccgagggggaatagttagtcaggtcaaggtgcccaagaaaatttcgttcaaatctctcgtggcctccttagccgagcctgatttcgtcgttaccgattttgccaaattttcaaggccggctcagctgcacataggctttcaggctctacaccagttctgcgcacagcatgggaggccgcctcggcctcgcaatgaagaagatgcagctgaattggtggccctggcgcaggcggtgaatgccagagccctgcccgctgtgcagcagaacaacttagatgaggatcttatcagaaagcttgcttatgttgctgccggagatctggcacctatcaacgcctttataggaggcctcgccgctcaggaggtcatgaaggcgtgctcaggtaagttcatgccaattatgcaatggctgtactttgatgcgctggaatgccttccagaggacaaagaggtcctcactgaggacaaatgcctgcaaagacagaatcgctacgacgggcaggtggcagtgttcggcagtgacttgcaagaaaaactcggtaaacagaagtatttcctcgttggcgctggagccatcggatgcgaactgcttaagaactttgcaatgatcggcctgggttgtggcgagggaggagaaattattgttacagatatggacactattgaaaaaagcaacctgaataggcagtttctgttccgcccatgggacgttacgaagctgaagagtgacaccgcagccgcagctgttaggcagatgaatcctcatatccgtgtgacctcccatcagaaccgggtaggtcctgacaccgagaggatctacgacgacgattttttccagaaccttgacggagttgccaatgcgttggacaacgtggacgccagaatgtacatggataggcggtgcgtttattataggaaacccctcctcgagtcgggtaccctcggaacaaaaggaaatgtccaggtggtaataccctttctgacagagtcctatagctcaagccaggaccccccagaaaagagtatacctatctgcaccttgaagaacttccctaatgctattgaacatacactccagtgggccagagacgagttcgagggtttgtttaaacagcccgcagagaatgttaaccagtacctgaccgacccaaagttcgtagagaggacgcttagactggcaggcacccagcctctggaagtgctcgaggctgtgcagagatcccttgtccttcagcggccacagacttgggccgattgtgtaacatgggcgtgccatcactggcacacacagtacagcaacaacattcgccagctcctccacaacttcccaccggatcagttaacctctagtggagcccctttttggagtgggcctaagcgctgcccacatccacttacctttgatgtgaacaatccccttcatcttgactacgtcatggccgctgccaacctgtttgctcaaacgtatggtcttacaggaagccaggatcgggctgccgtcgcaacattcctgcagtcagtgcaggtgcccgaatttactcctaagtcaggggtcaagattcacgtgagcgaccaggaactgcagtccgcaaatgctagcgtggatgattctaggctggaagagctcaaagccactttgccttcaccggacaagctcccgggatttaaaatgtacccaattgacttcgaaaaggatgatgattccaatttccatatggattttatcgtggccgcaagtaatctacgtgcagagaactatgacatccccagcgccgatcgccacaaatctaagttgatagccggtaagatcattcctgctatcgcaacgaccacagctgcggtcgtgggtctcgtctgcctcgaactgtataaggttgttcagggtcatcgccagctggattcgtataagaatgggtttctgaatttggctcttccattcttcggcttttctgagcccctggccgctccaaggcatcagtactacaatcaagagtggaccctttgggaccgttttgaggtacagggacttcagcctaatggtgaagagatgactttgaaacagtttcttgactacttcaaaacagagcataagctcgaaatcactatgttgtcccagggggtgtctatgctctatagcttctttatgcccgcagcaaaactgaaagagcgtctggaccagcctatgaccgagatcgtgtcacgagtttccaagagaaaactgggcaggcatgtgagagcccttgtcctggagttgtgttgcaacgacgaatctggcgaggacgttgaggtcccctacgttcggtacaccatccgatag

SEQ ID NO: 340840 - DNA, 1521 bp, Artificial Sequence
  derived and/or modified sequence
atgggctttcatcacgtgggccaggccggtctggagccactgacatcaggcgatccttccgcgctggcctcacaatctgccggtatcactggggtctcctactgcgcctggcctggcttcagcattgaggtgggtgagtggggtaggttagaaggttttcccacaagtagggtagcagtccgacttgttttggctctctttacagacgggccttctaacaatgcttgtgggaaccctttctgccagctgtggccacatgtgatctgcctgctttgcctccaatgggcccgtgatgagtttgagggactcttcaaacagcccgctgagaacgtgaaccagtatcttacggaccccaagtttgtcgaacgtacgcttcgactcgccggaacacagccccttgaggtgctggaagccgtgcagcgcagcctggtgctgcaaagacctcagacatgggctgattgcgtaacctgggcgtgtcaccattggcatactcagtacagcaataacatacgccaattactgcacaatttccccccagaccagctgacatcctctggagcaccattttggtccggcccaaagcgctgccctcatcctctcactttcgatgtgaataatcccctccatctggactacgtcatggccgctgccaacctattcgctcagacatacggccttacagggagccaggatcgggcagccgtggcgactttcttgcagtccgtacaagtgcccgaattcacacccaagtccggcgtgaagatccacgtttctgatcaagaactccagtctgctaacgctagtgtggatgattctcggctcgaagagctgaaagctaccctcccctcacctgacaagttgcctggcttcaagatgtaccccatcgactttgagaaagatgacgacagcaacttccatatggatttcattgtcgccgcaagtaacctgcgcgctgagaactacgatattcccagtgcagacagacacaagtctaagctaattgccggaaagattattcctgccattgcaaccacaaccgcagccgtggttggattagtatgcctggagctgtataaggtggtgcagggccataggcagctcgatagctacaaaaacggcttcctgaacctggctctacccttttttggcttttccgaaccactggccgctccaaggcaccagtactacaatcaggagtggactttatgggatcggtttgaggtgcagggcctacaaccaaatggcgaagagatgacgttgaaacaattcttggattatttcaaaactgagcacaagctggaaataaccatgctcagccagggtgtctccatgctgtatagtttctttatgccggctgccaagctcaaggagcgcttagaccagccaatgacggagatcgtcagcagagtcagtaagagaaagctgggtaggcatgtgcgggctctggtcctagagctgtgctgcaacgacgagtcaggggaggatgttgaggttccctacgtccggtacaccattcgatag

SEQ ID NO: 340841 - DNA, 3177 bp, Artificial Sequence
  derived and/or modified sequence
atgagcagttcccccttgtccaaaaagcggagggtgtcaggtcccgatccaaaacctggctccaactgttcacctgcacagtcggtgttaagcgaggtcccttccgtacctaccaacggaatggctaagaatgggtctgaagctgacatcgacgagggcctttactccagacagttgtatgtgttgggacatgaggccatgaagaggttacagacgagttcagtgctcgtgtctggtcttcgaggcctcggagttgagattgctaagaacatcatactgggcggagtaaaggcagtgaccttacacgaccagggaaccgctcagtgggccgatctatcttctcaattctacctgagagaagaagatatagggaagaaccgggcagaggtgagccagccccgtctcgccgaattgaacagctacgtgcccgtgaccgcgtacacaggcccactagtggaagactttttgagcgggttccaagtggttgtgttaacaaacactcccctcgaagatcaactgcgagtgggtgaattctgtcataacagaggcattaagctggtcgtagccgacacacggggactgttcgggcaactcttctgcgattttggtgaagaaatgatactcacggattctaacggagaacaacctctgtcagcaatggtctcaatggtcactaaagataaccccggtgtagtaacttgtctcgacgaggctcgacacggtttcgaatctggagattttgtctccttctccgaggtgcaaggaatggttgagctgaatggtaatcagcccatggaaattaaggtgctaggtccttatacattttccatttgcgacacatctaatttcagcgactacatccgcggtggaatagtctctcaggtcaaagtgccaaagaaaatttccttcaagagtctggtagcatcacttgccgaacccgatttcgtagtcacagactttgctaagttttctcgcccagctcagctccatataggctttcaggctctgcatcaattttgcgcccagcatggaagaccccctcgccctcggaatgaagaagacgctgccgaattggtggcactggcacaggccgtgaacgcgagagctttgcccgctgtgcagcagaataacttggatgaggatttgatacggaaactggcatacgtggcagcaggcgacttggccccaattaatgctttcattggagggctggctgctcaggaagtgatgaaggcctgttcaggcaaatttatgcccattatgcagtggctgtactttgatgccttagaatgcctgccagaggataaggaggtgcttaccgaggacaaatgtctccagaggcagaaccggtacgatggccaggtggccgttttcggctcagatttgcaggagaagcttggaaaacagaaatactttttggtgggcgcaggcgcaatcggttgcgagctgttgaagaattttgcaatgatcggcctgggttgcggggagggcggagaaatcatcgtgacagatatggataccattgagaagagcaatctgaataggcagtttttgttccgaccgtgggacgttacaaagctgaagagcgacacggctgcggcagcggtccggcagatgaatcctcacattagggttacatcacaccaaaacagagtcggcccagacacagagagaatctacgacgacgacttctttcaaaacctggatggggtggctaacgctctagataatgttgatgcgaggatgtatatggatagaaggtgtgtgtactataggaagcctctgctcgaatccggtactcttggtactaaggggaacgttcaggtggtcatccccttcttaactgagtcttattcctcatctcaggacccgccagagaagagcattcccatttgtacactcaagaatttccccaacgcgatcgagcatactctgcaatgggctcgggatgaatttgaaggtctgttcaagcagcctgctgagaatgtgaatcaatacctcaccgacccaaagtttgttgagagaaccttgcgtttggcaggaacacagcccctcgaggtgttggaagcagtgcaaaggtcccttgtactccagcgccctcagacctgggcggactgcgttacctgggcttgccatcactggcatacacagtattccaacaacatccgccagctactccacaattttcctcccgatcagctgacaagctcaggggcacctttctggagtggcccaaaaagatgtccccatcctctcacttttgatgtcaacaatccattgcatctggactatgtgatggccgcagcgaatcttttcgctcagacatatggactgacaggtagccaggacagggccgctgtcgccacgttcctgcagagcgtccaggtaccggaatttacaccaaaatcaggcgttaagatccacgtgagtgaccaggaacttcaaagcgccaacgcatccgtggatgacagccggcttgaggagctcaaggctactcttcctagccccgacaagttacccggatttaagatgtacccaatcgacttcgagaaggatgacgattccaattttcacatggacttcatcgtcgccgcaagcaatctgagagctgaaaattacgatattcccagcgcagatcggcataaaagtaagctcatcgcaggaaagattattccagctatcgcaacaaccacagcagcagtggtagggctcgtgtgcctggagctctacaaagtggtacaaggacatagacagctcgacagctataagaatggattcctgaaccttgcactccccttctttggcttctctgagcccctggccgctccacgccatcagtattacaatcaggaatggacactgtgggatcgatttgaggtgcagggcctgcagcccaatggcgaggagatgacactgaagcaattcttagactatttcaagactgagcacaagctggagataacaatgctgagccagggcgtgtctatgctgtactcattcttcatgccggctgccaaactcaaagagcggctagaccaaccaatgactgagatcgtgagtagagtgtccaagcggaaactgggacggcacgtgcgagcactcgtcctggagttatgttgcaacgacgaatccggagaggacgttgaggtgccttatgtgagatatacgatccggtag

SEQ ID NO: 340842 - DNA, 816 bp, Artificial Sequence
  derived and/or modified sequence
atgtcctcgagtccactatccaagaagcgcagggtgtccggaccagaccctaagccaggaagcaattgtagcccagcccaaagtgttctgagcgaggttccgagtgttcctaccaatggcatggcaaagaacgggagtgaggcagatatcgacgaagggctgtacagccgacagctctatgtgctggggcacgaagcgatgaaaagactgcagacttcttcggttcttgtgtccggcctccgaggattgggagtcgaaattgccaagaacataattctgggaggagtaaaggccgtgaccttacacgaccaggggacagcccagtgggcagacctgtcttcgcagttctatctgcgtgaggaagacatcggcaaaaatcgagccgaggtcagtcagccaagactggccgagctgaactcttatgtgcccgttaccgcgtacacagggccactggtggaggacttcctgtccggctttcaggttgtggtcctcactaacactcccctcgaggatcagctgagggtcggagaattctgtcataaccgcggtattaaacttgtggtcgccgataccagaggactttttggccagcttttctgcgatttcggagaggagatgatcctgaccgatagtaacggggagcaaccgttatccgccatggtttccatggtcacaaaggataatcccggagtggtaacctgtttagatgaggcacgtcatggattcgagagcggtgatttcgtgagctttagcgaagttcagggaatggttgaactgaacggcaatcaacctatggagatcaaggtgctagggtag

SEQ ID NO: 340843 - DNA, 3559 bp, Artificial Sequence
  derived and/or modified sequence
ggctcggctgtaaggaggtggcagggacaaccacaaccacaacggccgggggaggagaaggcggcagcggcgattctaggcggcccaggcggcggggaggaggagaaggaggagggtggcggccgggcttggcttcggctccttgaggagttggcggcggcgcgacccggggaaccggcattgatgtccagctcgccgctgtccaagaaacgtcgcgtgtccgggcctgatccaaagccgggttctaactgctcccctgcccagtccgtgttgtccgaagtgccctcggtgccaaccaacggaatggccaagaacggcagtgaagcagacatagacgagggcctttactcccggcagctgtatgtgttgggccatgaggcaatgaagcggctccagacatccagtgtcctggtatcaggcctgcggggcctgggcgtggagatcgctaagaacatcatccttggtggggtcaaggctgttaccctacatgaccagggcactgcccagtgggctgatctttcctcccagttctacctgcgggaggaggacatcggtaaaaaccgggccgaggtatcacagccccgcctcgctgagctcaacagctatgtgcctgtcactgcctacactggacccctcgttgaggacttccttagtggtttccaggtggtggtgctcaccaacacccccctggaggaccagctgcgagtgggtgagttctgtcacaaccgtggcatcaagctggtggtggcagacacgcggggcctgtttgggcagctcttctgtgactttggagaggaaatgatcctcacagattccaatggggagcagccactcagtgctatggtttctatggttaccaaggacaaccccggtgtggttacctgcctggatgaggcccgacacgggtttgagagcggggactttgtctccttttcagaagtacagggcatggttgaactcaacggaaatcagcccatggagatcaaagtcctgggtccttatacctttagcatctgtgacacctccaacttctccgactacatccgtggaggcatcgtcagtcaggtcaaagtacctaagaagattagctttaaatccttggtggcctcactggcagaacctgactttgtggtgacggacttcgccaagttttctcgccctgcccagctgcacattggcttccaggccctgcaccagttctgtgctcagcatggccggccacctcggccccgcaatgaggaggatgcagcagaactggtagccttagcacaggctgtgaatgctcgagccctgccagcagtgcagcaaaataacctggacgaggacctcatccggaagctggcatatgtggctgctggggatctggcacccataaacgccttcattgggggcctggctgcccaggaagtcatgaaggcctgctccgggaagttcatgcccatcatgcagtggctatactttgatgcccttgagtgtctccctgaggacaaagaggtcctcacagaggacaagtgcctccagcgccagaaccgttatgacgggcaagtggctgtgtttggctcagacctgcaagagaagctgggcaagcagaagtatttcctggtgggtgcgggggccattggctgtgagctgctcaagaactttgccatgattgggctgggctgcggggagggtggagaaatcatcgttacagacatggacaccattgagaagtcaaatctgaatcgacagtttcttttccggccctgggatgtcacgaagttaaagtctgacacggctgctgcagctgtgcgccaaatgaatccacatatccgggtgacaagccaccagaaccgtgtgggtcctgacacggagcgcatctatgatgacgattttttccaaaacctagatggcgtggccaatgccctggacaacgtggatgcccgcatgtacatggaccgccgctgtgtctactaccggaagccactgctggagtcaggcacactgggcaccaaaggcaatgtgcaggtggtgatccccttcctgacagagtcgtacagttccagccaggacccacctgagaagtccatccccatctgtaccctgaagaacttccctaatgccatcgagcacaccctgcagtgggctcgggatgagtttgaaggcctcttcaagcagccagcagaaaatgtcaaccagtacctcacagaccccaagtttgtggagcgaacactgcggctggcaggcactcagcccttggaggtgctggaggctgtgcagcgcagcctggtgctgcagcgaccacagacctgggctgactgcgtgacctgggcctgccaccactggcacacccagtactcgaacaacatccggcagctgctgcacaacttccctcctgaccagctcacaagctcaggagcgccgttctggtctgggcccaaacgctgtccacacccgctcacctttgatgtcaacaatcccctgcatctggactatgtgatggctgctgccaacctgtttgcccagacctacgggctgacaggctctcaggaccgagctgctgtggccacattcctgcagtctgtgcaggtccccgaattcacccccaagtctggcgtcaagatccatgtttctgaccaggagctgcagagcgccaatgcctctgttgatgacagtcgtctagaggagctcaaagccactctgcccagcccagacaagctccctggattcaagatgtaccccattgactttgagaaggatgatgacagcaactttcatatggatttcatcgtggctgcatccaacctccgggcagaaaactatgacattccttctgcagaccggcacaagagcaagctgattgcagggaagatcatcccagccattgccacgaccacagcagccgtggttggccttgtgtgtctggagctgtacaaggttgtgcaggggcaccgacagcttgactcctacaagaatggtttcctcaacttggccctgcctttctttggtttctctgaaccccttgccgcaccacgtcaccagtactataaccaagagtggacattgtgggatcgctttgaggtacaagggctgcagcctaatggtgaggagatgaccctcaaacagttcctcgactattttaagacagagcacaaattagagatcaccatgctgtcccagggcgtgtccatgctctattccttcttcatgccagctgccaagctcaaggaacggttggatcagccgatgacagagattgtgagccgtgtgtcgaagcgaaagctgggccgccacgtgcgggcgctggtgcttgagctgtgctgtaacgacgagagcggcgaggatgtcgaggttccctatgtccgatacaccatccgctgaccccgtctgctcctctaggctggccccttgtccacccctctccacaccccttccagcccagggttcccatttggcttctggcagtggcccaactagccaagtctggtgttccctcatcatccccctacctgaacccctcttgccactgccttctaccttgtttgaaacctgaatcctaataaagaattaataactccca

SEQ ID NO: 340844 - DNA, 2497 bp, Artificial Sequence
  derived and/or modified sequence
ctaattgaagtttttattttttatggaggcataacatatctagaataaggtacacagatttttttttttttttttttgaggtggagttttgctcatgttgcccaggttggagtgcagtggcgcagtctcggctcactgcagcctccgcctcccaggttcaagcgattctcctgcctcagccttccaaagtgctgggaatacaggcgtgagccacctcgcctggcactcagatcttaatacatttttaggctgggcatggcggctgacacctataatctcagcactcaggaggccaaggagtgaggtttgtttgagcccaggagttcaagaccagcctaggcaacatagcaagaccctgtctctacaacaaatcttaaaaattagccgggtgtggtggcatgtgcctgctgtcccagctattcgggaggctgaggtgggaggatcgtttcaacctgggaggtcaaggctgctgtgagccgtgattgcatcgctgcactccagctcgggtgacagtgtgagactttgtctcaaacaacaaaacaaaacagttttccacatacacagcactattgtaaccactgcccaaatcaacttcattgatttttctttttttgagacagtcttcctctgtcacccaggctggagtgcaatggcatgatctcggctcactgcaacctccgcctcccgggttcaagagatttcctgcctcagcctcctgagtagctgggattacaggcatctgccaccacgcccagctactttttgtatttttagtagagatggggtttcaccatgttggtcaggctggtctcgaacccttgacctcaggtgatccatctgccttagcctcccaaagtgctgggattacaggtgtgagctactgtgcctggcctggtttttcaattgaggtgggggaatggggaaggctagagggcttccccacttccagagtagctgtgcgccttgtacttgctttattcactgatggtccttctaataatgcctgcggaaacccattttgtcaactgtggccacatgtaatctgtttgctctgtctgcagtgggctcgggatgagtttgaaggcctcttcaagcagccagcagaaaatgtcaaccagtacctcacagaccccaagtttgtggagcgaacactgcggctggcaggcactcagcccttggaggtgctggaggctgtgcagcgcagcctggtgctgcagcgaccacagacctgggctgactgcgtgacctgggcctgccaccactggcacacccagtactcgaacaacatccggcagctgctgcacaacttccctcctgaccagctcacaagctcaggagcgccgttctggtctgggcccaaacgctgtccacacccgctcacctttgatgtcaacaatcccctgcatctggactatgtgatggctgctgccaacctgtttgcccagacctacgggctgacaggctctcaggaccgagctgctgtggccacattcctgcagtctgtgcaggtccccgaattcacccccaagtctggcgtcaagatccatgtttctgaccaggagctgcagagcgccaatgcctctgttgatgacagtcgtctagaggagctcaaagccactctgcccagcccagacaagctccctggattcaagatgtaccccattgactttgagaaggatgatgacagcaactttcatatggatttcatcgtggctgcatccaacctccgggcagaaaactatgacattccttctgcagaccggcacaagagcaagctgattgcagggaagatcatcccagccattgccacgaccacagcagccgtggttggccttgtgtgtctggagctgtacaaggttgtgcaggggcaccgacagcttgactcctacaagaatggtttcctcaacttggccctgcctttctttggtttctctgaaccccttgccgcaccacgtcaccagtactataaccaagagtggacattgtgggatcgctttgaggtacaagggctgcagcctaatggtgaggagatgaccctcaaacagttcctcgactattttaagacagagcacaaattagagatcaccatgctgtcccagggcgtgtccatgctctattccttcttcatgccagctgccaagctcaaggaacggttggatcagccgatgacagagattgtgagccgtgtgtcgaagcgaaagctgggccgccacgtgcgggcgctggtgcttgagctgtgctgtaacgacgagagcggcgaggatgtcgaggttccctatgtccgatacaccatccgctgaccccgtctgctcctctaggctggccccttgtccacccctctccacaccccttccagcccagggttcccatttggcttctggcagtggcccaactagccaagtctggtgttccctcatcatccccctacctgaacccctcttgccactgccttctaccttgtttgaaacctgaatcctaataaagaattaataactcc

SEQ ID NO: 340845 - DNA, 3297 bp, Artificial Sequence
  derived and/or modified sequence
atggatctgggcaccctttacgagtcttgtaaccaaccacaggacgcaatcaagtgctatctcaatgctactcgaagtaaatcatgttcaaatacgtcagcgctggccgcgaggataaagtacctccaggcacagttatgcaacctaccccagggttcactgcagaataagaccaaacttttgccctcaatagaagaagcttggtctttacccatccctgccgagttgacttctaggcagggcgctatgaacacagcgcaacaggcttgcaaaccacatcatccaaacacagaacccgtcctcggactgtctcagacccctatttcccaacaaagcctgccattgcacatgattcccagctcccaggtcgacgacttgtctagccccgccaaaagaaagagaacgtcaagtccaacgaaaaatacaagtgataattggtccggaggccacgccgtaagccatccccccgtgcagcagcaggcccattcgtggtgcctgacacctcagaaactgcagcacctggaacagctccgcgcaaacagaaataacctcaaccccgcacagaagcttatgctggaacaattggaatcccagtttgtgctcatgcagcagcatcagatgaggcctaccggggtggctcaggttagatctacaggaatacccaatggccccaccgcagatagtagtctcccaactaatagtgtgtcaggccaacagccacaactggcgctgacaagggttccaagtgtttcacagcccggtgttcgcccagcctgccctggtcagcccctcgccaacggccccttttccgctggccacgtaccatgcagcacaagcaggacattaggaagtaccgacactatcttgatcggaaacaaccacatcactgggtccggctcaaatggcaacgtcccgtacctgcagcgtaatgccctcaccttgccacacaaccgtaccaacttgacatcctctgccgaggaaccctggaagaaccagctatctaactccactcagggcctacataagggacaatcctcccactctgccggacccaacggtgagaggccactgagttcaactggcccttcgcaacatctgcaggcagccggctctggaattcaaaatcagaacggacatcccactctgccatcgaactccgtgacccagggagccgctcttaatcatctctcctcccatacagctaccagtggaggtcaacagggcatcacactgaccaaagaatctaagccttcaggcaacatcctgactgttcccgagacttcgcgacatacgggcgagacacccaactccactgcctctgtcgaggggttgcctaaccacgtccaccaaatgacagctgatgccgtctgctctccatcccacggcgactctaagagtccaggattactgagttctgacaacccccagttatcggccctgttgatgggcaaggctaataacaatgtggggactggcacatgcgacaaagtaaataacatccacccggctgtgcatactaagacggataattccgtcgcttcctcgccctcttcagctatttccacggccactccctcccccaagtccaccgagcaaacgactactaacagtgtcacttctctgaactccccccacagcggactgcatactataaacggtgagggcatggaggagagccagagtcccatgaagacagatcttcttctcgtgaatcacaagccctcccctcagatcatcccgtctatgagcgtaagcatctaccccagttcagctgaagtattaaaggcctgtcgcaatctgggcaaaaatggcctttctaactcaagcatactgctggataagtgtcctcctcctcggcccccatcatcgccttatccacccctcccaaaagataaactgaacccaccaacgccatccatatatctggagaataagcgggacgcgttctttcctcccctgcatcagttctgtaccaatccaaataaccccgtcactgtgattcggggcttggccggggcgctcaagctcgacttgggactgttctctaccaaaaccctggtggaagcaaataatgagcatatggtggaggtccggacccagctcctccagcccgctgacgaaaactgggaccccacagggacaaagaagatatggcattgcgaaagcaaccgcagtcatactacaattgccaaatatgcgcagtaccaggcttcttccttccaggaaagtctgagggaggagaatgaaaagcgatcccatcacaaagatcacagcgactcagagtcaacctctagcgataattctgggagaaggcgcaaaggtccatttaaaaccatcaagttcggaaccaacatagatctcagtgatgataagaaatggaagctgcagctgcacgagctcactaagctgcccgcctttgttcgggtggtgtccgctggcaatctgctgagccacgtgggacacaccatcctcggtatgaacacggtgcagttgtacatgaaggtacctgggtctcgcactccaggtcatcaagagaataacaatttttgctccgtgaatatcaacatcggccccggcgattgcgaatggttcgtcgttcctgaaggctattggggggtcctgaatgacttttgtgagaagaacaacttgaatttcttgatgggaagttggtggccaaacctggaggatctttacgaggcaaacgtaccggtatatcggtttatccagagacctggcgatctagtgtggattaacgctgggacggttcactgggttcaggctataggctggtgcaacaatattgcgtggaatgtcggccctctaactgcttgccagtataagctcgccgtagagcggtatgagtggaataagttgcaatctgtcaagtcgattgtgcctatggtccatctttcttggaacatggcccgaaatattaaagtgtcggaccccaagttgttcgaaatgattaaatattgtctccttcgtacactaaaacagtgccagacactgcgcgaggctctcattgcagcagggaaagagatcatatggcacggcagaaccaaggaagagcctgcccactattgttcgatatgcgaagtggaggtttttgacctcctcttcgttaccaacgagtccaactcccgcaaaacctatatagtacattgtcaggattgtgctcggaaaacctccgggaacctggagaattttgtggtcctggagcaatacaagatggaagaccttatgcaggtgtacgatcaattcaccttggcaccgccactcccttcagctagtagctag

SEQ ID NO: 340846 - DNA, 3135 bp, Artificial Sequence
  derived and/or modified sequence
tagaacaaaactaagcttctcccctcgatcgaagaggcttggagcctgcctatacctgccgagttgacctcgaggcaaggagccatgaatacggcacagcaggcctgcaagccgcatcacccgaacactgaaccggtgctgggactctctcaaacgccgatctcacagcaaagcttgcccttgcacatgatcccctcaagccaggtggacgaccttagttctccggcgaagcgcaaaagaactagcagtccaacgaaaaatacgagcgataattggtcgggtggacacgccgtcagtcatcccccagttcagcagcaagctcactcgtggtgtctgacccctcagaagttgcagcatctcgagcagttgagagcaaaccggaataatctcaatccagcacagaaactgatgctggagcaactggaatcacagttcgtccttatgcagcaacatcagatgcgcccaactggggtcgctcaggttaggagtaccggcatccctaacggccccactgccgatagtagcctccctacgaattcagtgagcggccaacagcctcaattagctctgacccgggtgccaagtgtcagtcagcctggcgttcggccagcctgtccaggacagcccctcgcaaatggaccgttttccgcaggccatgtcccatgctcaacctcccggacactgggatccactgacacaattctcataggtaataatcacatcaccggttctgggagcaatggaaatgtcccatacctgcaacgcaatgccctgactctgccccacaacaggaccaacttgacatcaagcgccgaggaaccttggaaaaatcagcttagtaacagcactcagggtttgcacaaaggacaatcgtcccattcagccggtcccaacggtgaacgccccttatcatctaccggtccatcacagcaccttcaagctgctggcagcggcatacagaaccaaaacggacaccctacattaccaagcaactccgttactcaaggggccgctctgaatcacctttcaagtcatacagccaccagtggtggacagcaagggatcacgctgacaaaggagagcaaaccgtccggcaacattctcactgtaccagagaccagcaggcacacaggagagacaccgaatagtactgctagtgtggagggcttaccaaatcacgtccaccaaatgacagcggatgctgtctgcagcccctctcatggcgattctaaatctccaggtctgctctcatctgacaaccctcagttgtctgctctgcttatggggaaagctaataacaatgtaggcactggcacttgcgacaaggtgaataacatacatcccgccgtccacacaaagaccgataactctgtggcaagctccccgtcatcggccatttccaccgccacaccctctccaaagagcacagagcaaacgaccactaattccgtaacctccctcaacagcccccatagtgggctgcatacaataaacggcgagggcatggaggagagtcagtccccgatgaaaaccgatcttctgctggtgaaccacaagcctagtccccagatcatcccctcaatgagcgtctccatatatccatccagcgcagaggtgcttaaggcatgtaggaacctcggtaaaaacggtctgagtaattcatccatactcttagataagtgcccacccccacgccccccttcaagtccttatccccccctgccaaaggataagctgaatcccccaacgcccagcatctacctcgaaaataagcgggacgcctttttcccacccctgcaccaattttgcactaatccgaataaccccgtaacagtcatacgaggcctggccggagcccttaagctggacctgggtttgttttcaaccaagactctggtggaggcaaacaatgagcatatggtggaggtgcgaacccagctcctccagcccgccgacgagaattgggaccccacaggcactaagaagatctggcattgcgaaagtaatcggtctcacaccaccatcgccaagtacgctcagtatcaagccagctcattccaggagtccctgagagaggaaaatgaaaaacgctcccaccataaagaccactccgactcagaaagcacaagctccgacaattccggccgcaggcgtaaggggccctttaagacaatcaaatttgggacgaacattgacctttctgacgacaaaaaatggaagctgcagctgcatgagctcactaagttaccagcattcgtgagagtggtgagtgccggcaatctattgtcccatgtgggccatacgatcctggggatgaacaccgtccagttgtacatgaaagtgccagggtctcgtacccccggacatcaggaaaacaacaacttctgtagcgttaacattaatatagggccaggagactgcgaatggttcgtagtccctgagggttactggggggtgctaaacgacttctgtgaaaagaacaacttgaacttcctcatgggatcatggtggcccaacttggaggacctgtatgaggctaatgtgccggtgtatagattcattcaacgccccggcgacctggtctggattaacgctggaacagttcactgggtgcaggcaatcggctggtgtaacaacatcgcttggaatgtgggtcctttaactgcctgccagtataaattggccgtggaaaggtacgaatggaacaagttacagtcagtgaagtcaattgtgcccatggtccatctctcatggaatatggcacgcaacattaaggtatccgacccaaaactgtttgagatgatcaagtactgccttttacgcacacttaagcaatgtcagacattgagagaggccctgatcgcagccggaaaggaaatcatctggcatggccgcaccaaagaggaaccagcccattattgctcaatctgcgaggtggaggtcttcgatcttcttttcgttactaacgagagcaacagccgtaagacctacatcgttcattgtcaggattgcgctcgcaagacctccggaaacctggaaaacttcgttgtgctggagcaatataagatggaggacctcatgcaggtgtatgatcagtttacactggcacctccactgccatccgcctcttcctag

SEQ ID NO: 340847 - DNA, 3297 bp, Artificial Sequence
  derived and/or modified sequence
atggacctgggcaccctgtatgagagctgcaaccagccccaggatgccatcaagtgctacctgaatgccaccaggagcaagagctgcagcaacaccagcgccctggccgcccgcatcaagtacctgcaggcccagctgtgcaacctgccccagggcagcctgcagaacaagaccaagctgctgcccagcattgaggaggcctggagcctgcccatcccagctgagctgaccagccggcagggcgccatgaacacagcccagcaggcctgcaagccccaccaccccaacacagagcctgtgctgggcctgagccagacccccatcagccagcagagcctgcccctgcacatgatccccagcagccaggtggatgacctgagcagccctgccaagaggaagaggaccagcagccccaccaagaacaccagtgacaactggagcggcggccatgctgtgagccacccccctgtgcagcagcaggcccacagctggtgcctgaccccccagaagctgcagcacctggagcagctgcgggccaacagaaacaacctgaacccagcccagaagctgatgctggagcagctggagagccagtttgtgctgatgcagcagcaccagatgaggcccaccggggtggcccaggtgcgcagcacaggcatccccaacggccccacagctgacagcagcctgcccaccaacagcgtgtctggccagcagccccagctggccctgaccagggtgcccagcgtgtcccagcccggggtgcggcctgcctgccccggccagcccctggccaacggccccttctctgctggccacgtgccctgcagcaccagcaggaccctgggcagcacagacaccatcctgattggcaacaaccacatcaccggcagcggcagcaatggaaatgtgccctacctgcagagaaatgccctgaccctgccccacaacagaaccaacctgaccagcagcgctgaggagccctggaagaaccagctgagcaacagcacccagggcctgcacaagggccagagcagccacagcgctggccccaacggggagcggcccctgagcagcacaggccccagccagcacctgcaggccgccggcagcggcatccagaaccagaatggccaccccaccctgcccagcaacagcgtgacccagggcgccgccctgaaccacctgagcagccacacagccaccagcggcggccagcagggcatcaccctgaccaaggagagcaagcccagcggcaacatcctgactgtgcctgagaccagccgccacactggagagacccccaacagcacagcctctgtggagggcctgcccaaccacgtgcaccagatgacagcagatgctgtgtgcagccccagccatggagacagcaagagccctggcctgctgagcagtgacaacccccagctgagcgccctgctgatgggcaaggccaacaacaacgtgggcaccggcacctgtgacaaggtgaacaacatccaccctgctgtgcacaccaagacagacaacagcgtggccagcagccccagcagcgccatcagcacagccacccccagccccaagagcacagagcagaccaccaccaacagcgtgaccagcctgaacagcccccacagcggcctgcacaccatcaacggggagggcatggaggagagccagagccccatgaagacagacctgctgctggtgaaccacaagcccagcccccagatcatccccagcatgtctgtgtccatctaccccagcagcgctgaggtgctgaaggcctgcaggaacctgggcaagaatggcctgagcaacagcagcatcctgctggacaagtgccccccaccccggccccccagcagcccctacccacccctgcccaaggacaagctgaacccccccacccccagcatctacctggagaacaagagagatgccttcttcccccccctgcaccagttctgcaccaaccccaacaaccctgtgaccgtcatccggggcctggccggggccctgaagctggacctgggcctcttcagcaccaagaccctggtggaggccaacaatgagcacatggtggaggtgaggacccagctgctgcagcctgcagatgagaactgggaccccaccggcaccaagaagatctggcactgtgagagcaacagaagccacaccaccatcgccaagtatgcccagtaccaggccagcagcttccaggagagcctgcgggaggagaatgagaagaggagccaccacaaggaccacagcgacagcgagagcaccagcagtgacaacagcggcagaagaaggaagggccccttcaagaccatcaagtttggcaccaacatcgacctgagtgatgacaagaagtggaagctgcagctgcacgagctgaccaagctgcctgcctttgtgcgggtggtgtctgctggcaacctgctgagccacgtgggccacaccatcctgggcatgaacacagtgcagctgtacatgaaggtgcccggcagcaggaccccaggccaccaggagaacaacaacttctgcagcgtgaacatcaacatcggccctggggactgtgagtggtttgtggtgcctgagggctactggggcgtgctgaatgacttctgtgagaagaacaacctgaacttcctgatgggctcctggtggcccaacctggaggacctgtatgaggccaacgtgcctgtgtaccgcttcatccagaggcctggggacctggtgtggatcaatgccggcaccgtgcactgggtgcaggccatcggctggtgcaacaacatcgcctggaatgtgggccccctgacagcctgccagtacaagctggccgtggagagatatgagtggaacaagctgcagagcgtgaagagcatcgtgcccatggtgcacctgtcctggaacatggccaggaacatcaaggtgtctgaccccaagctgtttgagatgatcaagtactgcctgctgcggaccctgaagcagtgccagaccctgcgggaggccctgattgctgctgggaaggagatcatctggcacggccgcaccaaggaggagcccgcccactactgcagcatctgtgaggtggaggtgtttgacctgctgtttgtgaccaatgaaagcaacagcaggaagacctacatcgtgcactgccaggactgtgccaggaagaccagcggcaacctggagaactttgtggtgctggagcagtacaagatggaggacctgatgcaggtgtatgaccagttcaccctggccccacccctgcccagcgccagcagctag

SEQ ID NO: 340848 - DNA, 3135 bp, Artificial Sequence
  derived and/or modified sequence
tgaaacaagaccaagctgctgcccagcattgaggaggcctggagcctgcccatcccagctgagctgaccagccggcagggcgccatgaacacagcccagcaggcctgcaagccccaccaccccaacacagagcctgtgctgggcctgagccagacccccatcagccagcagagcctgcccctgcacatgatccccagcagccaggtggatgacctgagcagccctgccaagaggaagaggaccagcagccccaccaagaacaccagtgacaactggagcggcggccatgctgtgagccacccccctgtgcagcagcaggcccacagctggtgcctgaccccccagaagctgcagcacctggagcagctgcgggccaacagaaacaacctgaacccagcccagaagctgatgctggagcagctggagagccagtttgtgctgatgcagcagcaccagatgaggcccaccggggtggcccaggtgcgcagcacaggcatccccaacggccccacagctgacagcagcctgcccaccaacagcgtgtctggccagcagccccagctggccctgaccagggtgcccagcgtgtcccagcccggggtgcggcctgcctgccccggccagcccctggccaacggccccttctctgctggccacgtgccctgcagcaccagcaggaccctgggcagcacagacaccatcctgattggcaacaaccacatcaccggcagcggcagcaatggaaatgtgccctacctgcagagaaatgccctgaccctgccccacaacagaaccaacctgaccagcagcgctgaggagccctggaagaaccagctgagcaacagcacccagggcctgcacaagggccagagcagccacagcgctggccccaacggggagcggcccctgagcagcacaggccccagccagcacctgcaggccgccggcagcggcatccagaaccagaatggccaccccaccctgcccagcaacagcgtgacccagggcgccgccctgaaccacctgagcagccacacagccaccagcggcggccagcagggcatcaccctgaccaaggagagcaagcccagcggcaacatcctgactgtgcctgagaccagccgccacactggagagacccccaacagcacagcctctgtggagggcctgcccaaccacgtgcaccagatgacagcagatgctgtgtgcagccccagccatggagacagcaagagccctggcctgctgagcagtgacaacccccagctgagcgccctgctgatgggcaaggccaacaacaacgtgggcaccggcacctgtgacaaggtgaacaacatccaccctgctgtgcacaccaagacagacaacagcgtggccagcagccccagcagcgccatcagcacagccacccccagccccaagagcacagagcagaccaccaccaacagcgtgaccagcctgaacagcccccacagcggcctgcacaccatcaacggggagggcatggaggagagccagagccccatgaagacagacctgctgctggtgaaccacaagcccagcccccagatcatccccagcatgtctgtgtccatctaccccagcagcgctgaggtgctgaaggcctgcaggaacctgggcaagaatggcctgagcaacagcagcatcctgctggacaagtgccccccaccccggccccccagcagcccctacccacccctgcccaaggacaagctgaacccccccacccccagcatctacctggagaacaagagagatgccttcttcccccccctgcaccagttctgcaccaaccccaacaaccctgtgaccgtcatccggggcctggccggggccctgaagctggacctgggcctcttcagcaccaagaccctggtggaggccaacaatgagcacatggtggaggtgaggacccagctgctgcagcctgcagatgagaactgggaccccaccggcaccaagaagatctggcactgtgagagcaacagaagccacaccaccatcgccaagtatgcccagtaccaggccagcagcttccaggagagcctgcgggaggagaatgagaagaggagccaccacaaggaccacagcgacagcgagagcaccagcagtgacaacagcggcagaagaaggaagggccccttcaagaccatcaagtttggcaccaacatcgacctgagtgatgacaagaagtggaagctgcagctgcacgagctgaccaagctgcctgcctttgtgcgggtggtgtctgctggcaacctgctgagccacgtgggccacaccatcctgggcatgaacacagtgcagctgtacatgaaggtgcccggcagcaggaccccaggccaccaggagaacaacaacttctgcagcgtgaacatcaacatcggccctggggactgtgagtggtttgtggtgcctgagggctactggggcgtgctgaatgacttctgtgagaagaacaacctgaacttcctgatgggctcctggtggcccaacctggaggacctgtatgaggccaacgtgcctgtgtaccgcttcatccagaggcctggggacctggtgtggatcaatgccggcaccgtgcactgggtgcaggccatcggctggtgcaacaacatcgcctggaatgtgggccccctgacagcctgccagtacaagctggccgtggagagatatgagtggaacaagctgcagagcgtgaagagcatcgtgcccatggtgcacctgtcctggaacatggccaggaacatcaaggtgtctgaccccaagctgtttgagatgatcaagtactgcctgctgcggaccctgaagcagtgccagaccctgcgggaggccctgattgctgctgggaaggagatcatctggcacggccgcaccaaggaggagcccgcccactactgcagcatctgtgaggtggaggtgtttgacctgctgtttgtgaccaatgaaagcaacagcaggaagacctacatcgtgcactgccaggactgtgccaggaagaccagcggcaacctggagaactttgtggtgctggagcagtacaagatggaggacctgatgcaggtgtatgaccagttcaccctggccccacccctgcccagcgccagcagctag

SEQ ID NO: 340849 - DNA, 4324 bp, Artificial Sequence
  derived and/or modified sequence
gaataaaactaaattacttcctagtattgaggaggcgtggagcctaccaattcccgcagagcttacctccaggcagggtgccatgaacacagcacagcaggcatgtaaacctcatcatccaaatactgaacctgtattaggcctcagtcaaacaccaatttcacagcaatccttgccactacacatgattccttctagccaagtagatgacctgtccagtcctgccaagaggaaaagaacatctagtccaacaaagaatacttctgacaattggagtggtggacatgctgtgtcacatcctccagtacagcaacaagctcattcatggtgtttgacaccacagaaattacagcatttggaacagctccgcgcaaatagaaataatttaaatccagcacagaaactgatgctggaacagctggaaagtcagtttgtcttaatgcaacaacaccaaatgagaccaacaggagttgcacaggtacgatctactggaattcctaatgggccaacagctgactcatcactgcctacaaactcagtctctggccagcagccacagcttgctctgaccagagtgcctagcgtctctcagcctggagtccgtcctgcctgccctgggcagcctttggccaatggacccttttctgcaggccatgttccctgtagcacatcaagaacgctgggaagtacagacactattttgataggcaataatcatataacaggaagtggaagtaatggaaacgtgccttacctgcagcgaaacgcactcactctacctcataaccgcacaaacctgaccagcagcgcagaggagccgtggaaaaaccaactatctaactccactcaggggcttcacaaaggtcagagttcacattcggcaggtcctaatggtgaacgacctctctcttccactgggccttcccagcatctccaggcagctggctctggtattcagaatcagaacggacatcccaccctgcctagcaattcagtaacacagggggctgctctcaatcacctctcctctcacactgctacctcaggtggacaacaaggcattaccttaaccaaagagagcaagccttcaggaaacatattgacggtgcctgaaacaagcaggcacactggagagacacctaacagcactgccagtgtcgagggacttcctaatcatgtccatcagatgacggcagatgctgtttgcagtcctagccatggagattctaagtcaccaggtttactaagttcagacaatcctcagctctctgccttgttgatgggaaaagccaataacaatgtgggtactggaacctgtgacaaagtcaataacatccacccagctgttcatacaaagactgataactctgttgcctcttcaccatcttcagccatttcaacagcaacaccttctccaaaatccactgagcagacaaccacaaacagtgttaccagccttaacagccctcacagtgggctacacacaattaatggagaagggatggaagaatctcagagccccatgaaaacagatctgcttctggttaaccacaaacctagtccacagatcataccatcaatgtctgtgtccatataccccagctcagcagaagttctgaaggcatgcaggaatctaggtaaaaatggcttatctaacagtagcattttgttggataaatgtccacctccaagaccaccatcttcaccataccctcccttgccaaaggacaagttgaatccacctacacctagtatttacttggaaaataaacgtgatgctttctttcctccattacatcaattttgtacaaatccgaacaaccctgttacagtaatacgtggccttgctggagctcttaagttagacctgggacttttctctactaaaactttggtggaagctaacaatgaacatatggtagaagtgaggacacagttgttgcagccagcagatgaaaactgggatcccactggaacaaagaaaatctggcattgtgaaagtaatagatctcatactacaattgctaaatatgcacagtaccaggcctcctcattccaggaatcattgagagaagaaaatgaaaaaagaagtcatcataaagaccactcagatagtgaatctacatcgtcagataattctgggaggaggaggaaaggaccctttaaaaccataaagtttgggaccaatattgacctatctgatgacaaaaagtggaagttgcagctacatgagctgactaaacttcctgcttttgtgcgtgtcgtatcagcaggaaatcttctaagccatgttggtcataccatattgggcatgaacacagttcaactatacatgaaagttccagggagcagaacaccaggtcatcaggaaaataacaacttctgttcagttaacataaatattggcccaggtgactgtgaatggtttgttgttcctgaaggttactggggtgttctgaatgacttctgtgaaaaaaataatttgaatttcctaatgggttcttggtggcccaatcttgaagatctttatgaagcaaatgttccagtgtataggtttattcagcgacctggagatttggtctggataaatgcaggcactgttcattgggttcaggctattggctggtgcaacaacattgcttggaatgttggtccacttacagcctgccagtataaattggcagtggaacggtacgaatggaacaaattgcaaagtgtgaagtcaatagtacccatggttcatctttcctggaatatggcacgaaatatcaaggtctcagatccaaagctttttgaaatgattaagtattgtcttctaagaactctgaagcaatgtcagacattgagggaagctctcattgctgcaggaaaagagattatatggcatgggcggacaaaagaagaaccagctcattactgtagcatttgtgaagtggaggtttttgatctgctttttgtcactaatgagagtaattcacgaaagacctacatagtacattgccaagattgtgcacgaaaaacaagcggaaacttggaaaactttgtggtgctagaacagtacaaaatggaggacctgatgcaagtctatgaccaatttacattagctcctccattaccatccgcctcatcttgatattgttccatggacattaaatgagaccttttctgctattcaggaaataacccagttctgcaccactggtttttgtagctatctcgtaaggctgctggctgaaaactgtgtctatgcaaccttccaagtgcggagtgtcaaccaactggacgggagagagtactgctcctactccaggactctcacaaagctgatgagctgtacttcagaaaaaaataataatttccatgttttgtatatatctgacaaaactggcaacatcttacagactactgacttgaagacaacctcttttatatttctctatttctgggctgatgaatttgttttcatctgtcttttcccccttcagaattttccttggaaaaaaaatactagcctagctggtcatttctttgtaaggtagttagcaattttaagtctttctttggtcaacttttttttaatgtgaaaagttaggtaagacacttttttactgcttttatgtttttctgtcttgttttgagaccatgatggttacacttttggttcctaaataaaatttaaaaaattaacagccaagtcacaaaggtaatggattgcacatagactaaggaataaacttcagatttgtgatttttgtttctaatcttgatgtaaatttacactatttataaatacatatttattgcttgaaaatatttgtgaatggaatgctgttattttttccagatttacctgccattgaaattttaaggagttctgtaatttcaaacactactcctattacattttctatgtgtaaataaaactgcttagcattgtacagaaacttttattaaaattgtttaatgtttaaagagttttctattgtttgagttttaaaaaagactttatgtacagtgcccagtttttgttcatttttgaaatctgattatatatattttatatatacttatgtatgtatatataatatatatagaaatctggatatatatgtataaatctttagaacttaaatttttctcgttttaagtttcacatctatggtagatttttgaggtgtctactgtaaagtattgcttacaaaaagtatgattatttttaaagaaatatatatggtatgtatcctcaagacctaaaatgtcagactggtttattgttaagttgcaattactgcaatgacagaccaataaacaattgctgccaaaa

SEQ ID NO: 340850 - DNA, 3297 bp, Artificial Sequence
  derived and/or modified sequence
atggacctgggcaccctgtacgagagctgcaaccagccccaggacgcaatcaagtgctatcttaacgcaactagaagcaagtcatgttcgaacacttccgccctcgccgccagaataaaatacctgcaggcccagctgtgcaatctaccgcagggatccctgcagaacaagacaaaactgcttccgagcatcgaagaggcgtggtccctgcccataccagctgaactgacctctaggcaaggtgccatgaacacagctcaacaggcctgtaagccacatcaccccaacacggaacccgtcctgggactgagccagaccccaatctcccagcagagcctccctctgcacatgataccgagctctcaagtggatgacttgtcttccccggcaaagcgcaaacgtacttccagccctaccaaaaacaccagcgataactggtcaggggggcatgcggtgtcccacccacccgtccaacagcaggcccacagctggtgcttgaccccccagaagctgcaacatctcgagcagctcagagcaaaccgcaataacctgaaccccgcccagaagttgatgctggaacagctggagtcccagtttgtgctgatgcagcaacaccaaatgcggccaactggggtggctcaagttcgttcaactggaattccgaatggccccaccgctgattcgtccctacctaccaacagcgtgtccgggcagcaacctcaactcgccttgacaagagtgcctagtgtgtcccaacccggagtgagacccgcatgccctggccaacctctggcaaacggtccgttttccgcgggacacgtgccctgcagcacctcacgcaccctcggaagcacagataccatactcattggaaacaatcacatcactggatctgggagcaacggtaacgtgccgtacctgcaaaggaatgccttgacgctccctcacaatcgaacaaaccttacttcttctgccgaagagccttggaagaaccagctgtcaaacagtacacaggggttgcacaaagggcagagttctcatagcgcaggccccaatggggaacggcctctttccagcaccggtccctctcagcatctgcaagctgcaggatctggaatccagaaccagaacggacacccgaccctgcccagtaattctgtgacccagggagccgctttgaatcacctatcaagccatacagctacatccggcggccagcagggtattacactgactaaggaaagtaagccgtccggaaatatactcaccgttccggaaactagtagacacacaggtgaaacccccaacagcaccgcctcggtagagggtctgcccaaccatgttcatcaaatgactgccgacgctgtctgctcgccctcacacggagattcaaagagccctgggctactgagttcggataatccacagttgagcgctctcctcatggggaaggccaacaacaatgttggaactgggacctgcgataaagtcaacaacatccaccctgcagtacacaccaagactgacaactctgttgcgagctcacccagctccgctattagtaccgcaaccccgtcccccaagagtaccgagcaaaccaccaccaactccgtaacctctctaaatagtccgcactctggcctccacaccataaatggagaaggcatggaagagagtcagtcccccatgaaaacagatctgcttcttgtcaaccataagccctcgccccaaataattccaagtatgtctgttagtatctatccgtcctcggccgaggtgctgaaggcatgcagaaacttaggaaaaaacggactgagcaacagcagcattctgctggataaatgtccacctccccgaccaccttcttcgccttatccccccttgccaaaggataagctcaacccgccaactccttctatttatctggaaaataaaagagatgcctttttccctccgctccaccagttttgcactaatcccaataaccccgtgacagtaattcgcgggctagctggcgcattgaagctcgacctcggcctgttcagcaccaaaactctggtggaggcaaacaatgaacatatggtagaagtgaggactcaattgctccaacccgccgacgagaattgggatcctaccggaactaaaaagatctggcattgtgagtctaaccggagccacacaaccatcgctaagtatgcccaatatcaagcatcctcatttcaagagagtctgagggaggagaacgaaaaacggagccatcataaagatcatagtgactctgagagcacaagttctgacaattccggtcggcgcagaaaggggcctttcaaaactatcaaatttggaaccaatattgatctctcagatgataagaagtggaagctccaactacacgagctgacaaagctgcccgcgttcgtgagggtcgtgtcagccggtaacctgctctcccacgttggtcatacaatcctaggaatgaacactgtccaactttatatgaaagtaccggggagtcgtacgcccggccatcaggagaacaacaacttttgttcagtcaacattaatatagggcctggggattgcgagtggttcgtggtgccggaaggatattggggcgtgctcaatgatttctgtgagaagaataacctcaatttcctgatgggcagttggtggcctaacctggaggacctatatgaggcaaatgtgccagtatatcgctttattcagcgccctggggatcttgtctggattaacgcagggaccgtacactgggtgcaagctatcggatggtgcaacaacatcgcttggaacgtgggtcctctgacagcctgccaatataaacttgccgtggaacgttacgaatggaacaaactgcagagtgtcaaatctattgttcccatggtgcacctttcttggaacatggcacgaaacattaaggtgagcgacccaaagctctttgagatgattaaatactgcctcctgcggaccctgaaacagtgtcagaccctgagggaggcccttatcgcagcaggcaaagaaattatctggcacggtaggaccaaggaggagccagctcattactgttctatctgtgaagtcgaggtctttgaccttctattcgtgaccaacgagtccaattcgcgcaaaacatacattgttcattgccaagattgcgcgcggaaaacaagcgggaacctagagaactttgttgtgctcgagcagtacaagatggaagatctgatgcaggtttacgatcagttcacgctcgccccgccactcccatcggctagctcatag

SEQ ID NO: 340851 - DNA, 3135 bp, Artificial Sequence
  derived and/or modified sequence
tgaaacaagaccaagctgctgcccagcatcgaggaggcctggagcctgcccattcccgccgagctcaccagccggcaaggcgcaatgaacaccgctcagcaagcttgcaagccccatcaccccaataccgagcccgtgttaggcctgagccaaactcctataagccagcagtctctgccgctgcatatgattccctcatcccaagtggatgatctaagctcccctgcaaaacggaagagaacctcatcaccaactaagaacacaagtgacaattggagcggagggcacgccgtgtctcatccgcccgtgcagcagcaggcccactcttggtgtctgacccctcagaagttacagcatttagagcagctgcgggcaaatcgtaacaatctgaatccagcgcagaagcttatgttggagcagctggagagccaatttgtgttaatgcagcagcaccaaatgcggcctaccggcgtcgcccaggtcagatcgacaggcattcctaatggacccactgcggactcgtcgttgccaactaactctgtgtctggccagcaaccccaactcgccctgaccagggtcccctcagtgagtcagcctggtgtgagacccgcctgccctggacagccgcttgcaaatggaccttttagtgccgggcatgtcccctgctctacaagcagaaccctgggatcaacagatacaatcctgattggcaataaccatataaccggatccggcagcaatgggaatgtgccttacttgcagcgcaatgctttgactctgcctcataatcggaccaacctgacatcctctgctgaggaaccgtggaagaaccagctgtctaattctacgcagggactacataaggggcagagttcacactcggctgggcccaacggcgagcggcccctttcctccaccggcccttctcaacatctgcaggccgctggatccgggatccaaaaccagaatggtcacccaacgcttcctagcaatagcgttacacaaggcgccgccctaaaccacctgagtagtcacaccgcgacctctggtgggcagcagggtattaccctgacgaaagagtccaaaccttccggaaacatcctaacagtgccagaaacgtcccgccacaccggggagacacctaattctacagcatcggtggaagggcttcccaaccacgtgcaccagatgactgccgatgccgtttgctcaccatcacatggggatagtaaaagcccggggctgctctctagtgacaatccccagctcagcgccctcctcatgggtaaggccaataacaacgtcgggaccggcacatgtgataaagtgaataatatccatccagcggtacatacgaagaccgacaactctgtcgcttcaagcccttccagcgcaatttctacagctacccctagccctaaatctacggaacagaccacaactaattctgttacttccctcaatagcccacattcgggcctgcatacaatcaacggagaaggtatggaggaatctcagagtcctatgaagacagatcttctgctggttaaccacaagccctctccacaaattatcccgtccatgagcgttagcatttacccgagtagtgctgaagttctaaaagcctgtagaaacctgggaaagaacggactctccaacagttcaatcctgttagataaatgcccaccgccgcgaccaccaagctccccctatcccccattgccaaaggacaaactaaatccaccaacaccctcgatatatctcgaaaataaaagagatgctttttttcccccgcttcaccaattttgtacaaaccctaataatcctgtgactgtcatccggggattagcaggggctctgaaactggacctgggcctgttttccacaaagacactggtagaggccaacaacgaacacatggtcgaggtcaggacgcagcttctccagcctgccgatgaaaactgggacccgaccggtacaaagaagatatggcactgtgaaagtaaccggagtcacaccacgatcgctaagtacgcacagtaccaagcctcatctttccaggagagcctacgtgaggaaaacgaaaaacgatctcaccataaagaccactcggactcagaaagcacttcatcagacaatagtggaaggagaaggaagggcccctttaagaccatcaaatttggcaccaacattgacctgtcagatgataagaaatggaagctccaactgcacgagttaactaagctccccgcattcgtgcgagtcgttagtgccggaaatctgctctctcatgtggggcacactattctcgggatgaacacggttcaactgtacatgaaggtgcctggttcgcggacccctggccatcaggagaacaataatttctgttcagtgaacatcaacattggtcccggcgactgtgaatggtttgtggtgccggagggctactggggcgtgctaaacgacttttgtgagaagaataatttaaacttcctgatgggttcctggtggccaaatctcgaagacctttacgaggccaatgtacctgtctacaggtttatccagcgacccggtgacctagtctggataaacgccggcactgtccactgggttcaggcgatcggatggtgtaataatatcgcctggaatgtggggccactcacggcttgtcagtataaactagcagtggaaaggtatgaatggaataagctacagtcagtcaaaagtattgtgccaatggttcacctgtcctggaatatggctcgcaacattaaggtctctgacccaaagctgttcgagatgatcaaatattgtctgctgagaactctcaagcaatgtcagactctgcgcgaagcgcttatcgctgccggcaaggagatcatctggcacggcaggacaaaagaagagcctgcccactactgcagcatctgcgaggttgaggtctttgatctcctttttgttactaacgagtcaaatagccgtaagacttatattgtgcattgtcaagactgtgcacgaaagacctccggcaacctggagaatttcgtggtccttgagcagtacaagatggaggacctgatgcaagtgtacgaccaatttactttggcgcctccattgccttccgcttcatcgtag

SEQ ID NO: 340852 - DNA, 3297 bp, Artificial Sequence
  derived and/or modified sequence
atggacttagggacactttacgaatcctgcaatcagccccaagacgcgatcaagtgctacctcaacgctacccggtctaagtcttgctcgaatacctcagcattggccgcaaggatcaagtacctacaggctcagctgtgtaacctgccccaggggagcttgcagaataaaacaaagctgttaccttcaatcgaagaggcgtggtccctgcccattcctgcagaattgacaagccgacaaggtgccatgaatacagcccagcaggcctgtaaaccccatcatcctaatacagagcccgtactgggtctgtcccaaacaccaataagccagcaatcgctgccgctccacatgataccttcctcccaagtggacgatttaagtagcccagcaaagcggaagagaacttccagtccaacaaagaacacctctgataactggagcggagggcacgccgtgagtcatcctcctgttcagcagcaggcccacagctggtgcctgacacctcagaagctgcagcacctcgagcagctgcgagcgaatagaaacaaccttaacccagcccagaaacttatgctcgagcagctggaaagccaatttgtactaatgcaacaacaccagatgcgtcccacaggcgtggctcaagtgagatctacaggaatacccaacgggccaaccgcagactcaagtctgcccaccaacagcgtgtccggtcaacagcctcagctcgccctgacacgtgttcccagcgtttcccagccaggcgtgcgacccgcttgtcccggtcagcctctagcgaatggaccctttagcgctgggcacgttccgtgctccacaagccgcacattggggtctactgacactattctgataggcaacaatcacatcacgggcagtggatctaatgggaacgtaccatacctgcagaggaatgccctgacattgcctcataacaggacaaacctgaccagtagtgcggaggagccctggaagaaccagctgtctaattccactcaaggcctgcacaagggccaatctagccattccgcgggacccaatggcgagaggcctctctcttccacagggccttcacagcacctccaggctgctgggtctggtattcagaaccagaacgggcaccctacattaccatcgaactcggtgactcagggagcagccctcaaccatctctccagtcacaccgctacctccggcggacagcagggaattacacttactaaggaatccaagccaagcggaaatattctgacagtgccagagaccagccgccacacgggggagacccccaattccaccgcctctgtagagggcctcccaaatcatgtccaccaaatgacggctgatgccgtgtgctcaccttctcatggggatagcaaatctccaggactgctgagctcggataatccacagctttccgcccttctcatgggcaaagctaacaacaatgtcggcacaggtacatgtgacaaggtcaataacatccacccagcagtgcataccaaaacggacaactcagttgccagctcccccagcagcgctatcagtactgctacgccgtcacctaaaagcacagagcagacgacaaccaactcggtcacaagcctcaactccccacactccggtctgcacactattaatggagaggggatggaagaatcccagtcacccatgaaaaccgacctgctattagtgaatcacaagccgtctcctcagattattccatccatgagtgtatcgatataccctagcagtgctgaggtgctgaaggcctgcagaaatttgggcaagaacggcctgagcaacagttccatactgttggataagtgtccgcctcccaggccgccatcctctccataccctccgctccctaaagataaactcaatcctcctacaccaagcatctacctcgaaaacaagagagacgcattcttccccccactgcaccaattctgtaccaacccaaacaatcccgtgaccgttatacgtggattggccggtgcgctgaaattggatttgggtctgttcagtaccaagacactcgttgaagcgaacaatgaacatatggtcgaggtccgtactcagctcctgcagcccgctgatgaaaattgggaccctacgggcaccaagaaaatttggcactgtgaatcaaatcgatctcacactacaatagcaaaatatgctcaatatcaagcaagttccttccaggagtcattacgtgaagaaaatgagaagcggtcccatcacaaagaccatagcgactccgagagtacatcttcggacaattccggacgaagaaggaaggggcctttcaagacaatcaagtttggaactaacatcgatctgtcagacgacaagaaatggaagttacagctacacgagctaacaaagctgcctgctttcgttcgtgtggtgagtgccggtaacttgctcagccacgtcgggcacactattctggggatgaataccgtgcagctgtatatgaaggttcctggttctcggacaccaggacaccaggagaataacaatttttgttccgtgaacatcaatatcggacccggagactgtgaatggtttgtcgtcccggaaggctattggggcgtgctgaatgatttttgcgagaaaaataaccttaatttcttgatgggctcttggtggccaaacctggaagatctgtacgaagctaatgtgcctgtgtacagattcattcagagacctggcgatctggtgtggattaacgccggaaccgtgcattgggttcaggccattggctggtgtaataacatcgcatggaatgtgggtcctctcaccgcctgtcagtacaaactagccgtggagcgatacgagtggaacaaactgcaaagtgttaagagcatcgtccccatggtccatctgtcttggaatatggccagaaatatcaaggttagcgaccccaagctatttgagatgataaagtactgtctgctccgaaccctcaaacaatgccaaacactgcgggaggcactgattgcagccggaaaggagataatttggcacggcaggaccaaagaggaacccgcacactattgcagcatatgtgaggtcgaagtgtttgatctgttatttgtgactaacgagtccaatagcagaaagacatacatcgtgcactgccaggactgcgcaagaaagacgtctgggaatctcgaaaattttgtcgtcctggagcagtacaagatggaagacctgatgcaggtctacgaccagtttacactggccccacccctgcccagcgctagctcttag

SEQ ID NO: 340853 - DNA, 3135 bp, Artificial Sequence
  derived and/or modified sequence
taaaacaagacaaaactgctaccgagcattgaggaagcctggagtctcccgattcctgcagagctgaccagccggcagggcgctatgaacactgcacagcaagcctgcaaaccacaccaccccaataccgagccggtgctcggattatctcagacccccatctctcaacagtctttgcccctgcatatgatcccttcctcgcaagtcgatgatctgtcctctcctgcgaagaggaaacgtactagcagccccaccaagaacaccagcgataactggtccgggggtcacgccgtcagccatcccccagtgcaacagcaagcacacagttggtgcttgacaccccaaaaacttcaacacctggaacaattgagagcaaatcgcaacaacctaaacccagcccaaaagttaatgctggaacagttggagagtcaattcgttttaatgcagcagcaccagatgagaccaactggtgtcgcccaggttcggagcaccggcatacctaacggaccgactgcagactcaagcttgcctacaaactcagtgagcggccagcaacctcagctggctctgactagagtgccttcagtctctcagcctggggtgcggcctgcatgtcctgggcagcctctcgctaatggccctttttccgctggacacgtaccgtgctccacaagcagaacactcggaagcaccgatactatcctcatcggcaacaaccatattactggcagtggatctaatggtaacgtgccttacctgcagcggaatgctctgacccttcctcacaataggactaatttaaccagttctgctgaagagccctggaagaatcagctgagcaactctactcaggggctccataagggtcagtcatcacatagcgcaggtcctaatggggagcgaccccttagctccacagggcctagtcaacatctacaggctgctggctctgggatccagaaccagaacggtcatccaactttgccgtcaaactccgtgacccagggcgctgcactgaaccacctctctagccacaccgccacttctgggggacagcaggggataactcttactaaagaatccaagccaagtggtaatattttaaccgtccccgagacctcccgacacaccggcgagacacccaacagtaccgcctccgtagaggggctcccaaaccatgttcaccagatgacggccgatgccgtgtgcagcccgagccatggagacagtaaaagccccggtctcttgtcatcagacaacccacagttatcggcactgttaatgggcaaagcgaataacaacgttggcacgggcacgtgtgataaagtgaacaacatccaccctgccgtccacaccaagacagataatagtgtggctagcagtccatcctcggccatttctactgccactccgtccccaaagagcacggagcagaccaccactaattcagtgaccagcctaaattccccccactctggcttacataccatcaacggcgaggggatggaggaatcccagagccctatgaagactgatctcctgcttgtgaaccataagccctccccacagataatcccgtccatgtccgtgtcaatttatcctagctccgcagaggtactgaaagcgtgcagaaacctcggcaagaacggcctgtcaaacagttccatactcctcgacaagtgccccccacctcggccaccttcgagcccatatcctcccctgccaaaagacaaactgaatccacctaccccctccatttatttggagaacaagcgggatgcctttttccctcctctacaccagttttgcacgaaccctaacaaccccgttactgttattcgcggactcgctggtgccctgaaacttgacctaggcttattttccacaaagaccctcgtggaggcgaataacgaacacatggtagaggtaaggactcagttgttgcagccagcggatgagaactgggatcctactggcaccaagaaaatatggcattgcgaaagtaataggtctcacacaactattgcaaagtatgcgcagtaccaggcctcttcctttcaggaatccctgcgggaggaaaacgaaaaacgaagtcaccataaagatcactccgacagcgaatcaacgtcaagcgacaacagcggtaggaggcggaagggcccttttaagaccatcaaattcggtacgaacattgatttgagcgacgataagaaatggaaactgcagttgcacgaactgaccaagctgcccgcttttgtgcgcgttgtgagtgcaggaaacttactctcccacgttggacacaccattctagggatgaatacagtgcagctttacatgaaggtgcctggatcgagaactccaggccatcaggagaataacaatttttgctccgttaacatcaatatcggtcccggtgattgcgagtggtttgttgtcccagagggttattggggggtactgaatgacttctgcgagaaaaataatttaaattttctaatggggagctggtggccaaacctcgaagacctctatgaggccaacgtaccagtttatcggttcatccagcgtcccggagatctggtgtggataaatgctgggacggtgcattgggtgcaggccattggctggtgtaacaacatcgcttggaacgtggggcctctcacagcttgtcagtacaaattggccgtggaacgttatgaatggaacaagctccagtctgttaagtcaatcgtgcccatggtgcacctcagctggaatatggccagaaatatcaaggtgtctgatcccaagttatttgaaatgatcaaatactgtctacttcggacccttaagcagtgtcagaccctgagagaggcccttatcgcggcaggcaaggaaattatctggcacggccgaaccaaagaggaaccggctcattactgtagcatttgtgaggttgaagtgtttgacctgttgtttgtgacaaacgagagcaatagccgtaagacatacattgtacattgtcaagactgcgctcgtaagacttccgggaatctggagaactttgtggtgctagaacagtataaaatggaagatcttatgcaggtgtacgaccagttcacactcgcaccccctctgccgtccgcaagcagctag

SEQ ID NO: 340854 - DNA, 3297 bp, Artificial Sequence
  derived and/or modified sequence
atggacctgggcaccctgtacgagagctgcaaccagccccaggacgccatcaagtgctacctgaacgccaccagaagcaagagctgcagcaacaccagcgccctggccgccagaatcaagtacctgcaggcccagctgtgcaacctgccccagggcagcctgcagaacaagaccaagctgctgcccagcatcgaggaggcctggagcctgcccatccccgccgagctgaccagcagacagggcgccatgaacaccgcccagcaggcctgcaagccccaccaccccaacaccgagcccgtgctgggcctgagccagacccccatcagccagcagagcctgcccctgcacatgatccccagcagccaggtggacgacctgagcagccccgccaagagaaagagaaccagcagccccaccaagaacaccagcgacaactggagcggcggccacgccgtgagccacccccccgtgcagcagcaggcccacagctggtgcctgaccccccagaagctgcagcacctggagcagctgagagccaacagaaacaacctgaaccccgcccagaagctgatgctggagcagctggagagccagttcgtgctgatgcagcagcaccagatgagacccaccggcgtggcccaggtgagaagcaccggcatccccaacggccccaccgccgacagcagcctgcccaccaacagcgtgagcggccagcagccccagctggccctgaccagagtgcccagcgtgagccagcccggcgtgagacccgcctgccccggccagcccctggccaacggccccttcagcgccggccacgtgccctgcagcaccagcagaaccctgggcagcaccgacaccatcctgatcggcaacaaccacatcaccggcagcggcagcaacggcaacgtgccctacctgcagagaaacgccctgaccctgccccacaacagaaccaacctgaccagcagcgccgaggagccctggaagaaccagctgagcaacagcacccagggcctgcacaagggccagagcagccacagcgccggccccaacggcgagagacccctgagcagcaccggccccagccagcacctgcaggccgccggcagcggcatccagaaccagaacggccaccccaccctgcccagcaacagcgtgacccagggcgccgccctgaaccacctgagcagccacaccgccaccagcggcggccagcagggcatcaccctgaccaaggagagcaagcccagcggcaacatcctgaccgtgcccgagaccagcagacacaccggcgagacccccaacagcaccgccagcgtggagggcctgcccaaccacgtgcaccagatgaccgccgacgccgtgtgcagccccagccacggcgacagcaagagccccggcctgctgagcagcgacaacccccagctgagcgccctgctgatgggcaaggccaacaacaacgtgggcaccggcacctgcgacaaggtgaacaacatccaccccgccgtgcacaccaagaccgacaacagcgtggccagcagccccagcagcgccatcagcaccgccacccccagccccaagagcaccgagcagaccaccaccaacagcgtgaccagcctgaacagcccccacagcggcctgcacaccatcaacggcgagggcatggaggagagccagagccccatgaagaccgacctgctgctggtgaaccacaagcccagcccccagatcatccccagcatgagcgtgagcatctaccccagcagcgccgaggtgctgaaggcctgcagaaacctgggcaagaacggcctgagcaacagcagcatcctgctggacaagtgccccccccccagaccccccagcagcccctacccccccctgcccaaggacaagctgaacccccccacccccagcatctacctggagaacaagagagacgccttcttcccccccctgcaccagttctgcaccaaccccaacaaccccgtgaccgtgatcagaggcctggccggcgccctgaagctggacctgggcctgttcagcaccaagaccctggtggaggccaacaacgagcacatggtggaggtgagaacccagctgctgcagcccgccgacgagaactgggaccccaccggcaccaagaagatctggcactgcgagagcaacagaagccacaccaccatcgccaagtacgcccagtaccaggccagcagcttccaggagagcctgagagaggagaacgagaagagaagccaccacaaggaccacagcgacagcgagagcaccagcagcgacaacagcggcagaagaagaaagggccccttcaagaccatcaagttcggcaccaacatcgacctgagcgacgacaagaagtggaagctgcagctgcacgagctgaccaagctgcccgccttcgtgagagtggtgagcgccggcaacctgctgagccacgtgggccacaccatcctgggcatgaacaccgtgcagctgtacatgaaggtgcccggcagcagaacccccggccaccaggagaacaacaacttctgcagcgtgaacatcaacatcggccccggcgactgcgagtggttcgtggtgcccgagggctactggggcgtgctgaacgacttctgcgagaagaacaacctgaacttcctgatgggcagctggtggcccaacctggaggacctgtacgaggccaacgtgcccgtgtacagattcatccagagacccggcgacctggtgtggatcaacgccggcaccgtgcactgggtgcaggccatcggctggtgcaacaacatcgcctggaacgtgggccccctgaccgcctgccagtacaagctggccgtggagagatacgagtggaacaagctgcagagcgtgaagagcatcgtgcccatggtgcacctgagctggaacatggccagaaacatcaaggtgagcgaccccaagctgttcgagatgatcaagtactgcctgctgagaaccctgaagcagtgccagaccctgagagaggccctgatcgccgccggcaaggagatcatctggcacggcagaaccaaggaggagcccgcccactactgcagcatctgcgaggtggaggtgttcgacctgctgttcgtgaccaacgagagcaacagcagaaagacctacatcgtgcactgccaggactgcgccagaaagaccagcggcaacctggagaacttcgtggtgctggagcagtacaagatggaggacctgatgcaggtgtacgaccagttcaccctggccccccccctgcccagcgccagcagctag

SEQ ID NO: 340855 - DNA, 3135 bp, Artificial Sequence
  derived and/or modified sequence
tgaaacaagaccaagctgctgcccagcatcgaggaggcctggagcctgcccatccccgccgagctgaccagcagacagggcgccatgaacaccgcccagcaggcctgcaagccccaccaccccaacaccgagcccgtgctgggcctgagccagacccccatcagccagcagagcctgcccctgcacatgatccccagcagccaggtggacgacctgagcagccccgccaagagaaagagaaccagcagccccaccaagaacaccagcgacaactggagcggcggccacgccgtgagccacccccccgtgcagcagcaggcccacagctggtgcctgaccccccagaagctgcagcacctggagcagctgagagccaacagaaacaacctgaaccccgcccagaagctgatgctggagcagctggagagccagttcgtgctgatgcagcagcaccagatgagacccaccggcgtggcccaggtgagaagcaccggcatccccaacggccccaccgccgacagcagcctgcccaccaacagcgtgagcggccagcagccccagctggccctgaccagagtgcccagcgtgagccagcccggcgtgagacccgcctgccccggccagcccctggccaacggccccttcagcgccggccacgtgccctgcagcaccagcagaaccctgggcagcaccgacaccatcctgatcggcaacaaccacatcaccggcagcggcagcaacggcaacgtgccctacctgcagagaaacgccctgaccctgccccacaacagaaccaacctgaccagcagcgccgaggagccctggaagaaccagctgagcaacagcacccagggcctgcacaagggccagagcagccacagcgccggccccaacggcgagagacccctgagcagcaccggccccagccagcacctgcaggccgccggcagcggcatccagaaccagaacggccaccccaccctgcccagcaacagcgtgacccagggcgccgccctgaaccacctgagcagccacaccgccaccagcggcggccagcagggcatcaccctgaccaaggagagcaagcccagcggcaacatcctgaccgtgcccgagaccagcagacacaccggcgagacccccaacagcaccgccagcgtggagggcctgcccaaccacgtgcaccagatgaccgccgacgccgtgtgcagccccagccacggcgacagcaagagccccggcctgctgagcagcgacaacccccagctgagcgccctgctgatgggcaaggccaacaacaacgtgggcaccggcacctgcgacaaggtgaacaacatccaccccgccgtgcacaccaagaccgacaacagcgtggccagcagccccagcagcgccatcagcaccgccacccccagccccaagagcaccgagcagaccaccaccaacagcgtgaccagcctgaacagcccccacagcggcctgcacaccatcaacggcgagggcatggaggagagccagagccccatgaagaccgacctgctgctggtgaaccacaagcccagcccccagatcatccccagcatgagcgtgagcatctaccccagcagcgccgaggtgctgaaggcctgcagaaacctgggcaagaacggcctgagcaacagcagcatcctgctggacaagtgccccccccccagaccccccagcagcccctacccccccctgcccaaggacaagctgaacccccccacccccagcatctacctggagaacaagagagacgccttcttcccccccctgcaccagttctgcaccaaccccaacaaccccgtgaccgtgatcagaggcctggccggcgccctgaagctggacctgggcctgttcagcaccaagaccctggtggaggccaacaacgagcacatggtggaggtgagaacccagctgctgcagcccgccgacgagaactgggaccccaccggcaccaagaagatctggcactgcgagagcaacagaagccacaccaccatcgccaagtacgcccagtaccaggccagcagcttccaggagagcctgagagaggagaacgagaagagaagccaccacaaggaccacagcgacagcgagagcaccagcagcgacaacagcggcagaagaagaaagggccccttcaagaccatcaagttcggcaccaacatcgacctgagcgacgacaagaagtggaagctgcagctgcacgagctgaccaagctgcccgccttcgtgagagtggtgagcgccggcaacctgctgagccacgtgggccacaccatcctgggcatgaacaccgtgcagctgtacatgaaggtgcccggcagcagaacccccggccaccaggagaacaacaacttctgcagcgtgaacatcaacatcggccccggcgactgcgagtggttcgtggtgcccgagggctactggggcgtgctgaacgacttctgcgagaagaacaacctgaacttcctgatgggcagctggtggcccaacctggaggacctgtacgaggccaacgtgcccgtgtacagattcatccagagacccggcgacctggtgtggatcaacgccggcaccgtgcactgggtgcaggccatcggctggtgcaacaacatcgcctggaacgtgggccccctgaccgcctgccagtacaagctggccgtggagagatacgagtggaacaagctgcagagcgtgaagagcatcgtgcccatggtgcacctgagctggaacatggccagaaacatcaaggtgagcgaccccaagctgttcgagatgatcaagtactgcctgctgagaaccctgaagcagtgccagaccctgagagaggccctgatcgccgccggcaaggagatcatctggcacggcagaaccaaggaggagcccgcccactactgcagcatctgcgaggtggaggtgttcgacctgctgttcgtgaccaacgagagcaacagcagaaagacctacatcgtgcactgccaggactgcgccagaaagaccagcggcaacctggagaacttcgtggtgctggagcagtacaagatggaggacctgatgcaggtgtacgaccagttcaccctggccccccccctgcccagcgccagcagctag

SEQ ID NO: 340856 - DNA, 3000 bp, Artificial Sequence
  derived and/or modified sequence
tgaggcaccctctatgagagttgtaaccagcctcaagacgccattaagtgctacctgaatgcaactagatctaagtcttgtagcaacacgagcgcactggctgctaggataaagtatctgcagaatacaagtgacaattggtcaggaggacatgcagtgagccacccacctgtccagcagcaagcccactcttggtgcctgactcctcaaaaacttcagcatcttgagcaattgcgggcaaaccgaaataacttgaacccagcccagaagctcatgcttgaacagctggagtctcagtttgtcctgatgcagcagcatcagatgcggccgacaggggtggcccaggtccgctcaaccggcattcctaacggcccgactgcagattcctcccttcctaccaacagcgtctcgggccaacagccccaactggcactcacacgtgtcccaagcgtctcacaacccggggtgcggcccgcctgcccggggcaacccctcgccaatggacctttttcagcaggtcatgttccatgttccacctccaggactctaggcagcactgacacaattctaatcgggaacaaccatatcaccggaagtgggtccaacggcaacgtcccttatctgcaacggaacgcactgactctgccccacaatcggaccaacctcacgagctcagcggaggagccatggaaaaatcagttaagtaactcaactcagggcctgcacaagggccagtcttcccattctgcaggcccaaatggcgagcgaccattgtcatcaacaggtccctcgcaacatcttcaggcagcaggaagcggcatccagaaccagaatgggcaccccaccttaccttccaatagtgtgacacaaggggccgcactgaaccacctgtcgtctcataccgctaccagcggcggtcaacagggaatcacactgacaaaagaaagcaagcctagtggaaatattctgaccgtgcccgaaacttcaagacataccggcgaaacccccaactctacagcctctgtggaaggactcccaaatcacgtgcatcaaatgactgcggatgccgtgtgctctccttcacacggtgacagcaagagccctgggctgctgtccagcgacaacccacagctttcggctctactgatggggaaagctaataacaatgtgggaacgggcacctgtgacaaggtgaacaatatccatccagctgtccacactaagacggacaattccgtcgctagctcgccttccagcgccatatcgacggctacaccctcgcctaaaagcacagagcagacaacgaccaattccgtcacctcactaaactccccccactctggactacatacgattaacggggaaggaatggaagaatcccaatcccccatgaagacagacctccttctggtcaaccataagccaagtccacagatcattccatctatgtctgtcagtatctatccctcctcagctgaggtgctcaaagcctgccgcaatctgggtaagaatggcttgagcaattcttctattctgttggataagtgcccacctccccgccctccttcaagcccctatccaccattgccaaaggataaacttaaccctcctaccccctctatttacctcgaaaacaaaagagacgccttttttcctccactgcatcagttctgcaccaatccaaataatccagtgaccgttatcaggggtctggcaggggctctgaagctcgacctgggcctgttctctaccaagacccttgtggaagcgaacaatgaacacatggtggaggtccggacccaactattgcagcctgccgacgaaaactgggatcctacagggaccaaaaagatatggcattgtgaaagcaatcgctcacacactaccatcgccaaatatgcccaataccaagcatccagcttccaggagtccctgcgtgaagagaacgagaagcgatcgcaccataaggaccactccgacagtgaatcaacctccagtgacaatagtgggcgccgcagaaagggaccattcaagaccatcaaatttggtaccaacatcgatctaagtgatgataagaaatggaaactacagctgcatgagctgaccaagctcccagcctttgtgagggtcgtttctgcaggcaatttgcttagccatgttgggcacacaattttggggatgaacactgtccaactgtatatgaaggtgccaggttcacgcactcctggtcatcaggaaaacaataatttctgctcagtcaatattaacatcggacctggggattgcgagtggtttgtcgtgcctgagggttactggggcgtactcaacgatttctgtgaaaagaataatctaaatttcctcatgggctcctggtggcccaacctggaagacctttacgaagcaaatgttcccgtttaccggtttattcagcgccctggagatctggtgtggattaacgctgggacggttcattgggttcaagccatcgggtggtgcaataatatcgcctggaatgtggggccattgactgcttgtcagtataaactggcagttgagcggtatgagtggaacaaactgcagtctgtgaagagtatcgttccgatggtacacctgagttggaatatggcccgtaatattaaagtgagtgatcctaagctgttcgagatgattaagtactgtctcctccgcacgttgaagcagtgtcaaaccctcagggaggcgctgattgcagctggaaaagagataatatggcatggtaggaccaaggaagagccagcccactactgttcaatctgtgaggtggaggttttcgacctgctcttcgtgacaaatgagagtaatagtaggaaaacttacatcgtgcactgccaggattgcgccaggaagacctccggaaaccttgagaactttgtggtgctggaacaatataaaatggaggatctgatgcaggtgtatgaccagttcacactggccccaccattgccctcagcctccagttag

SEQ ID NO: 340857 - DNA, 3000 bp, Artificial Sequence
  derived and/or modified sequence
tgaggaaccctgtatgagagctgcaaccagccccaggatgccatcaagtgctacctgaatgccaccaggagcaagagctgcagcaacaccagcgccctggccgcccgcatcaagtacctgcagaacaccagtgacaactggagcggcggccatgctgtgagccacccccctgtgcagcagcaggcccacagctggtgcctgaccccccagaagctgcagcacctggagcagctgcgggccaacagaaacaacctgaacccagcccagaagctgatgctggagcagctggagagccagtttgtgctgatgcagcagcaccagatgaggcccactggagtggcccaggtgcgcagcacaggcatccccaacggccccacagctgacagcagcctgcccaccaacagcgtgtctggccagcagccccagctggccctgaccagggtgcccagcgtgtcccagcccggggtgcggcctgcctgccccggccagcccctggccaacggccccttctctgctggccacgtgccctgcagcaccagcaggaccctgggcagcacagacaccatcctgattggcaacaaccacatcactggaagtggcagcaatggaaatgtgccctacctgcagagaaatgccctgaccctgccccacaacagaaccaacctgaccagcagcgctgaggagccctggaagaaccagctgagcaacagcacccagggcctgcacaagggccagagcagccacagcgctggccccaatggagagcggcccctgagcagcacaggccccagccagcacctgcaggccgccggcagcggcatccagaaccagaatggccaccccaccctgcccagcaacagcgtgacccagggcgccgccctgaaccacctgagcagccacacagccaccagcggcggccagcagggcatcaccctgaccaaggagagcaagcccagcggcaacatcctgactgtgcctgagaccagccgccacactggagagacccccaacagcacagcctctgtggagggcctgcccaaccacgtgcaccagatgacagcagatgctgtgtgcagccccagccacggggacagcaagagccctggcctgctgagcagtgacaacccccagctgagcgccctgctgatgggcaaggccaacaacaacgtgggcaccggcacctgtgacaaggtgaacaacatccaccctgctgtgcacaccaagacagacaacagcgtggccagcagccccagcagcgccatcagcacagccacccccagccccaagagcacagagcagaccaccaccaacagcgtgaccagcctgaacagcccccacagcggcctgcacaccatcaatggagagggcatggaggagagccagagccccatgaagacagacctgctgctggtgaaccacaagcccagcccccagatcatccccagcatgtctgtgtccatctaccccagcagcgctgaggtgctgaaggcctgcaggaacctgggcaagaatggcctgagcaacagcagcatcctgctggacaagtgccccccacccaggcctcccagcagcccctacccacccctgcccaaggacaagctgaacccccccacccccagcatctacctggagaacaagagagatgccttcttcccccccctgcaccagttctgcaccaaccccaacaaccctgtgaccgtcatccggggcctggccggggccctgaagctggacctgggcctcttcagcaccaagaccctggtggaggccaacaatgagcacatggtggaggtgaggacccagctgctgcagcctgcagatgagaactgggaccccaccggcaccaagaagatctggcactgtgagagcaacagaagccacaccaccatcgccaagtatgcccagtaccaggccagcagcttccaggagagcctgcgggaggagaatgagaagaggagccaccacaaggaccacagcgacagcgagagcaccagcagtgacaacagcggcagaagaaggaagggccccttcaagaccatcaagtttggcaccaacatcgacctgagtgatgacaagaagtggaagctgcagctgcacgagctgaccaagctgcctgcctttgtgcgggtggtgtctgctggcaacctgctgagccacgtgggccacaccatcctgggcatgaacacagtgcagctgtacatgaaggtgcccggcagcaggaccccaggccaccaggagaacaacaacttctgcagcgtgaacatcaacatcggccctggggactgtgagtggtttgtggtgcctgagggctactggggcgtgctgaatgacttctgtgagaagaacaacctgaacttcctgatgggctcctggtggcccaacctggaggacctgtatgaggccaacgtgcctgtgtaccgcttcatccagaggcctggggacctggtgtggatcaatgccggcaccgtgcactgggtgcaggccatcggctggtgcaacaacatcgcctggaatgtgggccccctgacagcctgccagtacaagctggccgtggagagatatgagtggaacaagctgcagagcgtgaagagcatcgtgcccatggtgcacctgtcctggaacatggccaggaacatcaaggtgtctgaccccaagctgtttgagatgatcaagtactgcctgctgcggaccctgaagcagtgccagaccctgcgggaggccctgattgctgctgggaaggagatcatctggcacggccgcaccaaggaggagcccgcccactactgcagcatctgtgaggtggaggtgtttgacctgctgtttgtgaccaatgaaagcaacagcaggaagacctacatcgtgcactgccaggactgtgccaggaagaccagcggcaacctggagaactttgtggtgctggagcagtacaagatggaggacctgatgcaggtgtatgaccagttcaccctggccccacccctgcccagcgccagcagctag

SEQ ID NO: 340858 - DNA, 4189 bp, Artificial Sequence
  derived and/or modified sequence
aggcactctctatgaatcctgcaaccagcctcaggatgccattaaatgctacttaaatgcaactagaagcaaaagttgtagtaatacctctgcacttgcagcacgaattaagtatttacagaatacttctgacaattggagtggtggacatgctgtgtcacatcctccagtacagcaacaagctcattcatggtgtttgacaccacagaaattacagcatttggaacagctccgcgcaaatagaaataatttaaatccagcacagaaactgatgctggaacagctggaaagtcagtttgtcttaatgcaacaacaccaaatgagaccaacaggagttgcacaggtacgatctactggaattcctaatgggccaacagctgactcatcactgcctacaaactcagtctctggccagcagccacagcttgctctgaccagagtgcctagcgtctctcagcctggagtccgtcctgcctgccctgggcagcctttggccaatggacccttttctgcaggccatgttccctgtagcacatcaagaacgctgggaagtacagacactattttgataggcaataatcatataacaggaagtggaagtaatggaaacgtgccttacctgcagcgaaacgcactcactctacctcataaccgcacaaacctgaccagcagcgcagaggagccgtggaaaaaccaactatctaactccactcaggggcttcacaaaggtcagagttcacattcggcaggtcctaatggtgaacgacctctctcttccactgggccttcccagcatctccaggcagctggctctggtattcagaatcagaacggacatcccaccctgcctagcaattcagtaacacagggggctgctctcaatcacctctcctctcacactgctacctcaggtggacaacaaggcattaccttaaccaaagagagcaagccttcaggaaacatattgacggtgcctgaaacaagcaggcacactggagagacacctaacagcactgccagtgtcgagggacttcctaatcatgtccatcagatgacggcagatgctgtttgcagtcctagccatggagattctaagtcaccaggtttactaagttcagacaatcctcagctctctgccttgttgatgggaaaagccaataacaatgtgggtactggaacctgtgacaaagtcaataacatccacccagctgttcatacaaagactgataactctgttgcctcttcaccatcttcagccatttcaacagcaacaccttctccaaaatccactgagcagacaaccacaaacagtgttaccagccttaacagccctcacagtgggctacacacaattaatggagaagggatggaagaatctcagagccccatgaaaacagatctgcttctggttaaccacaaacctagtccacagatcataccatcaatgtctgtgtccatataccccagctcagcagaagttctgaaggcatgcaggaatctaggtaaaaatggcttatctaacagtagcattttgttggataaatgtccacctccaagaccaccatcttcaccataccctcccttgccaaaggacaagttgaatccacctacacctagtatttacttggaaaataaacgtgatgctttctttcctccattacatcaattttgtacaaatccgaacaaccctgttacagtaatacgtggccttgctggagctcttaagttagacctgggacttttctctactaaaactttggtggaagctaacaatgaacatatggtagaagtgaggacacagttgttgcagccagcagatgaaaactgggatcccactggaacaaagaaaatctggcattgtgaaagtaatagatctcatactacaattgctaaatatgcacagtaccaggcctcctcattccaggaatcattgagagaagaaaatgaaaaaagaagtcatcataaagaccactcagatagtgaatctacatcgtcagataattctgggaggaggaggaaaggaccctttaaaaccataaagtttgggaccaatattgacctatctgatgacaaaaagtggaagttgcagctacatgagctgactaaacttcctgcttttgtgcgtgtcgtatcagcaggaaatcttctaagccatgttggtcataccatattgggcatgaacacagttcaactatacatgaaagttccagggagcagaacaccaggtcatcaggaaaataacaacttctgttcagttaacataaatattggcccaggtgactgtgaatggtttgttgttcctgaaggttactggggtgttctgaatgacttctgtgaaaaaaataatttgaatttcctaatgggttcttggtggcccaatcttgaagatctttatgaagcaaatgttccagtgtataggtttattcagcgacctggagatttggtctggataaatgcaggcactgttcattgggttcaggctattggctggtgcaacaacattgcttggaatgttggtccacttacagcctgccagtataaattggcagtggaacggtacgaatggaacaaattgcaaagtgtgaagtcaatagtacccatggttcatctttcctggaatatggcacgaaatatcaaggtctcagatccaaagctttttgaaatgattaagtattgtcttctaagaactctgaagcaatgtcagacattgagggaagctctcattgctgcaggaaaagagattatatggcatgggcggacaaaagaagaaccagctcattactgtagcatttgtgaagtggaggtttttgatctgctttttgtcactaatgagagtaattcacgaaagacctacatagtacattgccaagattgtgcacgaaaaacaagcggaaacttggaaaactttgtggtgctagaacagtacaaaatggaggacctgatgcaagtctatgaccaatttacattagctcctccattaccatccgcctcatcttgatattgttccatggacattaaatgagaccttttctgctattcaggaaataacccagttctgcaccactggtttttgtagctatctcgtaaggctgctggctgaaaactgtgtctatgcaaccttccaagtgcggagtgtcaaccaactggacgggagagagtactgctcctactccaggactctcacaaagctgatgagctgtacttcagaaaaaaataataatttccatgttttgtatatatctgacaaaactggcaacatcttacagactactgacttgaagacaacctcttttatatttctctatttctgggctgatgaatttgttttcatctgtcttttcccccttcagaattttccttggaaaaaaaatactagcctagctggtcatttctttgtaaggtagttagcaattttaagtctttctttggtcaacttttttttaatgtgaaaagttaggtaagacacttttttactgcttttatgtttttctgtcttgttttgagaccatgatggttacacttttggttcctaaataaaatttaaaaaattaacagccaagtcacaaaggtaatggattgcacatagactaaggaataaacttcagatttgtgatttttgtttctaatcttgatgtaaatttacactatttataaatacatatttattgcttgaaaatatttgtgaatggaatgctgttattttttccagatttacctgccattgaaattttaaggagttctgtaatttcaaacactactcctattacattttctatgtgtaaataaaactgcttagcattgtacagaaacttttattaaaattgtttaatgtttaaagagttttctattgtttgagttttaaaaaagactttatgtacagtgcccagtttttgttcatttttgaaatctgattatatatattttatatatacttatgtatgtatatataatatatatagaaatctggatatatatgtataaatctttagaacttaaatttttctcgttttaagtttcacatctatggtagatttttgaggtgtctactgtaaagtattgcttacaaaaagtatgattatttttaaagaaatatatatggtatgtatcctcaagacctaaaatgtcagactggtttattgttaagttgcaattactgcaatgacagaccaataaacaattgctgccaaaa

SEQ ID NO: 340859 - DNA, 3000 bp, Artificial Sequence
  derived and/or modified sequence
tgaggcaccctgtacgagagctgcaaccagccccaggacgccatcaagtgctaccttaacgcaactcgctccaagtcttgttctaatacatccgcactggcagcaagaatcaaataccttcagaatacctcggacaattggtccggggggcacgctgtctcccaccccccagtccaacagcaggcccactcatggtgcctgactcctcagaagctacaacaccttgagcagttgagggctaacagaaataatcttaatcccgcccagaagctgatgctggagcaactggaaagccagttcgtgttgatgcaacaacaccagatgcgcccgacaggcgtcgcccaagtcagaagtaccgggatccctaacggccctaccgccgactcaagcctcccaacaaattcagtgagcggacaacagccccagctggcactgacacgagtgccgtctgtgtcccaacccggtgtgagacctgcctgtcccggacaacccttagccaacggacctttctcagcaggtcatgtgccctgtagcactagcaggacactcgggtcaactgatacaatcctaatcggcaataaccacatcaccggctccgggagcaacggcaatgtgccgtatctccagcgcaacgctctcactctccctcataaccggactaatttgacgagctcggcggaagaaccctggaagaaccaactgagtaattccacccaggggctgcataaaggccagtccagtcacagcgctggacccaatggagagcggccgcttagctccacaggcccatctcagcatctgcaagctgcgggtagtgggatccagaatcagaacggacacccaaccctaccatccaattccgtcacccaaggcgccgccctcaatcacctgtcttcccacacggcgacctccggcgggcagcagggtattaccctgaccaaggagtcaaagccttccgggaacatcctgaccgtgcccgagacatccaggcataccggggagactcctaatagcacagcttccgtcgaaggcctgcctaaccacgtccatcagatgacagcggacgctgtttgttctcccagtcacggggattctaaatcaccggggctccttagctctgataacccacagctaagcgccctcctgatgggaaaagcaaataacaatgtcggaacagggacttgcgacaaggttaacaacattcatcccgcagttcataccaaaacggacaactccgtggcatcaagcccttcttccgcgatcagcactgcaactccaagccccaagagtactgagcagactaccacaaactcagtcacgagcctcaattctccccactctggtctgcacacaatcaacggggagggaatggaggaatctcagtctccaatgaagaccgacttattgctggtgaatcataagccatccccacaaatcattccctctatgtctgtcagcatttacccaagcagtgccgaggtactgaaagcctgtaggaatttagggaaaaatggactgtccaacagctctattctcctggacaagtgtccacctcccaggccaccgagttccccctaccccccacttcccaaagacaagctgaatcctcccactccctccatttatcttgaaaataaacgggatgctttcttccctcccttacaccagttctgcacgaaccctaacaacccggtcaccgtcattcgggggcttgctggcgcacttaaattggatttaggcctctttagtaccaagaccctggtggaggctaacaacgagcacatggtggaagttcggacccagctcctccagcccgcagatgaaaattgggatcccaccggcactaaaaagatatggcattgtgagtctaacagatctcacacaacaatcgcaaagtatgcccagtatcaggccagcagctttcaggaatcactgagggaagaaaacgagaaacgctctcatcacaaggaccactctgactccgaatcaacatcctctgacaatagcgggaggcggcgtaagggcccattcaagaccatcaagttcggtaccaatatcgatttatccgatgataagaaatggaaacttcagttgcacgagctcaccaagctaccggccttcgtcagggtcgtgtcagccgggaaccttttaagccatgttggtcatactatcttgggtatgaacaccgtacagctatacatgaaggttcccggtagcagaacccctggccaccaagagaataacaatttctgtagcgtgaacattaacatcgggccaggggattgcgaatggttcgtcgtgcctgagggttactggggcgtgctcaatgatttctgtgagaagaacaatctgaacttcctcatgggctcatggtggcccaatcttgaggatctgtacgaggctaacgtgcctgtttacaggttcatccagcggcccggagacttagtctggatcaatgcggggactgtgcactgggtgcaggcaatcggatggtgtaacaacatagcctggaacgtggggccgctgacagcgtgtcaatataaactcgctgtggagcgctacgaatggaataaactgcagagcgttaagtctatagttccaatggtgcatctgtcttggaacatggcccgcaacataaaagtgtccgatcccaaactatttgagatgatcaagtattgcctcttacgtaccctgaagcagtgtcagacacttagagaagccctgattgctgccggaaaggagatcatctggcacggtcgcacaaaggaggagcctgcacactactgcagtatctgcgaggtggaagtgttcgatttactattcgttacaaatgagtctaattcaagaaagacatatatagtccactgccaagattgtgccagaaaaacatccgggaatctggaaaatttcgtagtgctagagcagtacaaaatggaagacctgatgcaggtttatgaccagttcaccctcgctccacctttgccaagcgcgtcgtcctag

SEQ ID NO: 340860 - DNA, 3000 bp, Artificial Sequence
  derived and/or modified sequence
tagggcaccctctacgaatcttgtaaccagccacaggatgctattaaatgctacctgaatgctactagatccaagagctgctctaacactagtgccctggccgcacggatcaagtacctacaaaacacctcggacaactggtccgggggtcacgctgtgtctcaccctccagtccaacagcaggcacacagctggtgtctgacaccccagaagctgcagcatttagagcagctgcgcgctaaccgtaacaatttgaaccccgctcagaaacttatgctggagcagcttgagagccaatttgtgctgatgcagcagcaccagatgaggcccactggcgtcgcccaggtccgtagtactgggattcccaacggacctacagccgatagctcgctgccaactaattccgtcagcggccaacagccacagctggcacttactcgggtgccctcggtgtcacagcccggagtgagaccagcatgccccggtcaaccactcgccaacggcccattttccgccggtcacgtcccatgtagcacatcaagaacactgggctcaacagacacaattcttataggcaataatcatatcactggctctgggtctaatgggaatgtcccctatctgcaaagaaatgccctgaccctcccacataatcgcaccaacctgaccagttcagcggaggagccgtggaagaatcagctctctaacagtacgcagggcttgcataagggtcagtccagccattccgccggaccaaatggagaacgtccactgtcatctacagggccatcccagcacctgcaggccgcaggatccgggattcagaatcagaacggtcacccaactctgccatcgaactctgtgactcagggcgcagccctgaaccatctgagctctcatacagccacctcaggcggtcagcagggcatcaccttgacgaaggaatccaaaccctcaggtaatatcctgaccgttccagagacatctcgacataccggggagactcctaacagtactgcctccgtggaggggctccccaatcacgtacatcagatgacagctgatgcagtgtgctcaccctcacatggggactccaaatcccctggcctcctctccagcgacaatccccaattgagtgccttactcatgggtaaagcaaacaacaatgtgggcaccggcacttgtgacaaggttaacaatatacatcctgccgtgcatactaaaacggataattcagtggcgtctagccctagctcagccatctcaacggccaccccatctcctaagtccactgagcaaacgaccacgaacagcgtcaccagcctgaacagccctcattctggccttcacaccattaacggcgagggaatggaagagagccagtctcctatgaagacggacttgctgctggttaatcacaagccctcacctcagatcataccttccatgtctgtgagcatataccctagtagcgccgaggtgctgaaggcatgtaggaatctgggcaaaaatgggctgtctaattcttctatactcttggataaatgtcccccacctcgccctccatctagtccttatccacccttgcctaaagacaaactgaatccaccgaccccaagcatctacttggaaaataagcgggacgcatttttccctccattacaccagttctgcaccaacccgaacaacccagtgacagtgataaggggactcgcaggagccctaaagttggacctggggctcttcagtacaaaaactctggtggaagcaaacaatgaacacatggttgaagtcagaacacagttgttacaaccagccgacgagaattgggatcctaccggcaccaaaaaaatctggcactgtgagtccaacaggagccatacaacaattgcaaaatatgcacagtaccaagcttcctctttccaggaatctcttagagaagaaaacgaaaagaggtcacatcataaggatcactctgactctgaatccactagttccgataactcagggaggaggcgcaaaggcccatttaaaaccattaagtttgggacaaatattgacctgtctgacgacaaaaagtggaagctgcagttgcatgagctgacaaagctccccgcatttgtgagagtggtgagcgccggaaatctcctgtcacatgtcggacacactatcctgggcatgaataccgtgcaactctacatgaaagtgcccggatccaggacccccggtcaccaggaaaacaacaatttctgctcagtgaatataaacatcggaccaggcgactgtgaatggttcgtggtgcctgagggttattggggggtcctgaacgacttttgtgagaaaaacaacctcaattttctgatgggtagctggtggcctaatctggaggatctatatgaagcgaatgtgcccgtctaccggtttatccagagacccggagacttggtgtggattaacgccggaacggtgcattgggtccaagctataggctggtgcaacaacatcgcatggaatgtcggcccactgacagcctgccagtacaaactggccgttgagcgatacgagtggaacaaacttcagtccgttaagtcaattgttcccatggtgcacctgagctggaacatggctcgaaacattaaggtatcagaccctaagctcttcgaaatgatcaaatattgtctgctccggacgctgaagcagtgtcagaccctgcgcgaagctttgatcgcggcagggaaagagatcatctggcacgggcgaacaaaagaagaaccggcacattactgctcaatttgcgaggtggaggtatttgatttgctcttcgtgacaaacgagtcgaacagtaggaaaacatatatcgtgcattgtcaggattgtgcaaggaaaacaagcggcaatttggagaatttcgttgtgctggagcagtataagatggaggatctcatgcaggtgtacgatcaattcacactggctccccctctcccatccgcatcatcttag

SEQ ID NO: 340861 - DNA, 3000 bp, Artificial Sequence
  derived and/or modified sequence
tgaggcaccctgtacgagagctgcaaccagccccaggacgccatcaagtgctacctgaacgccaccagaagcaagagctgcagcaacaccagcgccctggccgccagaatcaagtacctgcagaacaccagcgacaactggagcggcggccacgccgtgagccacccccccgtgcagcagcaggcccacagctggtgcctgaccccccagaagctgcagcacctggagcagctgagagccaacagaaacaacctgaaccccgcccagaagctgatgctggagcagctggagagccagttcgtgctgatgcagcagcaccagatgagacccaccggcgtggcccaggtgagaagcaccggcatccccaacggccccaccgccgacagcagcctgcccaccaacagcgtgagcggccagcagccccagctggccctgaccagagtgcccagcgtgagccagcccggcgtgagacccgcctgccccggccagcccctggccaacggccccttcagcgccggccacgtgccctgcagcaccagcagaaccctgggcagcaccgacaccatcctgatcggcaacaaccacatcaccggcagcggcagcaacggcaacgtgccctacctgcagagaaacgccctgaccctgccccacaacagaaccaacctgaccagcagcgccgaggagccctggaagaaccagctgagcaacagcacccagggcctgcacaagggccagagcagccacagcgccggccccaacggcgagagacccctgagcagcaccggccccagccagcacctgcaggccgccggcagcggcatccagaaccagaacggccaccccaccctgcccagcaacagcgtgacccagggcgccgccctgaaccacctgagcagccacaccgccaccagcggcggccagcagggcatcaccctgaccaaggagagcaagcccagcggcaacatcctgaccgtgcccgagaccagcagacacaccggcgagacccccaacagcaccgccagcgtggagggcctgcccaaccacgtgcaccagatgaccgccgacgccgtgtgcagccccagccacggcgacagcaagagccccggcctgctgagcagcgacaacccccagctgagcgccctgctgatgggcaaggccaacaacaacgtgggcaccggcacctgcgacaaggtgaacaacatccaccccgccgtgcacaccaagaccgacaacagcgtggccagcagccccagcagcgccatcagcaccgccacccccagccccaagagcaccgagcagaccaccaccaacagcgtgaccagcctgaacagcccccacagcggcctgcacaccatcaacggcgagggcatggaggagagccagagccccatgaagaccgacctgctgctggtgaaccacaagcccagcccccagatcatccccagcatgagcgtgagcatctaccccagcagcgccgaggtgctgaaggcctgcagaaacctgggcaagaacggcctgagcaacagcagcatcctgctggacaagtgccccccccccagaccccccagcagcccctacccccccctgcccaaggacaagctgaacccccccacccccagcatctacctggagaacaagagagacgccttcttcccccccctgcaccagttctgcaccaaccccaacaaccccgtgaccgtgatcagaggcctggccggcgccctgaagctggacctgggcctgttcagcaccaagaccctggtggaggccaacaacgagcacatggtggaggtgagaacccagctgctgcagcccgccgacgagaactgggaccccaccggcaccaagaagatctggcactgcgagagcaacagaagccacaccaccatcgccaagtacgcccagtaccaggccagcagcttccaggagagcctgagagaggagaacgagaagagaagccaccacaaggaccacagcgacagcgagagcaccagcagcgacaacagcggcagaagaagaaagggccccttcaagaccatcaagttcggcaccaacatcgacctgagcgacgacaagaagtggaagctgcagctgcacgagctgaccaagctgcccgccttcgtgagagtggtgagcgccggcaacctgctgagccacgtgggccacaccatcctgggcatgaacaccgtgcagctgtacatgaaggtgcccggcagcagaacccccggccaccaggagaacaacaacttctgcagcgtgaacatcaacatcggccccggcgactgcgagtggttcgtggtgcccgagggctactggggcgtgctgaacgacttctgcgagaagaacaacctgaacttcctgatgggcagctggtggcccaacctggaggacctgtacgaggccaacgtgcccgtgtacagattcatccagagacccggcgacctggtgtggatcaacgccggcaccgtgcactgggtgcaggccatcggctggtgcaacaacatcgcctggaacgtgggccccctgaccgcctgccagtacaagctggccgtggagagatacgagtggaacaagctgcagagcgtgaagagcatcgtgcccatggtgcacctgagctggaacatggccagaaacatcaaggtgagcgaccccaagctgttcgagatgatcaagtactgcctgctgagaaccctgaagcagtgccagaccctgagagaggccctgatcgccgccggcaaggagatcatctggcacggcagaaccaaggaggagcccgcccactactgcagcatctgcgaggtggaggtgttcgacctgctgttcgtgaccaacgagagcaacagcagaaagacctacatcgtgcactgccaggactgcgccagaaagaccagcggcaacctggagaacttcgtggtgctggagcagtacaagatggaggacctgatgcaggtgtacgaccagttcaccctggccccccccctgcccagcgccagcagctag

SEQ ID NO: 340862 - protein, 171 aa, Artificial Sequence
  derived and/or modified sequence
SLQNKTKLLPSIEEAWSLPIPAELTSRQGAMNTAQQNTSDNWSGGHAVSHPPVQQQAHSWCLTPQKLQHLEQLRANRNNLNPAQKLMLEQLESQFVLMQQHQMRPTGVAQVRSTGIPNGPTADSSLPTNSVSGQQPQLALTRVPSVSQPGVRPACPGQPLANGPFCRPCSL

SEQ ID NO: 340863 - protein, 224 aa, Artificial Sequence
  derived and/or modified sequence
MKSCGVSLATAAAAAAAFGDEEKKMAAGKASGESEEASPSLTAEEREALGGLDSRLFGFVRFHEDGARTKALLGKAVRCYESLILKAEGKVESDFFCQLGHFNLLLEDYPKALSAYQRYYSLQSDYWKNAAFLYGLGLVYFHYNAFQWAIKAFQEVLYVDPSFCRAKEIHLRLGLMFKVNTDYESSLKHFQLALVDCNPCTLSNAEIQFHIAHLYETQVGCITL

SEQ ID NO: 340864 - DNA, 516 bp, Artificial Sequence
  derived and/or modified sequence
tcgctccagaataagacaaagttgcttccttctattgaggaggcttggtctctccccattcccgccgaactgacttctcggcagggggctatgaacactgctcagcaaaatacttccgataattggtcaggcggccacgccgtaagtcatcctccggtgcagcagcaggcccattcttggtgtctgacgccgcagaaactgcagcacctggagcagctgagagccaatcgaaacaatcttaatcctgcccagaagcttatgttagagcagctcgagtctcagttcgtgctgatgcaacaacaccagatgcgtcccaccggcgtggcacaggtgagatccacagggatccccaatggccccacagccgactcaagcttaccaacgaattccgtgagtggccaacagccacaactggccttgacgcgggtgccgagcgtgagccagcccggggtccgcccagcttgccctggacagcccctggccaacggacccttctgccgaccatgctccctctag

SEQ ID NO: 340865 - DNA, 675 bp, Artificial Sequence
  derived and/or modified sequence
atgaagagttgtggggtgtcactcgcgaccgctgccgctgcagcagccgccttcggcgatgaagagaaaaagatggctgcggggaaggcttctggtgaaagtgaggaagcgtcccctagtctgaccgccgaagaacgtgaagccctgggaggtctggatagccgcttatttggtttcgtccgatttcacgaggatggagccagaacaaaggccctactggggaaggcggtgaggtgctatgagtctttgattctgaaggcagagggaaaggtggagtccgacttcttctgccaactggggcacttcaatctcttgctcgaagactatcctaaagccctcagcgcatatcagaggtattactccctgcagagtgactactggaagaatgcagcctttctgtacgggttaggcctggtttattttcactacaatgcctttcaatgggcaattaaggcgtttcaggaggtattgtatgttgacccaagtttctgccgtgcgaaggaaatccacttacgccttgggctgatgtttaaagtcaacaccgattatgaaagttccctgaaacacttccagctggcgctggtagattgcaatccatgcactttgtccaatgctgaaatccaattccacattgcgcacctgtacgagactcaggtgggctgtattaccctctag

SEQ ID NO: 340866 - DNA, 516 bp, Artificial Sequence
  derived and/or modified sequence
agcctgcagaacaagaccaagctgctgcccagcattgaggaggcctggagcctgcccatcccagctgagctgaccagccggcagggcgccatgaacacagcccagcagaacaccagtgacaactggagcggcggccatgctgtgagccacccccctgtgcagcagcaggcccacagctggtgcctgaccccccagaagctgcagcacctggagcagctgcgggccaacagaaacaacctgaacccagcccagaagctgatgctggagcagctggagagccagtttgtgctgatgcagcagcaccagatgaggcccaccggggtggcccaggtgcgcagcacaggcatccccaacggccccacagctgacagcagcctgcccaccaacagcgtgtctggccagcagccccagctggccctgaccagggtgcccagcgtgtcccagcccggggtgcggcctgcctgccccggccagcccctggccaacggccccttctgccggccctgcagcctgtag

SEQ ID NO: 340867 - DNA, 675 bp, Artificial Sequence
  derived and/or modified sequence
atgaagagctgtggggtgtccctggccacagctgctgctgctgctgctgcctttggagatgaggagaagaagatggctgctgggaaggccagcggggagagcgaggaggccagccccagcctgacagctgaggagcgggaggccctgggcggcctggacagccggctgtttggatttgtgcgcttccatgaagatggagcccggaccaaggccctgctgggcaaggctgtgcgctgctatgagagcctcatcctgaaggccgagggcaaggtggagagtgacttcttctgccagctgggccacttcaacctgctgctggaggactaccccaaggccctgagcgcctaccagcgctactacagcctgcagagcgactactggaagaatgctgccttcctgtatggcctgggcctggtgtacttccactacaatgccttccagtgggccatcaaggccttccaggaggtgctgtatgtggaccccagcttctgccgggccaaggagatccacctgcggctgggcctgatgttcaaggtgaacacagattatgagagcagcctgaagcacttccagctggccctggtggactgcaacccctgcaccctgagcaatgctgagatccagttccacatcgcccacctgtatgagacccaggtgggctgcatcaccctgtag

SEQ ID NO: 340868 - DNA, 516 bp, Artificial Sequence
  derived and/or modified sequence
agcctgcagaacaagaccaagctgctgcccagcatcgaggaggcctggagcttgcccataccagctgaacttacaagtaggcagggagccatgaatacagctcagcagaacacttcagacaattggagcggaggtcatgctgtaagccaccctccagttcaacagcaggcacacagctggtgtctgacaccccaaaaactgcagcacctcgagcaactgcgggctaatcggaacaaccttaatccagcccaaaagctcatgctcgaacagttagaatcacagtttgtgctgatgcagcaacatcagatgcgccccacaggggtcgcgcaggtgagatcaactgggatcccaaacggtcctaccgcagactcttcgctccccactaacagcgtgtctgggcagcagccccagctagccttaaccagagtcccatccgtgagtcagccaggcgtgcgtcctgcttgtccagggcaacctttggcaaatgggcccttctgtagaccctgcagtctttag

SEQ ID NO: 340869 - DNA, 675 bp, Artificial Sequence
  derived and/or modified sequence
atgaagagctgcggcgtgagcctggccaccgccgccgccgccgccgcagccttcggtgatgaagagaagaagatggccgccggaaaggcctccggagagtctgaggaagcgagcccttccctgaccgccgaagaacgcgaggccctaggaggactagattcacggctgtttggatttgtgcgctttcatgaggatggagctcgcacgaaggcacttcttggaaaagctgtccgctgctacgagtctctcattctgaaagcagagggaaaggtggaatcagactttttttgccaattaggacatttcaatctgcttttggaggactacccaaaggccctatcagcctaccagcgatattatagtctccagtccgattattggaagaatgccgcctttttatacgggctgggactggtgtattttcactataatgccttccagtgggccataaaggcatttcaagaagttctgtacgtggatccctctttctgcagggcgaaggaaattcacctgaggttggggctcatgtttaaggtgaatacagactacgaaagtagcctgaaacattttcagctagccctggtagactgtaatccctgtactctcagtaatgcagagattcagtttcatatcgcacacctttatgagacccaggtcggttgcataacactctag

SEQ ID NO: 340870 - DNA, 516 bp, Artificial Sequence
  derived and/or modified sequence
tcgctgcagaataagacaaagttgcttccttcaatcgaggaggcttggtcattacccatcccagctgaacttacaagcaggcagggtgcaatgaacacagctcagcagaatacgtccgacaattggtccggtggtcacgccgtgagccaccctccggtccagcagcaggctcacagttggtgcctgacaccgcaaaaactccagcatttggagcagctcagagcaaaccgcaacaatctaaatcctgctcaaaagctcatgctagagcaactggaatcccagtttgttcttatgcagcagcatcagatgcgccctactggcgtggcacaggtgcgatccacaggaatcccaaatgggccaactgccgacagttcactccctaccaacagcgtgtcagggcaacagcctcagctggccctgactcgggtgccatctgtgtcccagcccggtgtccgacccgcttgccctggccagcccttggcgaacgggccattttgcagaccctgttctctgtag

SEQ ID NO: 340871 - DNA, 675 bp, Artificial Sequence
  derived and/or modified sequence
atgaaaagttgtggggtgtccttagccactgcggcagctgccgcagccgctttcggcgatgaagagaagaaaatggccgctggcaaggcatccggggagtcagaggaggcaagtccgtcccttactgccgaagagcgcgaggcccttgggggactcgactcgcgattatttggctttgtgaggtttcacgaggatggcgctagaacaaaggccctgcttggcaaagcggtgcggtgctacgaaagtttgatattaaaagccgaaggaaaagtggaaagcgactttttttgtcaactcggccacttcaacttgctgctggaggattacccaaaggcactgagcgcctaccagcgatattattctctgcagtcagattactggaagaacgccgctttcttgtacggtcttggactcgtttatttccactacaatgccttccagtgggctatcaaagcctttcaggaggttctgtacgtcgatccgagcttctgcagagccaaagaaatccatttgcggctgggtcttatgtttaaggtgaacaccgattacgagtcgtccctcaaacacttccagctcgctttagtcgattgtaatccctgtactctatccaacgccgaaatacagttccacatcgcccatttatacgaaactcaggttggttgcattaccttgtag

SEQ ID NO: 340872 - DNA, 516 bp, Artificial Sequence
  derived and/or modified sequence
agcctgcagaacaagaccaagctgctgcccagcatcgaggaggcctggagcctgcccatccccgccgagctgaccagcagacagggcgccatgaacaccgcccagcagaacaccagcgacaactggagcggcggccacgccgtgagccacccccccgtgcagcagcaggcccacagctggtgcctgaccccccagaagctgcagcacctggagcagctgagagccaacagaaacaacctgaaccccgcccagaagctgatgctggagcagctggagagccagttcgtgctgatgcagcagcaccagatgagacccaccggcgtggcccaggtgagaagcaccggcatccccaacggccccaccgccgacagcagcctgcccaccaacagcgtgagcggccagcagccccagctggccctgaccagagtgcccagcgtgagccagcccggcgtgagacccgcctgccccggccagcccctggccaacggccccttctgcagaccctgcagcctgtag

SEQ ID NO: 340873 - DNA, 675 bp, Artificial Sequence
  derived and/or modified sequence
atgaagagctgcggcgtgagcctggccaccgccgccgccgccgccgccgccttcggcgacgaggagaagaagatggccgccggcaaggccagcggcgagagcgaggaggccagccccagcctgaccgccgaggagagagaggccctgggcggcctggacagcagactgttcggcttcgtgagattccacgaggacggcgccagaaccaaggccctgctgggcaaggccgtgagatgctacgagagcctgatcctgaaggccgagggcaaggtggagagcgacttcttctgccagctgggccacttcaacctgctgctggaggactaccccaaggccctgagcgcctaccagagatactacagcctgcagagcgactactggaagaacgccgccttcctgtacggcctgggcctggtgtacttccactacaacgccttccagtgggccatcaaggccttccaggaggtgctgtacgtggaccccagcttctgcagagccaaggagatccacctgagactgggcctgatgttcaaggtgaacaccgactacgagagcagcctgaagcacttccagctggccctggtggactgcaacccctgcaccctgagcaacgccgagatccagttccacatcgcccacctgtacgagacccaggtgggctgcatcaccctgtag

SEQ ID NO: 340874 - protein, 161 aa, Artificial Sequence
  derived and/or modified sequence
  misc_feature (1)..(1): Xaa can be any naturally occurring amino acid
XARNIKVSDPKLFEMIKIFSLSPNFRAEKCLRDHLVQPLRSNGEPEPLRFTGEYCLLRTLKQCQTLREALIAAGKEIIWHGRTKEEPAHYCSICEVEVFDLLFVTNESNSRKTYIVHCQDCARKTSGNLENFVVLEQYKMEDLMQVYDQFTLAPPLPSASS

SEQ ID NO: 340875 - DNA, 486 bp, Artificial Sequence
  derived and/or modified sequence
taggcgaggaatatcaaggtgagtgatcccaaactgtttgagatgattaagatcttttcgctgtcccccaactttcgagccgagaagtgcctgagagatcatctggtgcagcctctcagaagcaatggggagcctgagcccctgagatttacgggcgaatactgccttctgagaacactgaagcagtgccagaccctgcgagaagcgctgattgcagccggaaaggaaattatttggcacggcagaactaaagaggagccggcccactattgctcaatctgcgaggtggaggtgtttgacctgttgttcgtgaccaacgaatccaactcccggaaaacatatattgtccattgtcaagattgcgcacgcaagacttctggaaaccttgaaaactttgtggtgttggagcagtacaagatggaggacctgatgcaggtctacgaccagttcacactggccccacccttaccttcggcctcgagttag

SEQ ID NO: 340876 - DNA, 486 bp, Artificial Sequence
  derived and/or modified sequence
tgagccaggaacatcaaggtgtctgaccccaagctgtttgagatgatcaagatcttcagcctgagccccaacttccgggcagagaagtgcctgcgggaccacctggtgcagcccctgcggagcaatggagagcctgagcccctgcgcttcaccggggagtactgcctgctgcggaccctgaagcagtgccagaccctgcgggaggccctgattgctgctgggaaggagatcatctggcacggccgcaccaaggaggagcccgcccactactgcagcatctgtgaggtggaggtgtttgacctgctgtttgtgaccaatgaaagcaacagcaggaagacctacatcgtgcactgccaggactgtgccaggaagaccagcggcaacctggagaactttgtggtgctggagcagtacaagatggaggacctgatgcaggtgtatgaccagttcaccctggccccacccctgcccagcgccagcagctag

SEQ ID NO: 340877 - DNA, 735 bp, Artificial Sequence
  derived and/or modified sequence
ggcacgaaatatcaaggtctcagatccaaagctttttgaaatgattaagatattttcattgtctccgaattttagagctgaaaagtgccttagagatcatctagttcaacctctccgttcaaatggagaacctgagccactaagattcacaggagagtattgtcttctaagaactctgaagcaatgtcagacattgagggaagctctcattgctgcaggaaaagagattatatggcatgggcggacaaaagaagaaccagctcattactgtagcatttgtgaagtggaggtttttgatctgctttttgtcactaatgagagtaattcacgaaagacctacatagtacattgccaagattgtgcacgaaaaacaagcggaaacttggaaaactttgtggtgctagaacagtacaaaatggaggacctgatgcaagtctatgaccaatttacattagctcctccattaccatccgcctcatcttgatattgttccatggacattaaatgagaccttttctgctattcaggaaataacccagttctgcaccactggtttttgtagctatctcgtaaggctgctggctgaaaactgtgtctatgcaaccttccaagtgcggagtgtcaaccaactggacgggagagagtactgctcctactccaggactctcacaaagctgatgagctgtacttcagaaaaaaataataatttccatgttttgtatatatctgacaaaa

SEQ ID NO: 340878 - DNA, 486 bp, Artificial Sequence
  derived and/or modified sequence
tgagcccggaacatcaaggtgagcgaccccaagctgttcgagatgatcaaaatattttccctgtctccgaatttccgcgccgaaaagtgcttaagggatcacttagtccaaccactcagatccaatggcgaaccagagccgctcaggtttactggcgaatattgtttgctgaggaccctgaagcagtgccaaaccttgagagaagccctcatcgctgcagggaaggaaatcatatggcatggcagaactaaggaagagcccgcccattattgctcaatctgtgaggttgaggtgttcgacttgcttttcgtgactaacgaatccaattctcgcaagacttacatcgtccactgtcaggactgtgcaagaaagacttctggaaatctggagaatttcgtggttttagagcagtataagatggaggacttgatgcaggtgtacgatcagtttacactcgctccccccttgccatcagcctcttcatag

SEQ ID NO: 340879 - DNA, 486 bp, Artificial Sequence
  derived and/or modified sequence
tgagccagaaacattaaggtttctgatcccaagctttttgaaatgattaagattttctccctgagtcccaattttagagcggagaagtgcttgagagaccatctcgtccagccattgaggtctaatggagagcctgagcccctgagatttacgggcgagtattgcctgctccgtaccctgaagcagtgtcagacactgcgagaagcattaatcgctgcgggaaaggaaataatttggcatgggaggacaaaggaagaaccggctcactactgctccatctgcgaagttgaagttttcgacctgctcttcgtaactaacgagtcaaactcacgcaagacctatattgtccactgccaggattgtgcccgaaagacgtccggcaacctcgaaaacttcgtggtcttagagcagtacaagatggaagacttaatgcaggtgtatgatcagttcacgttagctcctcccctgccgagcgccagttcatag

SEQ ID NO: 340880 - DNA, 486 bp, Artificial Sequence
  derived and/or modified sequence
tgagccagaaacatcaaggtgagcgaccccaagctgttcgagatgatcaagatcttcagcctgagccccaacttcagagccgagaagtgcctgagagaccacctggtgcagcccctgagaagcaacggcgagcccgagcccctgagattcaccggcgagtactgcctgctgagaaccctgaagcagtgccagaccctgagagaggccctgatcgccgccggcaaggagatcatctggcacggcagaaccaaggaggagcccgcccactactgcagcatctgcgaggtggaggtgttcgacctgctgttcgtgaccaacgagagcaacagcagaaagacctacatcgtgcactgccaggactgcgccagaaagaccagcggcaacctggagaacttcgtggtgctggagcagtacaagatggaggacctgatgcaggtgtacgaccagttcaccctggccccccccctgcccagcgccagcagctag

SEQ ID NO: 340881 - protein, 217 aa, Artificial Sequence
  derived and/or modified sequence
MSGGPMGGRPGGRGAPAVQQNIPSTLLQDHENQRLFEMLGRKCLTLATAVVQLYLALPPGAEHWTKEHCGAVCFVKDNPQKSYFIRLYGLQAGRLLWEQELYSQLVYSTPTPFFHTFAGDDCQAGLNFADEDEAQAFRALVQEKIQKRNQRQSGDRRQLPPPPTPANEERRGGLPPLPLHPGGDQGGPPVGPLSLGLATVDIQNPDITSSRYRGLPA

SEQ ID NO: 340882 - DNA, 654 bp, Artificial Sequence
  derived and/or modified sequence
atgagcggcggccccatgggcggcagacccggcggcagaggcgcccccgccgtgcagcagaacatccccagcaccctgctgcaggaccacgagaaccagagactgttcgagatgctgggcagaaagtgcctgaccctggccaccgccgtggtgcagctgtacctggccctgccccccggcgccgagcactggaccaaggagcactgcggcgccgtgtgcttcgtgaaggacaacccccagaagagctacttcatcagactgtacggcctgcaggccggcagactgctgtgggagcaggagctgtacagccagctggtgtacagcacccccacccccttcttccacaccttcgccggcgacgactgccaggccggcctgaacttcgccgacgaggacgaggcccaggccttcagagccctggtgcaggagaagatccagaagagaaaccagagacagagcggcgacagaagacagctgccccccccccccacccccgccaacgaggagagaagaggcggcctgccccccctgcccctgcaccccggcggcgaccagggcggcccccccgtgggccccctgagcctgggcctggccaccgtggacatccagaaccccgacatcaccagcagcagatacagaggcctgcccgcctag

SEQ ID NO: 340883 - DNA, 654 bp, Artificial Sequence
  derived and/or modified sequence
atgtcaggggggccaatgggagggcgtccaggtggccggggtgcccctgctgtgcagcaaaacattccttccacgcttctccaggaccacgagaaccagcgcctgttcgagatgttgggccgcaagtgcctgaccttggctacagccgtcgtccaactgtacctagctctgccacctggtgccgaacactggactaaagagcattgcggagcagtgtgctttgtgaaagataatcctcaaaagtcctatttcatcagattgtatgggttgcaggctggaaggttattgtgggagcaagagctgtactcccagctggtgtatagtacgcctacaccatttttccatactttcgcaggagatgattgccaggctgggcttaattttgccgacgaagacgaggcccaggcatttcgagcgctggtgcaggagaaaattcagaaacgaaatcagcgacagtcaggcgaccgcaggcagttaccgccgccacctacaccagccaacgaggaaagacgcgggggtttacccccgctccccctccaccccggcggcgaccaaggtggacccccagtggggcccctcagcctgggcctagccacagtcgatattcaaaaccctgatattactagcagccggtaccgtggcttgcccgcctag

SEQ ID NO: 340884 - DNA, 654 bp, Artificial Sequence
  derived and/or modified sequence
atgtctgggggccccatgggcggccggcctgggggccgcggggccccagctgtgcagcagaacatccccagcaccctgctgcaggaccacgagaaccagaggctgtttgagatgctgggcaggaagtgcctgaccctggccacagctgtggtgcagctgtacctggccctgcccccaggagctgagcactggaccaaggagcactgtggggctgtgtgctttgtgaaggacaacccccagaagagctacttcatccggctgtatggcctgcaggccggccgcctgctgtgggagcaggagctgtacagccagctggtgtacagcacccccacccccttcttccacacctttgctggagatgactgccaggccggcctgaactttgctgatgaagatgaggcccaggccttccgggccctggtgcaggagaagatccagaagaggaaccagaggcagagcggggaccggcggcagctgcccccaccacccaccccagccaatgaggagcggcggggcggcctgccccccctgcccctgcaccctggaggagaccagggcggcccccctgtgggccccctgagcctgggcctggccaccgtggacatccagaacccagacatcaccagcagccgctaccggggcctgcctgcctag

SEQ ID NO: 340885 - DNA, 654 bp, Artificial Sequence
  derived and/or modified sequence
atgagcggcggccccatgggcggccggcccggcggccggggcgcccccgctgtccaacagaacatcccctccacccttttgcaggatcacgagaatcagcgcctgttcgagatgttagggaggaagtgtctgacactcgcaaccgccgtggtccagctgtacttggcactgccacccggagcagaacattggactaaggaacactgtggagcagtgtgcttcgttaaagataaccctcagaagtcttattttatcaggctgtacggcctgcaagcagggaggctattgtgggagcaggagctgtactctcagctggtatactccacgcccacacctttttttcacacgtttgcaggtgatgattgtcaggccggcctcaactttgcggatgaggatgaggcacaggcatttcgtgcccttgtacaggaaaagatacagaagcggaaccagcgccaatccggagatcgccgccagttgccaccgccaccaacacctgccaatgaggagcggcggggggggctgccaccactgccccttcaccccggaggggaccagggggggcctccagtcggtccattaagccttggcctggccactgtcgatatccagaacccagacatcacgagttctcgctacagggggcttcccgcctag

SEQ ID NO: 340886 - DNA, 654 bp, Artificial Sequence
  derived and/or modified sequence
atgagcggtggtccgatgggaggtagaccaggcggtcgcggagctccagctgtgcagcaaaatattccaagtactctcttacaggatcacgaaaaccagagactcttcgaaatgttaggaagaaaatgcctgaccttggccaccgcagtggtgcaactctacctggcgctgccccctggcgctgaacactggacaaaagaacattgtggtgcagtgtgcttcgtgaaagataatccccagaaaagttacttcattcggctgtacggcctgcaagctgggagactactttgggaacaggaactgtacagtcagcttgtgtacagcaccccgacacctttctttcacactttcgcaggagacgattgtcaggccggactgaatttcgcagacgaggacgaagctcaggcctttagagcattggtgcaggaaaagattcagaagcggaaccaacggcaatcaggcgataggagacagctccctccccctcctacaccagcaaacgaggagcgacggggaggtctgcctcctttgcctctccaccccggaggtgaccaggggggtccgcctgtgggtcccctgtccctgggcttggccaccgtcgacattcagaaccccgatattacttcatcgcgatacagggggttgcctgcgtag

SEQ ID NO: 340887 - DNA, 933 bp, Artificial Sequence
  derived and/or modified sequence
tcaagactaagtcaaaggaggagagggcaacgcggtgggcaggagagaggccaacggccgcccggggcgaggggagccggtaggacgggaccaggactggccgacccggccccgcgcggggaagggggcgccttcctcccacaacacaaaacgtggaaatggggttttgccatgttgcccaggctcgtcttgaactcctgacctcaagtgatccactcgtctcggcctcccaaagtgctgggattacagagcctcgccagagaagacaagggcagaaagcaccatgagtgggggcccaatgggaggaaggcccgggggccgaggagcaccagcggttcagcagaacataccctccaccctcctccaggaccacgagaaccagcgactctttgagatgcttggacgaaaatgcttgacgctggccactgcagttgttcagctgtacctggcgctgccccctggagctgagcactggaccaaggagcattgtggggctgtgtgcttcgtgaaggataacccccagaagtcctacttcatccgcctttacggccttcaggctggtcggctgctctgggaacaggagctgtactcacagcttgtctactccacccccacccccttcttccacaccttcgctggagatgactgccaagcggggctgaactttgcagacgaggacgaggcccaggccttccgggccctcgtgcaggagaagatacaaaaaaggaatcagaggcaaagtggagacagacgccagctacccccaccaccaacaccagccaatgaagagagaagaggagggctcccacccctgcccctgcatccaggtggagaccaaggaggccctccagtgggtccgctctccctggggctggcgacagtggacatccagaaccctgacatcacgagttcacgataccgtgggctcccagc

SEQ ID NO: 340888 - protein, 381 aa, Artificial Sequence
  derived and/or modified sequence
DEIREINGISVANQTVEQLQKMLREMRGSITFKIVPSYRTQSSSCERDSPSTSRQSPANGHSSTNNSVSIYVRAQFEYDPAKDDLIPCKEAGIRFRVGDIIQIISKDDHNWWQGKLENSKNGTAGLIPSPELQEWRVACIAMEKTKQEQQASCTWFGKKKKQYKDKYLAKHNAVFDQLDLVTYEEVVKLPAFKRKTLVLLGAHGVGRRHIKNTLITKHPDRFAYPIPHTTRPPKKDEENGKNYYFVSHDQMMQDISNNEYLEYGSHEDAMYGTKLETIRKIHEQGLIAILDVEPQALKVLRTAEFAPFVVFIAAPTITPGLNEDESLQRLQKESDILQRTYAHYFDLTIINNEIDETIRHLEEAVELVCTAPQWVPVSWVY

SEQ ID NO: 340889 - DNA, 1146 bp, Artificial Sequence
  derived and/or modified sequence
gacgagatccgcgaaattaatgggatctctgttgccaaccagaccgtcgaacaactccagaagatgctgagggaaatgagaggctctattacattcaagattgtgccatcttacagaactcaatcctctagttgtgagcgcgattcacccagtaccagcaggcaaagcccagctaatggtcactccagcaccaacaattctgtgtctatctatgtgcgtgctcagttcgaatacgaccctgcaaaagacgaccttataccttgcaaggaagccggcatcaggtttagagtcggcgacatcatccagatcatctccaaagacgatcacaactggtggcagggcaaactcgagaacagtaaaaacggcacagcaggtctgataccatcccccgagctgcaggaatggcgggtggcgtgtattgctatggaaaaaaccaaacaggagcagcaggcgtcttgtacttggtttgggaaaaaaaagaaacaatacaaagacaagtatcttgcaaaacacaacgctgtgtttgaccagttggatctagtcacgtacgaagaagtcgtcaagctgccagcctttaaaagaaaaactctggtgctgttaggagcacacggggtaggaagaagacacatcaaaaacacgctgatcactaagcatcctgataggttcgcctacccaattccccacactacaagaccgcccaaaaaagacgaagagaacggaaagaattattattttgtgtcccacgatcagatgatgcaggacatctcaaataatgagtatctcgagtacggatctcatgaagacgccatgtatgggaccaagctcgagaccatacggaagatccacgagcaggggttgattgctatcctggacgttgagccacaggcgctgaaagtgttgcgaacagcagagtttgcaccgttcgtggtgtttattgctgcccctaccataacgcctggcctcaatgaagacgaaagcctgcagcggctccagaaagagtcggacatcttacagaggacctacgctcactactttgacctcacaatcattaataacgagattgatgaaacaatccgccatctggaggaagctgttgagcttgtctgtaccgccccccaatgggtacccgttagctgggtgtattag

SEQ ID NO: 340890 - DNA, 1146 bp, Artificial Sequence
  derived and/or modified sequence
gatgagatccgggagatcaatggcatctctgtggccaaccagacagtggagcagctgcagaagatgctgcgggagatgaggggcagcatcaccttcaagatcgtgcccagctaccgcacccagagcagcagctgtgagcgggacagccccagcaccagccggcagagccctgccaacggccacagcagcaccaacaacagcgtgtccatctacgtgcgggcccagtttgaatatgaccctgccaaggatgacctgatcccctgcaaggaggccggcatccgcttccgggtgggggacatcatccagatcatcagcaaggatgaccacaactggtggcagggcaagctggagaacagcaagaatggaacagctggcctcatccccagccctgagctgcaggagtggagggtggcctgcatcgccatggagaagaccaagcaggagcagcaggccagctgcacctggtttgggaagaagaagaagcagtacaaggacaagtacctggccaagcacaatgctgtgtttgaccagctggacctggtgacctatgaggaggtggtgaagctgcctgccttcaagaggaagaccctggtgctgctgggcgcccatggagtgggcagaagacacatcaagaacaccctcatcaccaagcacccagacagatttgcctaccccatcccccacaccacccggccccccaagaaggatgaggagaatggcaagaactactactttgtgtcccatgaccagatgatgcaggacatcagcaacaatgagtacctggagtatggcagccatgaagatgccatgtatggcaccaagctggagaccatcaggaagatccacgagcagggcctgattgccatcctggatgtggagccccaggccctgaaggtgctgaggacagctgagtttgccccctttgtggtgttcatcgccgcccccaccatcaccccaggcctgaatgaagatgagagcctgcagaggctgcagaaggagagtgacatcctgcagaggacctacgcccactactttgacctgaccatcatcaacaatgaaattgatgagaccatccgccacctggaggaggccgtggagctggtgtgcacagccccccagtgggtgcctgtgtcctgggtgtactag

SEQ ID NO: 340891 - DNA, 1146 bp, Artificial Sequence
  derived and/or modified sequence
gacgagatccgggagatcaacggcatcagcgtggccaaccagaccgttgagcagttgcaaaaaatgttgcgggagatgcggggttccatcacatttaaaattgtgccctcatatcgtactcaaagttctagctgtgagagggattctccgagcacgtccagacagtctccagcgaatggccactcttccacaaataacagtgtgtccatctacgtgcgggcccagttcgagtatgatcccgccaaagatgacctgataccttgtaaagaagctggcattcgctttcgagtgggcgacatcatccagattatttccaaggatgaccataactggtggcagggaaagttggaaaacagcaaaaatggcaccgcaggcctgattccttccccggagctgcaggagtggagggtcgcctgcattgctatggagaaaacaaaacaggagcagcaggcttcttgtacttggtttggaaagaagaaaaaacagtacaaggacaagtatttggcgaagcataatgccgtctttgatcagcttgacttagtcacatatgaagaggtcgttaaactacctgcctttaaaaggaagacactcgtgctgctcggtgcccatggcgtgggacgccgtcacatcaagaacacactcataacgaagcacccagacagatttgcttaccctatcccacacacaacaagacctcccaagaaagatgaagaaaatggaaaaaattattatttcgtgagccatgatcagatgatgcaagatatttccaataacgaatatctagagtatggttcccatgaggatgccatgtatggaacgaaattggaaacaattcgaaaaatccacgagcaaggactgatcgccatcctagacgtggaaccccaagcactgaaggtgctgcggactgcggagtttgcccctttcgtggtatttattgctgcccccaccatcacacctggcctgaacgaagatgaatcacttcaaaggctccaaaaggagagcgatatccttcagcggacttatgcccactatttcgatctcacaatcataaacaacgagatcgacgagacgatccggcacttagaggaagccgtcgagctggtgtgcaccgcaccacaatgggtgccggtgtcgtgggtgtactag

SEQ ID NO: 340892 - DNA, 1146 bp, Artificial Sequence
  derived and/or modified sequence
gacgaaattagagaaatcaatggcatttctgtggcaaatcagacagttgaacagctgcaaaagatgctccgagaaatgcgcggatcaatcactttcaaaatcgtcccaagctacaggacacagtcgagttcatgtgagcgcgactccccctcgacctctcgacagtcaccagcaaacggccactcaagcacaaataactcagtgtctatttatgttagggctcagttcgagtacgatcccgctaaggatgaccttatcccttgtaaggaagccggtatcaggttcagggtgggtgacatcatccaaattataagcaaagatgatcacaactggtggcagggcaaactcgagaattcaaagaacgggactgctgggctgatcccctcccccgaattgcaggagtggagagtagcgtgtattgctatggagaagaccaagcaggagcagcaggcttcctgtacctggttcggcaagaagaaaaagcaatacaaggacaagtatctggctaagcacaacgccgtttttgaccagctggacctcgttacttacgaagaggtcgttaagctgcccgctttcaagcgcaaaacccttgtcctactgggtgctcatggagtgggcagaaggcatattaagaacacgctcatcacaaagcaccctgatcgttttgcatatcctatccctcacaccaccagaccaccaaaaaaagatgaggaaaatgggaagaattactactttgtgtcacacgatcagatgatgcaggatatcagtaataatgagtatcttgaatacggatcacacgaggatgctatgtacggtacaaaactggaaactattagaaagattcatgagcaaggccttattgccatcctcgacgtcgagccacaggcccttaaggtcttgcgcaccgctgagttcgccccatttgtggtgttcatagccgctcctactattacccctggcctgaatgaagatgagtctctgcagcgtctgcaaaaagaatctgatatccttcagcgtacctacgcccattactttgacctcacaatcatcaacaacgagatcgatgagacaatccgtcacctggaggaagcagtagaactcgtctgcaccgccccacagtgggtgccagtatcgtgggtttactag

SEQ ID NO: 340893 - DNA, 2017 bp, Artificial Sequence
  derived and/or modified sequence
gatgaaattcgagaaatcaatggcatcagtgtggctaaccaaacagtggaacaactgcaaaaaatgcttagggaaatgcgggggagtattaccttcaagattgtgccaagttaccgcactcagtcttcgtcctgtgagagagattccccttccacttccagacagtccccagctaatggtcatagcagcactaacaattctgtttcgatctatgtaagagcacaatttgaatatgatccagccaaggatgacctcatcccctgtaaagaagctggcattcgattcagagttggtgacatcatccagattattagtaaggatgatcataattggtggcagggtaaactggaaaactccaaaaatggaactgcaggtctcattccttctcctgaacttcaggaatggcgagtagcttgcattgccatggagaagaccaaacaggagcagcaggccagctgtacttggtttggcaagaaaaagaagcagtacaaagataaatatttggcaaagcacaatgcagtgtttgatcaattagatcttgtcacatatgaagaagtagtaaaactgccagcattcaagaggaaaacactagtcttattaggcgcacatggtgttgggagaagacacataaaaaacactctcatcacaaagcacccagaccggtttgcgtaccctattccacatacaaccagacctccaaagaaagacgaagaaaatggaaagaattattactttgtatctcatgaccaaatgatgcaagacatctctaataacgagtacttggagtacggcagccacgaggatgcgatgtatgggacaaaactggagaccatccggaagatccacgagcaggggctgattgcaatactggacgtggagcctcaggcactgaaggtcctgagaactgcagagtttgctccttttgttgttttcattgctgcaccaactattactccaggtttaaatgaggatgaatctcttcagcgtctgcagaaggagtctgacatcttacagagaacatatgcacactacttcgatctcacaattatcaacaatgaaattgatgagacaatcagacatctggaggaagctgttgagctcgtgtgcacagccccacagtgggtccctgtctcctgggtctattaggcctctccccagatatctgagcataactgggagcacctcatttgtggaaaagcctctttgttatcggccttgtgtcagcaggtcatggtccctagagactacctagttgtagtgtgacctacatttataattattgtcatgtccgaatagataggaggagaaaaacaattacacactaatttaaagagacagtatcttttttaatcagttctcctaaactttaataaaatgtatctttaaatgtatgtattattcaatcctttggaatgttatatttttggaaatcatagctttttatttccaaggcccctaaaaactgcacaaaatagatgctgctttctataatctattttaataataataaacaatgattctgttaccttgactgggggtggaacactacattctttttagagtctgattttatggattggaatattgggatatctttctttcctttatttatttgaaataattagtgtagtgattacaaaacagtcataaatttttaaaggccttttttctctctttttttttttttagaatagtatttttttttaagtcctttatgtaacatccagataatgtgatactgtctctttgaagcaccctgtaaaccttttagagatttgaagttgggtcttgactcttaatgcatgtggacagtcgcgagcgtttatgctgtcggtgtgtctgtgttggacaaaacaatctgtaatctacagcaaagtacattctacattccgttcatggggcacacccaggggaataagaataaaatgctattatgactaagttgtaaacctatgcacatcccttgcattttgggcaactttataaaaaaaaagaaactgatttttattaataataa

SEQ ID NO: 340894 - DNA, 1146 bp, Artificial Sequence
  derived and/or modified sequence
gacgagatcagagagatcaacggcatcagcgtggccaaccagaccgtggagcagctgcagaagatgctgagagagatgagaggcagcatcaccttcaagatcgtgcccagctacagaacccagagcagcagctgcgagagagacagccccagcaccagcagacagagccccgccaacggccacagcagcaccaacaacagcgtgagcatctacgtgagagcccagttcgagtacgaccccgccaaggacgacctgatcccctgcaaggaggccggcatcagattcagagtgggcgacatcatccagatcatcagcaaggacgaccacaactggtggcagggcaagctggagaacagcaagaacggcaccgccggcctgatccccagccccgagctgcaggagtggagagtggcctgcatcgccatggagaagaccaagcaggagcagcaggccagctgcacctggttcggcaagaagaagaagcagtacaaggacaagtacctggccaagcacaacgccgtgttcgaccagctggacctggtgacctacgaggaggtggtgaagctgcccgccttcaagagaaagaccctggtgctgctgggcgcccacggcgtgggcagaagacacatcaagaacaccctgatcaccaagcaccccgacagattcgcctaccccatcccccacaccaccagaccccccaagaaggacgaggagaacggcaagaactactacttcgtgagccacgaccagatgatgcaggacatcagcaacaacgagtacctggagtacggcagccacgaggacgccatgtacggcaccaagctggagaccatcagaaagatccacgagcagggcctgatcgccatcctggacgtggagccccaggccctgaaggtgctgagaaccgccgagttcgcccccttcgtggtgttcatcgccgcccccaccatcacccccggcctgaacgaggacgagagcctgcagagactgcagaaggagagcgacatcctgcagagaacctacgcccactacttcgacctgaccatcatcaacaacgagatcgacgagaccatcagacacctggaggaggccgtggagctggtgtgcaccgccccccagtgggtgcccgtgagctgggtgtactag

SEQ ID NO: 340895 - protein, 155 aa, Artificial Sequence
  derived and/or modified sequence
VAGPPFKANTLIAFTKLLGAPTHILRDCVHIMKLELFPDQATQLKWNVQFCLTIPPSAPPIAPPGTPAVVLKSKMLFFLQLTQKTSVPPQEPVSIIVPIIYDMASGTTQQADIPRQQNSSVAAPMMVSNILKRFAEMNPPRQGSIKGTGCPSDFL

SEQ ID NO: 340896 - protein, 331 aa, Artificial Sequence
  derived and/or modified sequence
PSGRAGNWPGSPQVSGPSPAARMPGMSPANPSLHSPVPDASHSPRAGTSSQTMPTNMPPPRKLPQRSWAASIPTILTHSALNILLLPSPTPGLVPGLAGSYLCSPLERFLGSVIMRRHLQRIIQQETLQLINSNEPGVIMFKTDALKCRVALSPKTNQTLQLKVTPENAGQWKPDELQVLEKFFETRVAGPPFKANTLIAFTKLLGAPTHILRDCVHIMKLELFPDQATQLKWNVQFCLTIPPSAPPIAPPGTPAVVLKSKMLFFLQLTQKTSVPPQEPVSIIVPIIYDMASGTTQQADIPRQQNSSVAAPMMVSNILKRFAEMNPPRQGT

SEQ ID NO: 340897 - DNA, 468 bp, Artificial Sequence
  derived and/or modified sequence
gtggcggggccacctttcaaagcgaacacattgattgcgttcacgaagcttcttggggcccccacccatattctccgggattgtgtacacatcatgaagctggagcttttcccagaccaggcaacccagctcaaatggaacgtccagttctgccttactatacctccaagcgcacccccaatcgccccacccggaactcctgccgttgtgttaaagtcaaaaatgctgttttttctgcagctcacacagaaaacatccgtaccaccccaggagcccgtgtctattatagtaccaatcatttacgatatggcgtccggtacgacccagcaggcagatatacctaggcagcagaattcatctgtcgcagcccccatgatggtgagcaatattctgaaacgcttcgcggaaatgaaccccccgcgacagggctcaatcaagggcaccggatgcccgagtgatttcctctag

SEQ ID NO: 340898 - DNA, 996 bp, Artificial Sequence
  derived and/or modified sequence
ccctcaggtcgggccggtaattggccgggatccccacaggtgagcggccccagtccagccgcccgtatgccgggtatgtccccagccaacccaagtctgcactcccccgtccccgacgctagccactctcctcgggccgggacaagctcacagacaatgccaaccaatatgccacctccccggaaactccctcagaggagctgggcagcgtcaatacccacaatcttgacacacagcgcattgaacattctcctcctgccttcgccaacccccggccttgtgccagggctggccggaagctatctgtgcagccccctggaacgtttcctgggctccgtgatcatgaggcgacatctccagcggatcatccagcaagagacactccagctgatcaattccaatgagcccggggtaatcatgtttaagactgatgccctcaagtgccgcgtggccctgagcccaaaaaccaaccaaactctgcagctgaaagtgactccagagaacgccggacagtggaaaccagatgaactgcaggtcctagaaaaattcttcgaaacacgagtggccggccccccctttaaggcaaatacgctgatcgcctttaccaagttactcggggcgccaacccatatactgcgtgattgcgtgcacatcatgaaactcgaactcttcccagaccaggccacgcaactgaaatggaacgtgcagttttgccttactatccctccatccgcccctccgatcgctcctccagggacccccgctgttgtgctaaagagcaagatgctgttttttctgcagttgacccagaaaacctccgtaccccctcaagagcctgtcagtattatcgtccctatcatctatgacatggcctccggaactacccagcaggcagacattccccggcagcagaactcgtccgtggcagcccctatgatggtcagcaatattctgaagcggttcgccgagatgaatcccccgaggcaggggacatag

SEQ ID NO: 340899 - DNA, 468 bp, Artificial Sequence
  derived and/or modified sequence
gtggccggcccccccttcaaggccaacaccctcatcgccttcaccaagctgctgggcgcccccacccacatcctgcgggactgtgtgcacatcatgaagctggagctgttcccagaccaggccacccagctgaagtggaatgtgcagttctgcctgaccatccccccatctgccccacccatcgcccctcctggcaccccagctgtggtgctgaagagcaagatgctgttcttcctgcagctgacccagaagacctctgtgcccccccaggagcctgtgtccatcatcgtgcccatcatctatgacatggccagcggcaccacccagcaggccgacatcccccggcagcagaacagctctgtggccgcccccatgatggtgagcaacatcctgaagagatttgctgagatgaaccccccccggcagggcagcatcaagggcaccggctgccccagcgacttcctgtag

SEQ ID NO: 340900 - DNA, 996 bp, Artificial Sequence
  derived and/or modified sequence
cccagcggccgggccggcaactggccaggcagcccccaggtgtctggccccagccctgctgccaggatgcctggcatgagccctgccaaccccagcctgcacagccctgtgcctgatgccagccacagcccccgggccggcaccagcagccagaccatgcccaccaacatgcccccacccaggaagctgccccagaggtcctgggccgccagcatccccaccatcctgacccacagcgccctgaacatcctgctgctgcccagccccaccccaggcctggtgcccggcctggccggcagctacctgtgcagccccctggagcgcttcctgggcagcgtcatcatgaggaggcacctgcagaggatcatccagcaggagaccctgcagctgatcaacagcaatgagcccggggtcatcatgttcaagacagatgccctgaagtgccgggtggccctgagccccaagaccaaccagaccctgcagctgaaggtgaccccagaaaatgccggccagtggaagccagatgagctgcaggtgctggagaagttctttgagaccagggtggccggcccccccttcaaggccaacaccctgattgccttcaccaagctgctgggcgcccccacccacatcctgcgggactgtgtgcacatcatgaagctggagctgttcccagaccaggccacccagctgaagtggaatgtgcagttctgcctgaccatcccccccagcgccccacccatcgcccctcctggcaccccagctgtggtgctgaagagcaagatgctgttcttcctgcagctgacccagaagacctctgtgcccccccaggagcctgtgtccatcatcgtgcccatcatctatgacatggccagcggcaccacccagcaggccgacatcccccggcagcagaacagctctgtggccgcccccatgatggtgagcaacatcctgaagagatttgctgagatgaaccccccccggcagggcacctag

SEQ ID NO: 340901 - DNA, 557 bp, Artificial Sequence
  derived and/or modified sequence
gttgcaggaccaccatttaaagctaatacgttaatagccttcaccaagctattaggagctcctacacacatcctcagggattgtgtgcacattatgaagctggagctgttccctgaccaagcaacacagctaaaatggaatgttcagttttgcctgacgatccctcccagcgcgccgccgattgcacctcctgggacgcctgctgtggtgctgaaatccaaaatgctattttttcttcaactaactcagaaaacatcggtccctccccaagaacctgttagtattatagttccaatcatttatgacatggcttcaggtacaacccagcaggcagacattcccagacagcagaactcttctgttgctgctcccatgatggtcagcaacattctgaagaggtttgcagagatgaatccaccacgacaaggttcgatcaaggggactggatgcccaagtgattttctctaataatcgggttgggacttaactttaaggtgttttcaatgtgattttagtatttacagtaataaataaaatttatacaaagtttcagagaa

SEQ ID NO: 340902 - DNA, 1480 bp, Artificial Sequence
  derived and/or modified sequence
ccaagtggacgagcagggaactggccaggatctcctcaagtgtctggcccctcaccagcagcacgcatgcctggaatgtcaccagccaacccctcactacattctccggttccagatgcttctcattcccctcgagctggaacaagttctcaaacaatgccaacaaacatgcctccacctcgtaaactacctcagcgctcttgggcggcatccatacctaccatcctcactcacagtgccttgaacattttactgctgccctctccaactccaggccttgtgcccggcctggcaggtagttacctttgttctccacttgagagattccttggatcagtcatcatgagacgacatcttcaaagaattattcaacaagaaacgctgcagctgataaattctaatgaacccggagtgatcatgtttaagactgatgcactgaaatgcagagtagctcttagtcccaaaaccaaccaaacgcttcagctaaaagtgacacctgaaaatgcaggacagtggaaacctgatgaacttcaagttttggagaaattctttgaaacaagagttgcaggaccaccatttaaagctaatacgttaatagccttcaccaagctattaggagctcctacacacatcctcagggattgtgtgcacattatgaagctggagctgttccctgaccaagcaacacagctaaaatggaatgttcagttttgcctgacgatccctcccagcgcgccgccgattgcacctcctgggacgcctgctgtggtgctgaaatccaaaatgctattttttcttcaactaactcagaaaacatcggtccctccccaagaacctgttagtattatagttccaatcatttatgacatggcttcaggtacaacccagcaggcagacattcccagacagcagaactcttctgttgctgctcccatgatggtcagcaacattctgaagaggtttgcagagatgaatccaccacgacaaggtacatgaccagtagacaatattttattgcatatatgttataaaagttcttttgagagacacccctttctcctcttctcttctccctccttacctactctaccacccaatcatagcaatagaggtctggttgccgtggccctcttaatgtctgcctgtcgctttcttcctttctcactggttcttcatttttgtccatttctctgctgcctggactttttgttagtgatttactattgggactgacccagttgctaatgccagaagcttgtatttatagcacacattgccacaaagacctaggttaggatgatagaattttccacggctgtgaattcctgccctaccatcaatacctgccactctgtacatcacaaagttgaaatgcatgttggtttctcatatttcatggttcaatcacgaatagaagaatattattaaaagttctgtatcttctaaatgttttgtgaagaataaaagctgatacaaatgg

SEQ ID NO: 340903 - DNA, 468 bp, Artificial Sequence
  derived and/or modified sequence
gtggccggcccccccttcaaggccaacaccctgatcgccttcaccaagctgctgggggcccctacacacattcttagggactgcgttcatatcatgaaacttgaactttttccggatcaggccacacagctgaaatggaatgtgcaattctgtctcactatccctccatccgctccgcctattgcaccccctggcacacccgccgtggtgctaaaaagcaaaatgttgtttttcttacagctgacccagaagacttcagtacccccacaggagccggtcagtattattgttcctatcatctatgacatggcctctggaacgacccagcaggctgacatcccccgccaacaaaattcctcagtcgccgcacccatgatggtcagcaatattctaaagcggtttgccgagatgaatcctcccagacagggcagcattaaaggaactggctgtccctccgactttctttag

SEQ ID NO: 340904 - DNA, 996 bp, Artificial Sequence
  derived and/or modified sequence
cccagcggccgggccggcaactggcccggcagcccccaggtgagcggccccagtccggcagcccgcatgccggggatgagcccagctaatccttcattgcacagccccgttcctgatgcctctcactccccccgtgccggaacctcatcccagacaatgcctacaaacatgccgccgccaagaaaattgcctcagcgaagctgggcagcatctatccctaccatcctgacacattcagccctcaacattctgctcctccccagcccaaccccaggcctggtacctggactggccggatcatatctgtgctcgccactggagagatttctcggctctgtaattatgagaaggcatctacagcgtattatacaacaggagacactgcagctgatcaacagtaacgagccaggggttatcatgttcaaaacagacgctctgaaatgtagggttgctttgagccctaagactaaccaaactctacagcttaaagtcactcccgaaaacgcaggacagtggaaacctgatgagttgcaggttctggaaaagttctttgaaaccagggttgccggcccccccttcaaagctaatacactgattgcttttacgaaattgctaggcgcaccaacacacatcttgcgggattgcgttcatattatgaaactagaactgttccctgatcaggcgacccagctgaagtggaacgttcagttctgcctgactattcctcctagcgctcccccaatcgcaccacccggcacgcccgcggtggtgctcaaatccaagatgctgttcttcttgcagcttacccagaagacttccgtgcccccccaagaacctgtatcaattatcgtgcccatcatttacgacatggcttccggaaccacacagcaagccgatatacccagacagcagaacagcagtgttgccgctcccatgatggtatcgaacatcctcaagaggttcgctgagatgaacccacctaggcagggcacttag

SEQ ID NO: 340905 - DNA, 468 bp, Artificial Sequence
  derived and/or modified sequence
gtggctggccctccctttaaagctaataccctgatcgcttttaccaagctgttgggagctccgacccacatcttgcgggactgtgtccacatcatgaagttggaactgttccccgaccaggcaacacagctgaagtggaacgtccagttttgcctcacaataccacctagtgctccgccaattgcccctccaggaactccagcagtggtcctgaagagcaagatgctgttcttcctccagctgacacaaaaaaccagtgtcccaccacaggagcccgtgagcattatagtaccaatcatttacgatatggcttccggaaccacccagcaagccgatataccaagacagcagaattcatctgttgcagctccaatgatggtgagcaatatcctgaaacggtttgcggaaatgaatccacccagacagggcagcattaaggggacgggctgcccaagtgactttctgtag

SEQ ID NO: 340906 - DNA, 996 bp, Artificial Sequence
  derived and/or modified sequence
ccaagcggaagggcgggaaactggccgggtagccctcaagtgtctggtccttcgcctgcagctaggatgccaggtatgagtccagccaatcccagcttgcattccccagtgcctgatgcttcccactctccacgcgctggaacttcatctcagacaatgcctaccaatatgccaccccctcgcaagttgccccagcgcagctgggcagccagcatcccaaccatcttgacgcattctgcactcaacatccttttgctgccctctcccaccccgggattagtgcctggattagctggatcctacctgtgttctcccctggaaaggtttttggggtccgttatcatgagacgtcatctgcagaggattatacagcaggagacactgcagctgatcaactccaacgaacctggtgtcatcatgtttaaaacagacgcactcaagtgtagggtggcgctttctcctaagacgaatcaaactctgcagctcaaagtgactccagaaaacgcgggtcaatggaaacctgacgagctgcaggtcctcgagaagttctttgaaacccgagtcgccggacccccatttaaggccaacacactgatcgcgtttaccaaacttctgggagccccaacacacatcctgcgcgactgtgtccacattatgaagctcgaactttttcccgaccaggcaacccagctgaaatggaatgtgcagttctgccttactattccaccttcagcacctcccattgccccacctggaactcccgctgtagtgcttaaatctaagatgctctttttcttacaacttacgcaaaaaaccagcgtcccacctcaggagcctgtgtccatcattgtccctatcatctatgatatggcctccgggacgacacagcaggccgatattcctcggcagcaaaactcgagcgtagctgctcccatgatggtgtctaatatcctgaagcgtttcgccgagatgaatcccccacgacagggaacatag

SEQ ID NO: 340907 - DNA, 468 bp, Artificial Sequence
  derived and/or modified sequence
gtggccggcccccccttcaaggccaacaccctgatcgccttcaccaagctgctgggcgcccccacccacatcctgagagactgcgtgcacatcatgaagctggagctgttccccgaccaggccacccagctgaagtggaacgtgcagttctgcctgaccatcccccccagcgccccccccatcgccccccccggcacccccgccgtggtgctgaagagcaagatgctgttcttcctgcagctgacccagaagaccagcgtgcccccccaggagcccgtgagcatcatcgtgcccatcatctacgacatggccagcggcaccacccagcaggccgacatccccagacagcagaacagcagcgtggccgcccccatgatggtgagcaacatcctgaagagattcgccgagatgaacccccccagacagggcagcatcaagggcaccggctgccccagcgacttcctgtag

SEQ ID NO: 340908 - DNA, 996 bp, Artificial Sequence
  derived and/or modified sequence
cccagcggcagagccggcaactggcccggcagcccccaggtgagcggccccagccccgccgccagaatgcccggcatgagccccgccaaccccagcctgcacagccccgtgcccgacgccagccacagccccagagccggcaccagcagccagaccatgcccaccaacatgcccccccccagaaagctgccccagagaagctgggccgccagcatccccaccatcctgacccacagcgccctgaacatcctgctgctgcccagccccacccccggcctggtgcccggcctggccggcagctacctgtgcagccccctggagagattcctgggcagcgtgatcatgagaagacacctgcagagaatcatccagcaggagaccctgcagctgatcaacagcaacgagcccggcgtgatcatgttcaagaccgacgccctgaagtgcagagtggccctgagccccaagaccaaccagaccctgcagctgaaggtgacccccgagaacgccggccagtggaagcccgacgagctgcaggtgctggagaagttcttcgagaccagagtggccggcccccccttcaaggccaacaccctgatcgccttcaccaagctgctgggcgcccccacccacatcctgagagactgcgtgcacatcatgaagctggagctgttccccgaccaggccacccagctgaagtggaacgtgcagttctgcctgaccatcccccccagcgccccccccatcgccccccccggcacccccgccgtggtgctgaagagcaagatgctgttcttcctgcagctgacccagaagaccagcgtgcccccccaggagcccgtgagcatcatcgtgcccatcatctacgacatggccagcggcaccacccagcaggccgacatccccagacagcagaacagcagcgtggccgcccccatgatggtgagcaacatcctgaagagattcgccgagatgaacccccccagacagggcacctag

SEQ ID NO: 340909 - protein, 171 aa, Artificial Sequence
  derived and/or modified sequence
MRPEGSLTYRVPERLRQGFCGVGRAAQALVELEPVNAQARKAFSRQREKMERRRKPHLDRRGAVIQSVPGFWANVIANHPQMSALITDEDEDMLSYMVSLEVEEEKHPVHLCKIMLFFRSNPYFQNKVITKEYLVNITGDRWLPGWVVEGRWWVDHCQRDPAPFPQKLLSL

SEQ ID NO: 340910 - DNA, 1913 bp, Artificial Sequence
  derived and/or modified sequence
atgcgccctgagggctcgctgacctaccgggtgccagagaggctgcggcagggtttctgtggcgtgggtcgggcagcacaggccttggtgtgtgcgagtgccaaggagggcaccgccttcaggatggaggctgtgcaggagggggcggccggggtggagagtgagcaggcggctttgggggaggaggcggtgctgctgttggatgacataatggcggaggtggaggtggtggcggaggtggaggtggtggcggaggaggagggcctcgtggagcggcgggaggaggcccagcgggcacagcaggctgtgcctggccctgggcccatgaccccagagtctgcactggaggagctgctggccgttcaggtggagctggagccggttaatgcccaagccaggaaggccttttctcggcagcgggaaaagatggagcggaggcgcaagccccacctagaccgcagaggcgccgtcatccagagcgtccctggcttctgggccaatgttattgcaaaccacccccagatgtcagccctgatcactgacgaagatgaagacatgctgagctacatggtcagcctggaggtggaagaagagaagcatcctgttcatctctgcaagatcatgttgttctttcggagtaacccctacttccagaataaagtgattaccaaggaatatctggtgaacatcacaggtgacaggtggctcccaggatgggtagtggaaggaagatggtgggtggatcattgccaacgggatccagcccccttcccacaaaaactcctgtctctgtagaatacagggcttctcattccactccaattgagtggtatccggattatgaagtggaggcgtatcgccgcagacaccacaacagcagccttaacttcttcaactggttctctgaccacaacttcgcaggatctaacaagattgctgaggtgagtcctcactgggaaacatgaggaatgaccccgtgtgttcccagctgcttgggtcacctttctgagccctgatgaggcctttcccgattgagtcccctgacagatcctatgtaaggacctgtggcgcaatcccctgcaatactacaagaggatgaagccacctgaagagggaacagagacgtcagaaattccttgagaggaagacagagagtgacagaatccaggacgttcatggcattgggctgaaaaggcacgttagagactgcactgcaaagcgggtgatagctgtggagtcttaagcccagtgaagaatcgtccatttccagaatcaatgagaagtaaagctgaaaatcattcagttcagtctgtggcacttgattccacggctgtcaaccccaccggcagtcatcccaccaaccccatgagattgggctccctgaatgtgcgtcctggtcatccttgccccaaaccacaaaggactgtttagattgatggatttccttaagctgttgccccatcagacttgtgtgtgcttttagggcccagtgcatcttgttagctgactcccctcacagacaatactgggaatggggcagggattgcgcagaacagtttgtaacacgtggtaggaggaagtttaagggatcacaaatggggaagggatatccttttctcagcgggccccacaattgaaacatttcaaagtatggctcagagaaaatgcgttttaacatgagtttgtgtttctctaggggactcccagttgttgagttgaatatgatggagcatcagattttacctaatacagcagaactcctaaaaagttacagccatatgcaggacggcagtactcagcatggtcttatgcacaggaactaaaggaaaaagagatcgagtcacaaaaattcaggaagagggggtaaatgtggattgtatggaatgaaaaataaacattctcaaggatgtgtg

SEQ ID NO: 340911 - DNA, 1634 bp, Artificial Sequence
  derived and/or modified sequence
atgcgccctgagggctcgctgacctaccgggtgccagagaggctgcggcagggtttctgtggcgtgggtcgggcagcacaggccttggtggagctggagccggttaatgcccaagccaggaaggccttttctcggcagcgggaaaagatggagcggaggcgcaagccccacctagaccgcagaggcgccgtcatccagagcgtccctggcttctgggccaatgttattgcaaaccacccccagatgtcagccctgatcactgacgaagatgaagacatgctgagctacatggtcagcctggaggtggaagaagagaagcatcctgttcatctctgcaagatcatgttgttctttcggagtaacccctacttccagaataaagtgattaccaaggaatatctggtgaacatcacaggtgacaggtggctcccaggatgggtagtggaaggaagatggtgggtggatcattgccaacgggatccagcccccttcccacaaaaactcctgtctctgtagaatacagggcttctcattccactccaattgagtggtatccggattatgaagtggaggcgtatcgccgcagacaccacaacagcagccttaacttcttcaactggttctctgaccacaacttcgcaggatctaacaagattgctgaggtgagtcctcactgggaaacatgaggaatgaccccgtgtgttcccagctgcttgggtcacctttctgagccctgatgaggcctttcccgattgagtcccctgacagatcctatgtaaggacctgtggcgcaatcccctgcaatactacaagaggatgaagccacctgaagagggaacagagacgtcagaaattccttgagaggaagacagagagtgacagaatccaggacgttcatggcattgggctgaaaaggcacgttagagactgcactgcaaagcgggtgatagctgtggagtcttaagcccagtgaagaatcgtccatttccagaatcaatgagaagtaaagctgaaaatcattcagttcagtctgtggcacttgattccacggctgtcaaccccaccggcagtcatcccaccaaccccatgagattgggctccctgaatgtgcgtcctggtcatccttgccccaaaccacaaaggactgtttagattgatggatttccttaagctgttgccccatcagacttgtgtgtgcttttagggcccagtgcatcttgttagctgactcccctcacagacaatactgggaatggggcagggattgcgcagaacagtttgtaacacgtggtaggaggaagtttaagggatcacaaatggggaagggatatccttttctcagcgggccccacaattgaaacatttcaaagtatggctcagagaaaatgcgttttaacatgagtttgtgtttctctaggggactcccagttgttgagttgaatatgatggagcatcagattttacctaatacagcagaactcctaaaaagttacagccatatgcaggacggcagtactcagcatggtcttatgcacaggaactaaaggaaaaagagatcgagtcacaaaaattcaggaagagggggtaaatgtggattgtatggaatgaaaaataaacattctcaaggatgtgtg

SEQ ID NO: 340912 - DNA, 74 bp, Artificial Sequence
  derived and/or modified sequence
gaatggaatcaaatagaatggaatcgaaacaaatggaatggaatggaatgggagctgagattgtgtcactgcac

SEQ ID NO: 340913 - protein, 1382 aa, Artificial Sequence
  derived and/or modified sequence
MSTDSNSLAREFLTDVNRLCNAVVQRVEAREEEEEETHMATLGQYLVHGRGFLLLTKLNSIIDQALTCREELLTLLLSLLPLVWKIPVQEEKATDFNLPLSADIILTKEKNSSSQRSTQEKLHLEGSALSSQVSAKVNVFRKSRRQRKITHRYSVRDARKTQLSTSDSEANSDEKGIAMNKHRRPHLLHHFLTSFPKQDHPKAKLDRLATKEQTPPDAMALENSREIIPRQGSNTDILSEPAALSVISNMNNSPFDLCHVLLSLLEKVCKFDVTLNHNSPLAASVVPTLTEFLAGFGDCCSLSDNLESRVVSAGWTEEPVALIQRMLFRTVLHLLSVDVSTAEMMPENLRKNLTELLRAALKIRICLEKQPDPFAPRQKKTLQEVQEDFVFSKYRHRALLLPELLEGVLQILICCLQSAASNPFYFSQAMDLVQEFIQHHGFNLFETAVLQMEWLVLRDGVPPEASEHLKALINSVMKIMSTVKKVKSEQLHHSMCTRKRHRRCEYSHFMHHHRDLSGLLVSAFKNQVSKNPFEETADGDVYYPERCCCIAVCAHQCLRLLQQASLSSTCVQILSGVHNIGICCCMDPKSVIIPLLHAFKLPALKNFQQHILNILNKLILDQLGGAEISPKIKKAACNICTVDSDQLAQLEETLQGNLCDAELSSSLSSPSYRFQGILPSSGSEDLLWKWDALKAYQNFVFEEDRLHSIQIANHICNLIQKGNIVVQWKLYNYIFNPVLQRGVELAHHCQHLSVTSAQSHVCSHHNQCLPQDVLQIYVKTLPILLKSRVIRDLFLSCNGVSQIIELNCLNGIRSHSLKAFETLIISLGEQQKDASVPDIDGIDIEQKELSSVHVGTSFHHQQAYSDSPQSLSKFYAGLKEAYPKRRKTVNQDVHINTINLFLCVAFLCVSKEAESDRESANDSEDTSGYDSTASEPLSHMLPCISLESLVLPSPEHMHQAADIWSMCRWIYMLSSVFQKQFYRLGGFRVCHKLIFMIIQKLFRSHKEEQGKKEGDTSVNENQDLNRISQPKRTMKEDLLSLAIKSDPIPSELGSLKKSADSLGKLELQHISSINVEEVSATEAAPEEAKLFTSQESETSLQSIRLLEALLAICLHGARTSQQKMELELPNQNLSVESILFEMRDHLSQSKVIETQLAKPLFDALLRVALGNYSADFEHNDAMTEKSHQSAEELSSQPGDFSEEAEDSQCCSFKLLVEEEGYEADSESNPEDGETQDDGVDLKSETEGFSASSSPNDLLENLTQGEIIYPEICMLELNLLSASKAKLDVLAHVFESFLKIIRQKEKNVFLLMQQGTVKNLLGGFLSILTQDDSDFQACQRVLVDLLVSLMSSRTCSEELTLLLRIFLEKSPCTRATDQKVQST

SEQ ID NO: 340914 - protein, 1036 aa, Artificial Sequence
  derived and/or modified sequence
MKMASTRCKLARYLEDLEDVDLKKFKMHLEDYPPQKGCIPLPRGQTEKADHVDLATLMIDFNGEEKAWAMAVWIFAAINRRDLYEKAKRDEPKWGSDNARVSNPTVICQEDSIEEEWMGLLEYLSRISICKMKKDYRKKYRKYVRSRFQCIEDRNARLGESVSLNKRYTRLRLIKEHRSQQEREQELLAIGKTKTCESPVSPIKMELLFDPDDEHSEPVHTVVFQGAAGIGKTILARKMMLDWASGTLYQDRFDYLFYIHCREVSLVTQRSLGDLIMSCCPDPNPPIHKIVRKPSRILFLMDGFDELQGAFDEHIGPLCTDWQKAERGDILLSSLIRKKLLPEASLLITTRPVALEKLQHLLDHPRHVEILGFSEAKRKEYFFKYFSDEAQARAAFSLIQENEVLFTMCFIPLVCWIVCTGLKQQMESGKSLAQTSKTTTAVYVFFLSSLLQPRGGSQEHGLCAHLWGLCSLAADGIWNQKILFEESDLRNHGLQKADVSAFLRMNLFQKEVDCEKFYSFIHMTFQEFFAAMYYLLEEEKEGRTNVPGSRLKLPSRDVTVLLENYGKFEKGYLIFVVRFLFGLVNQERTSYLEKKLSCKISQQIRLELLKWIEVKAKAKKLQIQPSQLELFYCLYEMQEEDFVQRAMDYFPKIEINLSTRMDHMVSSFCIENCHRVESLSLGFLHNMPKEEEEEEKEGRHLDMVQCVLPSSSHAACSHGLVNSHLTSSFCRGLFSVLSTSQSLTELDLSDNSLGDPGMRVLCETLQHPGCNIRRLWLGRCGLSHECCFDISLVLSSNQKLVELDLSDNALGDFGIRLLCVGLKHLLCNLKKLWLVSCCLTSACCQDLASVLSTSHSLTRLYVGENALGDSGVAILCEKAKNPQCNLQKLGLVNSGLTSVCCSALSSVLSTNQNLTHLYLRGNTLGDKGIKLLCEGLLHPDCKLQVLELDNCNLTSHCCWDLSTLLTSSQSLRKLSLGNNDLGDLGVMMFCEVLKQQSCLLQNLGLSEMYFNYETKSALETLQEEKPELTVVFEPSW

SEQ ID NO: 340915 - DNA, 71 bp, Artificial Sequence
  derived and/or modified sequence
caatcaaaacagcaatgagataccattttacaccaatcaaaatggctactaaaaagtcaaaagcaaatgcc

SEQ ID NO: 340916 - DNA, 3111 bp, Artificial Sequence
  derived and/or modified sequence
atgaagatggcaagcacacgatgcaagctagccaggtatcttgaagatttagaggatgtcgatcttaagaaatttaaaatgcacttagaggattatccaccgcaaaaggggtgtatccctctgccaagaggccagactgagaaggcagaccacgtggacctggctacacttatgattgactttaacggggaggagaaggcatgggccatggccgtgtggatcttcgctgcaatcaaccgcagagacctgtatgagaaggcaaaaagagatgagccaaagtgggggagcgacaacgcgagagtgagcaatccaaccgtgatatgccaagaggactctattgaagaggagtggatgggccttctagagtacctcagtaggattagcatctgtaagatgaagaaagattataggaagaaataccgcaagtacgtgcgaagccgtttccagtgtattgaggaccgtaatgcgcgccttggagagtctgtgagtctgaacaagaggtatactagactgcggctcattaaggagcaccgctcacagcaggaaagagagcaggagctgctggcaataggtaaaactaagacatgcgagagtcctgtatcaccaattaaaatggagcttctattcgaccccgacgacgagcactctgagcctgtccacactgtcgtgtttcaaggggctgcagggatcggtaagacgatcctggccagaaagatgatgctcgactgggcatccggaaccctgtatcaggatcgcttcgactatctgttctacatacactgtcgcgaggtctcattagtaactcagcgatctttgggagacctcattatgtcatgttgccccgaccctaacccacctatccacaaaattgtgcgaaagccaagccgaatactcttcctcatggatggttttgacgagttacaaggcgccttcgacgagcacattggcccactctgcacagattggcagaaagccgaacgcggagatatacttttatctagtctcataaggaagaaactgttgcctgaagcttctctattgatcacaacccggccagtcgccctggagaagttacaacatctattggatcatcccaggcatgtagaaatactcggtttctcagaggcaaaacgtaaagaatacttcttcaagtacttctccgacgaagctcaagccagagccgcattttctctgatccaggagaacgaagtgctatttacaatgtgctttataccattggtttgctggatcgtttgtacaggtttgaaacagcagatggaaagcggcaagagcctcgcccagacctccaagactacgacggccgtgtacgtttttttcctgtctagtctcctgcagccccgagggggcagccaagaacacggcctgtgcgcccacctctggggcttgtgcagcctggccgccgacgggatctggaatcaaaagatactgttcgaggaatccgatcttcggaaccacgggctccagaaggcagatgtgtcagctttcctgagaatgaacttattccagaaggaagtggactgtgagaagttttattcatttattcatatgactttccaagagttctttgctgcaatgtactatctgctcgaggaggagaaggagggacgcaccaatgtgcctgggtcacggctgaagcttccttccagggacgttacggtgctcctcgaaaactatggaaagttcgagaagggatacctgatattcgtggttcgttttctgtttggtctggtaaaccaagaacggacaagctatttggagaagaaactgtcatgtaagataagccagcaaattcggctggagctgttgaagtggatcgaagtaaaggccaaggcaaagaaactgcaaattcagccctctcaactggaattgttttactgtctgtacgagatgcaggaagaagattttgtccagagagcaatggattacttccccaagattgaaatcaacttgtctacgcgcatggaccatatggtgagtagcttctgtatagagaactgccacagagtcgagtctctaagcctggggtttctgcacaatatgcccaaagaggaagaggaagaggaaaaggagggcagacatctagatatggttcaatgcgttttaccctcttccagccacgcagcatgttctcatggactggtcaattcacatctgacgagttcattttgtcgaggattgttctctgtgctcagcaccagccagagtttgaccgagttggacttgagtgacaattctctgggcgatccaggcatgagagttctttgcgaaacattgcaacacccaggatgtaatatcaggcgcctatggctggggcgttgtggcctctctcacgagtgctgctttgacattagcttggtgctgagctccaaccagaagttggtagaactggacctgagtgacaacgccctgggcgattttgggattagactgttgtgtgtgggcctgaagcatctgctgtgcaaccttaaaaaactctggctggtgtcatgttgtctcacatcagcgtgttgtcaggacctggcctcagtactgagcacctcacactctctaacccgcttgtatgtcggcgagaatgcattgggagattcaggagtggcaatcctctgcgaaaaagccaagaatccacagtgtaatcttcaaaaactcggcctggtcaacagcggcctaacttctgtttgctgcagcgcactgtcatctgttctgtcaaccaatcagaacctcacccacctttatcttagaggcaatacgctgggggataaaggcattaaactactgtgtgaaggcctgctgcaccccgattgcaaactgcaggtcctcgagttggataattgtaacctgactagccattgttgctgggacctctcgacgctgctcaccagcagccaaagtttacggaagttatcactggggaacaatgatctgggcgatctaggtgtcatgatgttctgcgaggtgttgaagcagcagagctgtctgctccaaaatctcggcctctcagaaatgtacttcaactacgagaccaaatccgctctcgaaactctgcaggaagagaagcccgaactgacggtggtgtttgaaccctcatggtag

SEQ ID NO: 340917 - DNA, 3111 bp, Artificial Sequence
  derived and/or modified sequence
atgaaaatggcctcaaccagatgcaagctcgctcgttatctagaagatttggaggatgtggacctcaagaaattcaaaatgcatcttgaagattatccaccccagaaagggtgcattcctctgccccggggccagactgaaaaagccgaccacgtggatcttgcgaccctgatgatcgacttcaacggtgaagaaaaagcatgggccatggcggtctggattttcgccgcgatcaataggcgggatttgtatgaaaaagcaaagcgcgacgaacccaagtggggcagtgataacgcacgggtgtcgaatccaacagtcatctgtcaggaagactcaatcgaagaggaatggatgggcctcctggagtacctctcccgcatctcaatttgcaaaatgaaaaaagactaccgcaagaaataccgtaagtatgtcagaagcaggttccagtgtattgaggaccggaatgcacgattgggagagtcagtttccctgaataagcgctataccagactcaggctgatcaaagagcatcgctcacagcaggaaagggaacaggagctgctagccatcggtaagacaaaaacatgtgagtccccggtaagccctatcaaaatggaactgctgtttgaccccgatgatgaacattccgagcctgtgcacaccgtggtgtttcagggtgccgccggtattggcaagacgattctcgcgcgaaagatgatgctcgattgggcatccggcaccttgtatcaagatcgctttgattatctgttttatatccactgccgagaagttagcctggttactcagcgatccctcggagatctcatcatgagctgctgccctgaccccaaccctcctattcataaaatcgtaagaaaaccttcgcggatcctttttctgatggatggatttgacgaactccagggagcctttgatgaacacattggccctctgtgcaccgattggcagaaggccgagaggggcgatatcttactgtcttcattgatcaggaagaagctcctgcctgaagcgtctctactcatcaccactaggccagtcgctctggaaaaactgcaacacctgttagaccacccaaggcacgtggagattttgggcttcagcgaagcgaagaggaaagagtattttttcaaatatttctctgacgaagcccaagctcgcgctgcgttctctctgatacaagaaaatgaagtactcttcacgatgtgttttatcccattggtgtgttggattgtgtgcacaggcctgaagcagcaaatggaaagcgggaaatcgctggcacagacaagcaaaaccaccactgctgtgtatgtcttcttcttgagttctctcctccagccgcggggtgggagccaggaacacggactatgtgctcacctttgggggttatgttcactcgcagcggacggaatttggaatcagaaaatcctcttcgaggaaagcgacctcagaaatcacggcctccagaaggcggacgttagcgcgtttcttagaatgaatttatttcagaaggaagttgattgtgaaaagttttactctttcattcatatgacttttcaggaattctttgctgctatgtattacctgctcgaggaagaaaaggagggtaggaccaacgtgcccggcagccggctgaagctgccctcaagggatgtcaccgtgttactggagaattacgggaagtttgagaagggttacctcatttttgtggtacgattcctcttcggacttgtcaaccaagagagaaccagctatctcgagaaaaagctgagttgtaaaatctcacaacagatcaggctggaactgctcaagtggatagaggtgaaagccaaagctaaaaaactgcaaatacaaccttcacaattggagttattctactgtctgtacgagatgcaggaggaggacttcgttcaaagggctatggattatttccccaaaatcgagattaacctttctactaggatggaccatatggtttcatccttttgcattgagaattgccaccgagtggaaagcctctctctgggctttcttcacaacatgccaaaagaggaggaggaggaagaaaaggaaggcagacacctggacatggtacagtgtgtccttccatccagctcacatgccgcttgcagtcatggcctggttaacagtcacctgacttctagcttctgccgaggactgtttagtgtactgtctacaagccagagccttaccgagttagacttgtcagataattcattaggtgaccccggcatgagggtactgtgcgaaactcttcagcaccccggttgcaacattcgccgcctgtggctgggacggtgtgggttatcacatgagtgttgctttgatattagcctggtcctttcatctaatcagaagttggtcgaactggacttgtcagacaacgcattaggcgactttggtatccgccttctttgcgttggcctgaaacatctcctttgcaacctcaaaaagctttggctcgtgtcatgttgtctgacctccgcttgttgtcaggatcttgcctccgtgctatcaactagccactccctgacaagactttacgtgggagaaaatgcccttggcgactccggagtggccatcttatgtgaaaaggccaaaaacccccagtgcaatctccagaaattggggttagtgaactccggcctcacctccgtatgctgcagtgctcttagctccgtcctctccaccaaccagaatttgacccatctgtacctacgagggaatactctgggagacaaaggcatcaaattgctatgtgagggactgctacacccggattgtaagttgcaagttctcgaactggataactgtaatctcacctcgcactgctgctgggatctctccacactgctcacatcgagtcaatccctgcggaaactttcgctcgggaataacgacctcggggacctgggtgtgatgatgttttgtgaggtacttaagcaacaatcctgtctccttcaaaatttgggcctgagtgaaatgtatttcaactacgagaccaaatctgccctcgaaacgctgcaggaggagaagccagagcttacagtggtgtttgaaccctcctggtag

SEQ ID NO: 340918 - DNA, 3111 bp, Artificial Sequence
  derived and/or modified sequence
atgaagatggccagcacccgctgcaagctggcccgctacctggaggacctggaggatgtggacctgaagaagttcaagatgcacctggaggactacccaccccagaagggctgcatccccctgccccggggccagacagagaaggctgaccacgtggacctggccaccctgatgattgacttcaacggggaggagaaggcctgggccatggctgtgtggatctttgctgccatcaacagaagagacctgtatgagaaggccaagagagatgagcccaagtggggcagtgacaatgcccgggtgagcaaccccaccgtcatctgccaggaggacagcattgaggaggagtggatgggcctgctggagtacctgagccgcatcagcatctgcaagatgaagaaggactacaggaagaagtacagaaaatatgtgcgcagccgcttccagtgcatcgaggacagaaatgcccggctgggggagagcgtgtccctgaacaagcgctacacccggctgcggctcatcaaggagcacaggagccagcaggagcgggagcaggagctgctggccatcggcaagaccaagacctgtgagagccctgtgagccccatcaagatggagctgctgtttgatcctgatgatgagcacagcgagcctgtgcacacagtggtgttccagggcgccgccggcatcggcaagaccatcctggccaggaagatgatgctggactgggccagcggcaccctgtaccaggacagatttgactacctgttctacatccactgccgggaggtgtccctggtgacccagaggagcctgggggacctgatcatgagctgctgcccagaccccaacccccccatccacaagatcgtgaggaagcccagccgcatcctcttcctgatggatggctttgatgagctgcagggcgcctttgatgagcacatcggccccctgtgcacagactggcagaaggccgagcggggggacatcctgctgagcagcctcatcaggaagaagctgctgcctgaggccagcctgctgatcaccaccaggcctgtggccctggagaagctgcagcacctgctggaccaccccaggcatgtggagatcctgggcttcagcgaggccaagaggaaggagtacttcttcaagtacttcagtgatgaggcccaggcccgggccgccttcagcctcatccaggagaatgaggtgctcttcaccatgtgcttcatccccctggtgtgctggatcgtgtgcaccggcctgaagcagcagatggagagcggcaagagcctggcccagaccagcaagaccaccacagctgtgtatgtgttcttcctgagcagcctgctgcagccccggggcggcagccaggagcacggcctgtgtgcccacctgtggggcctgtgcagcctggccgcagatggcatctggaaccagaagatcctgtttgaggagagtgacctgaggaaccacggcctgcagaaggcagatgtgtctgccttcctgaggatgaacctcttccagaaggaggtggactgtgagaagttctacagcttcatccacatgaccttccaggagttctttgctgccatgtactacctgctggaggaggagaaggagggccgcaccaacgtgcccggcagccggctgaagctgcccagcagagatgtgacagtgctgctggagaactacggcaagtttgagaagggctacctgatctttgtggtgcgcttcctgtttggcctggtgaaccaggagaggaccagctacctggagaagaagctgagctgcaagatcagccagcagatccggctggagctgctgaagtggattgaggtgaaggccaaggccaagaagctgcagatccagcccagccagctggagctgttctactgcctgtatgagatgcaggaggaggactttgtgcagagggccatggactacttccccaagattgagatcaacctgagcaccaggatggaccacatggtgtcctccttctgcatcgagaactgccaccgggtggagagcctgagcctgggcttcctgcacaacatgcccaaggaggaggaggaggaggagaaggagggccgccacctggacatggtgcagtgtgtgctgcccagcagcagccacgccgcctgcagccacggcctggtgaacagccacctgaccagcagcttctgccggggcctcttctctgtgctgagcaccagccagagcctgacagagctggacctgagtgacaacagcctgggggaccccggcatgagggtgctgtgtgagaccctgcagcaccctggctgcaacatccggcggctgtggctgggccgctgtggcctgagccatgagtgctgctttgacatcagcctggtgctgagcagcaaccagaagctggtggagctggacctgagtgacaatgccctgggggactttggcatccggctgctgtgtgtgggcctgaagcacctgctgtgcaacctgaagaagctgtggctggtgtcctgctgcctgaccagcgcctgctgccaggacctggcctctgtgctgagcaccagccacagcctgacccggctgtatgtgggggagaatgccctgggggacagcggcgtggccatcctgtgtgagaaggccaagaacccccagtgcaacctgcagaagctgggcctggtgaacagcggcctgacctctgtgtgctgcagcgccctgagctctgtgctgagcaccaaccagaacctgacccacctgtacctgcggggcaacaccctgggggacaagggcatcaagctgctgtgtgagggcctgctgcacccagactgcaagctgcaggtgctggagctggacaactgcaacctgaccagccactgctgctgggacctgagcaccctgctgaccagcagccagagcctgaggaagctgagcctgggcaacaatgacctgggggacctgggcgtgatgatgttctgtgaggtgctgaagcagcagagctgcctgctgcagaacctgggcctgtctgagatgtacttcaactatgagaccaagagcgccctggagaccctgcaggaggagaagccagagctgactgtggtgtttgagcccagctggtag

SEQ ID NO: 340919 - DNA, 3111 bp, Artificial Sequence
  derived and/or modified sequence
atgaagatggccagcacccggtgcaagctggcccggtacctggaggaccttgaagatgtagatcttaagaagtttaaaatgcaccttgaagactacccaccacaaaaaggttgcatccccctacctcggggtcagaccgagaaggccgaccacgtggacttggccaccttgatgatagactttaacggagaagagaaggcatgggccatggcagtgtggatttttgctgcaataaacaggcgagatctgtacgagaaggcgaagcgagatgaacccaaatggggatctgataacgccagagtcagcaatcccaccgtcatttgtcaggaggacagcatcgaggaggagtggatgggcctcctggagtacctctctaggatctccatttgcaaaatgaaaaaagattaccgaaagaagtataggaagtatgttcgcagcaggttccagtgcatcgaggacaggaacgctaggctaggggaaagcgtgagtctcaataaaaggtacactcggttacggctgatcaaggagcacaggtcccagcaggaacgggagcaggaactgctagcaatcggcaagaccaaaacctgcgaatccccagtgagcccgatcaagatggaactgctgtttgaccccgacgacgaacatagcgagcccgtgcacacagtggtttttcagggggccgcgggaattggcaagactatccttgctcgcaagatgatgctggactgggcctctggcaccctgtaccaggaccgttttgattacctgttttatatccactgtcgtgaggtgtctctagtaacccagagaagcctcggggatctgattatgtcctgctgtcccgatccaaatccacccatccacaaaatcgtccggaaacctagtaggattttattcctcatggatgggtttgacgagctccagggagcctttgacgaacatatcggtcctctatgtaccgactggcagaaggccgagagaggtgacatactcctatcctccctgattcggaaaaagcttttaccggaagcctctctgctaattacaacaagaccagtggctttggagaaactccagcacctgcttgaccacccgcgccacgtggaaatactgggtttctcagaggctaaacgcaaagagtatttctttaagtacttttctgatgaagcacaggcgcgggctgcttttagccttatacaggagaatgaagtgctatttaccatgtgcttcatccccctggtgtgttggattgtgtgtaccggactaaaacaacaaatggaatcaggaaaatctctggctcagacttccaaaactacgacagccgtgtacgtattttttctcagttctcttctgcagcccagagggggaagtcaggaacatggcctgtgcgcacacctatggggcctgtgctcactggctgccgatgggatctggaaccagaaaatattgttcgaggagtcggacctccggaaccacggattgcagaaagccgacgtgtctgcctttctccgaatgaacttattccaaaaagaggtggattgcgagaaattctactcgttcattcatatgactttccaggagttcttcgccgcaatgtattacctcctggaggaggagaaggaaggcaggaccaatgtccccgggagtaggctgaagcttccttcacgggacgtgacagttctgctcgagaattacggtaaattcgagaaaggctatctgatctttgtggtcagattcttgtttggccttgtaaatcaggagcgcacttcttaccttgagaaaaaactgtcatgtaagatctcccagcaaataagactggagttgctcaaatggatcgaagtgaaggccaaagctaagaagttgcaaatccagccttcacagctcgagttgttctactgtctttacgagatgcaggaggaagattttgtacagagggcaatggattactttccgaagatagaaataaatctttctacaagaatggaccacatggtgagtagcttttgcatcgaaaactgtcacagagtggaaagtctctcgctaggctttttgcataacatgcctaaggaggaagaagaggaggagaaagaggggcggcacttggacatggtccagtgcgtactgccgtctagctcacatgcggcgtgtagccacggactggtcaacagccatttgacaagtagtttctgtcgaggtctctttagcgttctgagcactagccaaagtctgacagagctggatctatccgacaattctctgggagaccctgggatgcgggttttatgtgagacgctgcagcatcctggctgtaacatcaggagactgtggctgggcaggtgcgggctgtcccatgaatgttgcttcgatataagtttggtcctatccagtaaccaaaaactcgtcgagctcgacctcagtgacaatgccctgggcgatttcggtatccgcctcctgtgcgtgggtctcaaacaccttctttgtaacctgaagaaactgtggctggtgtcctgttgcctcacaagcgcctgttgccaagacttagcatctgtcctgagcacaagccatagtctgactagactgtatgtcggcgaaaatgcgttaggagactcgggggttgccatcctatgtgaaaaggctaagaaccctcaatgtaacttacagaagctcggtctcgtgaacagcggtctgacttctgtatgttgcagcgctctctcctccgtactcagtaccaatcaaaacctgacccacttgtatcttcggggtaacacactgggcgacaagggtataaagctgctgtgcgaaggactgttgcatcctgactgtaagctgcaggtattagagctggataattgcaatctgacctctcactgctgttgggatttatccactcttctaacctctagccagtcccttcggaagctgagcttgggtaataacgatctcggagacctaggtgttatgatgttctgcgaagtcctgaaacaacaatcttgtctcctgcagaatctggggctgtccgagatgtacttcaattatgagacaaagtctgcacttgaaacactacaggaggagaagccagagttgacagtggttttcgagcccagctggtag

SEQ ID NO: 340920 - DNA, 3111 bp, Artificial Sequence
  derived and/or modified sequence
atgaagatggccagcacccggtgcaagctggcccggtacctggaggatcttgaggatgtggatctcaaaaaatttaaaatgcaccttgaggactatccaccccagaagggatgcatcccactgcctagaggtcagaccgagaaggccgatcacgtggatcttgctacgctgatgatcgacttcaacggggaagagaaagcctgggctatggcagtatggattttcgccgccattaataggcgggacttgtacgaaaaagccaagagagacgaaccgaagtgggggtccgataatgcacgggtgagcaaccccacagtgatttgccaggaagacagcattgaggaggagtggatgggattgttagaatacctgagtcggattagcatctgtaagatgaagaaggactacaggaagaaatatcggaagtatgttagatccaggttccaatgcatcgaggatcggaatgcgaggttgggggaatctgtgtctttgaataaaagatatacacgcttacggctaattaaggagcatcgctctcagcaggagcgagaacaagagttattggctatcggtaagacgaaaacatgcgaaagcccagtctctccgatcaagatggaactgctcttcgaccctgacgacgaacactccgagcccgtgcacaccgtggtgtttcaaggagcagcgggtataggcaaaacaattttggcccgtaaaatgatgctagactgggcctccggcactctataccaggaccgcttcgattacctgttttatatacactgccgtgaagtctccctggtgacacaacgctccctgggggacctgattatgtcctgctgtccggatcccaatccacctatccataagattgtgaggaaacccagtaggatcttgtttcttatggatggttttgatgagctacagggagcgttcgacgaacacattgggccgctgtgcactgactggcagaaagcggaaaggggtgatatcctgctaagctccttgattcgcaaaaagttgcttcctgaagcttcacttctcatcacaacacggccggtcgccctcgagaagcttcagcacctgctcgaccacccccggcatgtggaaatcctcggtttttccgaggccaagcggaaggagtacttctttaaatattttagcgatgaggcccaggcacgggcggcctttagtctgatccaagaaaacgaagtactgttcacaatgtgtttcatccctctagtttgctggattgtgtgcactgggctgaagcaacaaatggagtccgggaagtccctggcacagacctctaaaacaacaacagcagtctatgtattctttttatcttcgctgctgcagcctagaggtggcagccaggagcacggcctatgtgcccacctgtgggggctctgttcacttgccgcagatggaatttggaaccagaagatcctcttcgaggaaagtgacctgagaaaccatggtctgcagaaagctgacgtgtctgcatttctcaggatgaacctctttcagaaggaagtggattgtgagaagttttattccttcatacacatgaccttccaagagttcttcgctgctatgtactatctgctcgaggaggaaaaagaaggacggaccaacgtccctgggtcccgtctcaaattgccctctcgagatgtgactgtgttgcttgaaaattatggaaagtttgagaaagggtatctgatctttgttgtgagatttctgtttggactcgtaaaccaggaaaggacgtcctacctcgagaagaaactatcctgcaagatctcccagcagattagactggagctgctgaagtggattgaggtgaaagccaaggccaagaaactgcagatacagccaagtcagcttgaactgttttactgtctttatgagatgcaggaggaagatttcgttcaacgggcaatggactactttcccaaaattgagatcaacctgtccacccggatggatcatatggtatcaagcttctgcattgagaattgccacagggtggagtctcttagcctgggctttttacacaatatgcccaaggaagaggaagaggaagaaaaggaaggccgccatctggacatggttcaatgtgttctgcccagttcatctcacgcagcctgtagtcacggactggtgaatagccacctcactagttctttctgcagaggcctgttcagtgttttgtcaacgagccagagcctcaccgagctggacctgtcggataatagccttggggatcccgggatgcgggtcctgtgcgaaacgctgcagcacccggggtgtaacatccgcaggctatggctggggcgttgtggcctctcacatgagtgctgttttgacatctctcttgtcctgtccagtaatcaaaaactagtggagctggatctcagcgacaatgcattaggcgatttcggtatccgacttctatgtgttggcctcaaacacctcctgtgcaacctcaaaaagctttggctggtgtcatgctgtctaacgtctgcctgctgtcaggacctggcctcggtgctgtctacatcgcattctctgacgcgcctttacgtcggcgagaatgctctaggagattctggagttgcaattctgtgcgagaaagccaaaaacccccaatgtaacttacagaagctaggcctggtaaatagtggtctgacttcagtgtgctgttcagccctgagttccgttctgagtacgaatcagaacctcactcacttgtatctaagaggaaataccctgggagacaagggaattaaactgctgtgtgaagggctgctacatcctgattgcaaactacaggttctggaacttgataactgtaacctcacaagtcactgctgctgggacctgtccacattactcacttcgtcccagtctttacggaagctgtccctcggaaacaacgatctcggcgacctgggcgtgatgatgttctgtgaggtcctgaaacagcaatcttgccttttgcagaacctggggctctccgaaatgtattttaactacgaaaccaagtccgcacttgaaacgcttcaagaggaaaagccagaattgacagttgtatttgagccctcttggtag

SEQ ID NO: 340921 - DNA, 4170 bp, Artificial Sequence
  derived and/or modified sequence
gtagatgaggaaactgaagttgaggaatagtgaagagtttgtccaatgtcatagccccgtaatcaacgggacaaaaattttcttgctgatgggtcaagatggcatcgtgaagtggttgttcaccgtaaactgtaatacaatcctgtttatggatttgtttgcatatttttccctccatagggaaacctttcttccatggctcaggacacactcctggatcgagccaacaggagaactttctggtaagcatttggctaacttttttttttttgagatggagtcttgctgtgtcgcctaggctggagtgcagtggcgtgatcttggctcactgcagcctccacttcccgggttcaatcaattctcctacctcaacttcctgagtagctgggattacaggcgcccgccaccacacccggctcatttttgtacttttagtagagacacagttttgccatgttggccaggctggtcttgaattcctcagctcaggtgatctgcctgccttggcctctcaaagtgctgggattacaggcgtgagccactgtgcccggccttggctaacttttcaaaattaaagattttgacttgttacagtcatgtgacatttttttctttctgtttgctgagtttttgataatttatatctctcaaagtggagactttaaaaaagactcatccgtgtgccgtgttcactgcctggtatcttagtgtggaccgaagcctaaggaccctgaaaacagctgcagatgaagatggcaagcacccgctgcaagctggccaggtacctggaggacctggaggatgtggacttgaagaaatttaagatgcacttagaggactatcctccccagaagggctgcatccccctcccgaggggtcagacagagaaggcagaccatgtggatctagccacgctaatgatcgacttcaatggggaggagaaggcgtgggccatggccgtgtggatcttcgctgcgatcaacaggagagacctttatgagaaagcaaaaagagatgagccgaagtggggttcagataatgcacgtgtttcgaatcccactgtgatatgccaggaagacagcattgaagaggagtggatgggtttactggagtacctttcgagaatctctatttgtaaaatgaagaaagattaccgtaagaagtacagaaagtacgtgagaagcagattccagtgcattgaagacaggaatgcccgtctgggtgagagtgtgagcctcaacaaacgctacacacgactgcgtctcatcaaggagcaccggagccagcaggagagggagcaggagcttctggccatcggcaagaccaagacgtgtgagagccccgtgagtcccattaagatggagttgctgtttgaccccgatgatgagcattctgagcctgtgcacaccgtggtgttccagggggcggcagggattgggaaaacaatcctggccaggaagatgatgttggactgggcgtcggggacactctaccaagacaggtttgactatctgttctatatccactgtcgagaggtgagccttgtgacacagaggagcctgggggacctgatcatgagctgctgccccgacccaaacccacccatccacaagatcgtgagaaaaccctccagaatcctcttcctcatggacggcttcgatgagctgcaaggtgcctttgacgagcacataggaccgctctgcactgactggcagaaggccgagcggggagacattctcctgagcagcctcatcagaaagaagctgcttcccgaggcctctctgctcatcaccacgagacctgtggccctggagaaactgcagcacttgctggaccatcctcggcatgtggagatcctgggtttctccgaggccaaaaggaaagagtacttcttcaagtacttctctgatgaggcccaagccagggcagccttcagtctgattcaggagaacgaggtcctcttcaccatgtgcttcatccccctggtctgctggatcgtgtgcactggactgaaacagcagatggagagtggcaagagccttgcccagacatccaagaccaccaccgcggtgtacgtcttcttcctttccagtttgctgcagccccggggagggagccaggagcacggcctctgcgcccacctctgggggctctgctctttggctgcagatggaatctggaaccagaaaatcctgtttgaggagtccgacctcaggaatcatggactgcagaaggcggatgtgtctgctttcctgaggatgaacctgttccaaaaggaagtggactgcgagaagttctacagcttcatccacatgactttccaggagttctttgccgccatgtactacctgctggaagaggaaaaggaaggaaggacgaacgttccagggagtcgtttgaagcttcccagccgagacgtgacagtccttctggaaaactatggcaaattcgaaaaggggtatttgatttttgttgtacgtttcctctttggcctggtaaaccaggagaggacctcctacttggagaagaaattaagttgcaagatctctcagcaaatcaggctggagctgctgaaatggattgaagtgaaagccaaagctaaaaagctgcagatccagcccagccagctggaattgttctactgtttgtacgagatgcaggaggaggacttcgtgcaaagggccatggactatttccccaagattgagatcaatctctccaccagaatggaccacatggtttcttccttttgcattgagaactgtcatcgggtggagtcactgtccctggggtttctccataacatgcccaaggaggaagaggaggaggaaaaggaaggccgacaccttgatatggtgcagtgtgtcctcccaagctcctctcatgctgcctgttctcatggattggtgaacagccacctcacttccagtttttgccggggcctcttttcagttctgagcaccagccagagtctaactgaattggacctcagtgacaattctctgggggacccagggatgagagtgttgtgtgaaacgctccagcatcctggctgtaacattcggagattgtggttggggcgctgtggcctctcgcatgagtgctgcttcgacatctccttggtcctcagcagcaaccagaagctggtggagctggacctgagtgacaacgccctcggtgacttcggaatcagacttctgtgtgtgggactgaagcacctgttgtgcaatctgaagaagctctggttggtcagctgctgcctcacatcagcatgttgtcaggatcttgcatcagtattgagcaccagccattccctgaccagactctatgtgggggagaatgccttgggagactcaggagtcgcaattttatgtgaaaaagccaagaatccacagtgtaacctgcagaaactggggttggtgaattctggccttacgtcagtctgttgttcagctttgtcctcggtactcagcactaatcagaatctcacgcacctttacctgcgaggcaacactctcggagacaaggggatcaaactactctgtgagggactcttgcaccccgactgcaagcttcaggtgttggaattagacaactgcaacctcacgtcacactgctgctgggatctttccacacttctgacctccagccagagcctgcgaaagctgagcctgggcaacaatgacctgggcgacctgggggtcatgatgttctgtgaagtgctgaaacagcagagctgcctcctgcagaacctggggttgtctgaaatgtatttcaattatgagacaaaaagtgcgttagaaacacttcaagaagaaaagcctgagctgaccgtcgtctttgagccttcttggtaggagtggaaacggggctgccagacgccagtgttctccggtccctccagctgggggccctcaggtggagagagctgcgatccatccaggccaagaccacagctctgtgatccttccggtggagtgtcggagaagagagcttgccgacgatgccttcctgtgcagagcttgggcatctcctttacgccagggtgaggaagacaccaggacaatgacagcatcgggtgttgttgtcatcacagcgcctcagttagaggatgttcctcttggtgacctcatgtaattagctcattcaataaagcactttctttatttt

SEQ ID NO: 340922 - DNA, 3853 bp, Artificial Sequence
  derived and/or modified sequence
gcatttcctctctagctgttcctgaggctggcatctggggaaacctttcttccatggctcaggacacactcctggatcgagccaacaggagaactttctgtgtggaccgaagcctaaggaccctgaaaacagctgcagatgaagatggcaagcacccgctgcaagctggccaggtacctggaggacctggaggatgtggacttgaagaaatttaagatgcacttagaggactatcctccccagaagggctgcatccccctcccgaggggtcagacagagaaggcagaccatgtggatctagccacgctaatgatcgacttcaatggggaggagaaggcgtgggccatggccgtgtggatcttcgctgcgatcaacaggagagacctttatgagaaagcaaaaagagatgagccgaagtggggttcagataatgcacgtgtttcgaatcccactgtgatatgccaggaagacagcattgaagaggagtggatgggtttactggagtacctttcgagaatctctatttgtaaaatgaagaaagattaccgtaagaagtacagaaagtacgtgagaagcagattccagtgcattgaagacaggaatgcccgtctgggtgagagtgtgagcctcaacaaacgctacacacgactgcgtctcatcaaggagcaccggagccagcaggagagggagcaggagcttctggccatcggcaagaccaagacgtgtgagagccccgtgagtcccattaagatggagttgctgtttgaccccgatgatgagcattctgagcctgtgcacaccgtggtgttccagggggcggcagggattgggaaaacaatcctggccaggaagatgatgttggactgggcgtcggggacactctaccaagacaggtttgactatctgttctatatccactgtcgagaggtgagccttgtgacacagaggagcctgggggacctgatcatgagctgctgccccgacccaaacccacccatccacaagatcgtgagaaaaccctccagaatcctcttcctcatggacggcttcgatgagctgcaaggtgcctttgacgagcacataggaccgctctgcactgactggcagaaggccgagcggggagacattctcctgagcagcctcatcagaaagaagctgcttcccgaggcctctctgctcatcaccacgagacctgtggccctggagaaactgcagcacttgctggaccatcctcggcatgtggagatcctgggtttctccgaggccaaaaggaaagagtacttcttcaagtacttctctgatgaggcccaagccagggcagccttcagtctgattcaggagaacgaggtcctcttcaccatgtgcttcatccccctggtctgctggatcgtgtgcactggactgaaacagcagatggagagtggcaagagccttgcccagacatccaagaccaccaccgcggtgtacgtcttcttcctttccagtttgctgcagccccggggagggagccaggagcacggcctctgcgcccacctctgggggctctgctctttggctgcagatggaatctggaaccagaaaatcctgtttgaggagtccgacctcaggaatcatggactgcagaaggcggatgtgtctgctttcctgaggatgaacctgttccaaaaggaagtggactgcgagaagttctacagcttcatccacatgactttccaggagttctttgccgccatgtactacctgctggaagaggaaaaggaaggaaggacgaacgttccagggagtcgtttgaagcttcccagccgagacgtgacagtccttctggaaaactatggcaaattcgaaaaggggtatttgatttttgttgtacgtttcctctttggcctggtaaaccaggagaggacctcctacttggagaagaaattaagttgcaagatctctcagcaaatcaggctggagctgctgaaatggattgaagtgaaagccaaagctaaaaagctgcagatccagcccagccagctggaattgttctactgtttgtacgagatgcaggaggaggacttcgtgcaaagggccatggactatttccccaagattgagatcaatctctccaccagaatggaccacatggtttcttccttttgcattgagaactgtcatcgggtggagtcactgtccctggggtttctccataacatgcccaaggaggaagaggaggaggaaaaggaaggccgacaccttgatatggtgcagtgtgtcctcccaagctcctctcatgctgcctgttctcatggattggtgaacagccacctcacttccagtttttgccggggcctcttttcagttctgagcaccagccagagtctaactgaattggacctcagtgacaattctctgggggacccagggatgagagtgttgtgtgaaacgctccagcatcctggctgtaacattcggagattgtggttggggcgctgtggcctctcgcatgagtgctgcttcgacatctccttggtcctcagcagcaaccagaagctggtggagctggacctgagtgacaacgccctcggtgacttcggaatcagacttctgtgtgtgggactgaagcacctgttgtgcaatctgaagaagctctggttggtcagctgctgcctcacatcagcatgttgtcaggatcttgcatcagtattgagcaccagccattccctgaccagactctatgtgggggagaatgccttgggagactcaggagtcgcaattttatgtgaaaaagccaagaatccacagtgtaacctgcagaaactggggttggtgaattctggccttacgtcagtctgttgttcagctttgtcctcggtactcagcactaatcagaatctcacgcacctttacctgcgaggcaacactctcggagacaaggggatcaaactactctgtgagggactcttgcaccccgactgcaagcttcaggtgttggaattagacaactgcaacctcacgtcacactgctgctgggatctttccacacttctgacctccagccagagcctgcgaaagctgagcctgggcaacaatgacctgggcgacctgggggtcatgatgttctgtgaagtgctgaaacagcagagctgcctcctgcagaacctggggttgtctgaaatgtatttcaattatgagacaaaaagtgcgttagaaacacttcaagaagaaaagcctgagctgaccgtcgtctttgagccttcttggtaggagtggaaacggggctgccagacgccagtgttctccggtccctccagctgggggccctcaggtggagagagctgcgatccatccaggccaagaccacagctctgtgatccttccggtggagtgtcggagaagagagcttgccgacgatgccttcctgtgcagagcttgggcatctcctttacgccagggtgaggaagacaccaggacaatgacagcatcgggtgttgttgtcatcacagcgcctcagttagaggatgttcctcttggtgacctcatgtaattagctcattcaataaagcactttctttatttttctcttctctgtctaactttctttttcctatcttttttcttctttgttctgtttacttttgctcatatcatcattcccgctatctttctattaactgaccataacacagaactagttgactatatattatgttgaaattttatggcagctatttatttatttaaattttttgtaacagttttgttttctaataagaaaaatccatgctttttgtagctggttgaaaattcaggaatatgtaaaactttttggtatttaattaaattgattccttttcttaattttaaaaaa

SEQ ID NO: 340923 - DNA, 3111 bp, Artificial Sequence
  derived and/or modified sequence
atgaaaatggccagcacaaggtgtaagctggctcgctacctggaggatctggaggacgtggatctgaagaagtttaaaatgcacctcgaagactatccacctcaaaagggatgcattcctctgcctcgcggacagacagagaaggccgaccacgtcgatctcgcaacactcatgatagatttcaatggagaggagaaggcgtgggctatggcagtctggatctttgctgccattaataggagagatttgtacgagaaggccaagcgggatgagcccaagtggggctctgacaacgctagagtgtctaacccgacagtgatctgtcaagaagacagcattgaggaagagtggatgggcttgttggagtatctttctcgaatatccatatgcaaaatgaaaaaagattatcggaagaagtaccgaaaatatgtccggtccagatttcagtgtattgaggatcgcaacgccaggttgggtgaatccgtgtcactaaataagaggtatacgcggctgcgactgatcaaagaacaccggagccagcaggagcgcgaacaggagctgctcgcaattggaaaaacaaaaacatgtgaatcacctgtcagtccaatcaaaatggagctgctgttcgatccagacgacgaacactcagagcccgtccataccgtcgtgtttcaaggggcagccggaatcggtaaaactatcttagcccgtaaaatgatgctcgattgggccagcggaactctgtaccaggacagattcgattacttattctatattcattgtcgagaagtgtccctcgttacacagagatctctgggtgacctcatcatgtcatgctgcccggaccccaatccccctatccataagatcgtaaggaaaccctccagaattctcttcctaatggacggatttgacgaacttcagggcgcattcgacgagcatatcggtcctctctgtacggactggcagaaggccgagcggggagacattctcctgagctccctgattagaaaaaagctgttacccgaggcttcattacttatcactacccggccagtagcactggagaaactccagcacttattggatcaccccaggcatgtggagatacttggcttcagcgaggcaaagaggaaagagtatttctttaagtatttttccgatgaagcacaggcacgggctgcattttccctgattcaggaaaacgaggtgctctttacaatgtgcttcattcccctcgtgtgctggattgtctgtacgggcctcaagcaacagatggagtccggcaagtccctcgcacagacaagcaaaacaaccactgcagtgtacgtgtttttcctgtccagcctgttacagccaaggggaggatcccaagaacacggtctttgtgcccatctttggggtctgtgttccctcgcggctgatgggatctggaaccaaaaaattctgtttgaggagagtgacctccggaaccacggcctgcagaaggcggatgtatcagcctttctcagaatgaacctattccagaaggaagttgattgtgagaaattttattcgttcattcacatgacattccaggagttctttgcagcgatgtactatttactcgaggaagaaaaagaaggtcggaccaatgtgcccggatctagactgaagctgccttctagagacgttaccgtgctcctggaaaactacgggaaatttgagaagggttacctgatcttcgttgtgaggtttctgtttggtctcgtgaatcaggagcggacaagctacctagagaagaagctgtcctgtaagatctcccaacaaatcaggctggaactgcttaaatggattgaagttaaggccaaggccaaaaagttgcagatccaaccctcacaacttgaactgttctactgtctgtacgagatgcaggaagaagatttcgttcagcgagcaatggactactttcccaaaattgagattaatctgagtacaagaatggaccatatggtgagtagcttttgcatagaaaactgtcatagagtggaaagcctaagcttgggcttcctgcataatatgcccaaggaggaggaggaggaggagaaggagggcaggcacctagatatggtgcaatgtgtactaccctcctctagccacgccgcttgcagtcatggactggtgaatagccacctgacttcatccttttgcagggggctgttctcggtgttatccacgagccagtcgttgactgaactggacttgagcgacaactctcttggcgacccaggcatgcgagtgttgtgcgagactctgcaacacccaggctgcaacattagacggctgtggcttggtcggtgtggactgagccatgagtgctgtttcgacattagtctggtcctgtcttccaatcagaagctggtagagctggatctcagcgacaatgccctgggagacttcggcattcgcctgctctgtgtgggtctgaagcatttgctgtgcaacctgaagaagctgtggttggttagctgctgtctgacatctgcatgctgccaggatctggcctctgtgttgtcaaccagtcactctctgactcggctctatgtgggcgagaacgccctgggggactccggcgtggccattctctgcgaaaaagcaaagaacccacagtgtaatttgcaaaagttgggcctggtcaactctggcctgactagtgtttgctgtagcgcacttagctctgtcctgtcgaccaatcagaatcttacgcatttatatctgcggggaaatacccttggagataagggtataaagttgttgtgcgaaggacttctgcatccagattgtaaattacaagttttggagctggacaattgcaacctaacgtcacactgttgttgggatctaagcaccctgctgactagctcacaaagcctgaggaagctgagcctgggtaataatgatcttggagacctgggggttatgatgttctgcgaggtgctgaagcagcagagctgcctcctccagaacctcggtctttctgagatgtactttaactatgagactaagagtgcactagagactctgcaggaagaaaaacccgagctgactgtggtgttcgagccctcttggtag

SEQ ID NO: 340924 - DNA, 3111 bp, Artificial Sequence
  derived and/or modified sequence
atgaaaatggcctcaacacggtgtaaacttgcgagataccttgaggacctcgaagatgtcgatttgaaaaagtttaagatgcacctggaggactatccgccacagaagggttgcatcccactcccgagaggtcagacagagaaggcggaccacgtggatttggctacactcatgatagacttcaatggagaggagaaggcgtgggccatggccgtgtggatttttgctgctattaatcggagggatctgtatgaaaaagccaaacgagacgaacctaaatggggctcagataatgccagagtctctaatccgaccgttatctgccaggaagattccatcgaggaagaatggatgggcctgttagagtatttgtctcgaatctcaatttgcaagatgaagaaggactataggaagaagtaccgcaagtacgtgcggtcaaggtttcaatgcattgaggatagaaatgcacggttaggcgaaagcgtatccctcaataaacgatatacaaggttacggctgatcaaggaacataggagccagcaggaacgggagcaggaactcctggccatcgggaagaccaagacctgtgagtctcccgtgtcgcccattaaaatggaactgctgttcgaccccgacgatgaacattccgagccagtgcatactgtcgtgtttcagggggcagcgggaataggaaagaccattctggcgaggaaaatgatgctagattgggcctccggcaccctctatcaggaccgatttgactatttattctacatccattgccgcgaggtgagtctcgttacgcaacgctcgctaggtgatctgattatgtcgtgctgtccagatccaaacccacctatccataagatcgtaaggaaacccagccggattctgtttctcatggacggcttcgatgagctccagggagcattcgatgagcatatcggaccactctgtaccgattggcagaaagccgaacggggagacattttgctgtcatctctcatcagaaaaaaactgttacccgaagcgagcctactaatcaccacacggcctgttgctcttgagaagctgcagcatctccttgaccacccccgtcatgtggaaattctgggatttagcgaagccaagagaaaagaatacttctttaagtatttttctgacgaagcccaggccagggccgctttctccctcatacaggagaatgaggtcctatttacaatgtgcttcatcccactcgtttgctggattgtctgcaccggattgaaacaacagatggagagtgggaagtccctggcccaaacctccaaaaccactactgccgtgtacgtgttcttcttgagctctctgctccagcctaggggcggtagccaggagcatggcctttgcgcccatctgtgggggctatgtagtctggccgctgatggaatctggaatcaaaaaattcttttcgaggaatcagatctgcgaaatcacgggctgcaaaaggctgatgttagcgcattcctccggatgaacttgtttcagaaggaggttgattgcgagaagttttactcattcatccatatgacgtttcaggagttcttcgcggctatgtattaccttctcgaagaagaaaaagaagggcgtacaaacgttcctggatcaaggctaaagctgccgtcaagggacgtgacagtgctgctggaaaattacggtaaatttgaaaaggggtacctgatctttgtagttcgcttcctattcggtctggtgaaccaagaacgtaccagttacctcgaaaagaaacttagttgtaaaatctcacaacagatccggctggagctcttaaaatggatcgaggttaaggccaaagcgaagaaattgcagatacagccatcgcaactcgaacttttctactgcttatatgaaatgcaagaggaggacttcgtccagagggcgatggactatttcccaaagattgagataaatctgtcaacgcgaatggatcacatggtctcatccttttgcatcgagaattgtcaccgggtggaatccctgtctctcggatttctccataatatgcccaaagaagaggaggaagaggaaaaggagggtagacacctcgatatggtccagtgtgtgctgcccagctccagtcatgcggcttgcagccacggcctagtcaatagtcatttaacctcttcattttgccgaggtctgttttccgtgctcagcacctcacagagtctgacagagttggatctgtcagataacagcttgggcgaccctggcatgcgagtcttatgtgaaacgcttcagcacccagggtgtaatatacgtcgtctgtggctgggtagatgcgggctgtcccatgagtgttgcttcgatatctccctggttttatcctccaatcagaaactcgtagaactggatctgagcgacaatgccctgggtgacttcggcattcgtctgttatgcgttggactgaaacacctgctttgtaacttaaagaagctgtggctggtgtcttgttgcctgacaagcgcatgctgtcaagatctcgcttcagtgctgtccacatctcactccctgacacgtctgtacgttggagaaaatgctttgggcgactctggtgtggcaatcctttgcgaaaaagctaagaatccccaatgtaatctgcagaaactggggcttgtcaattcaggcctaaccagcgtgtgctgtagtgctctgagctcagtgctgagcactaaccaaaatctgacgcacctctatctgcgcggaaacacactgggagataagggaatcaagctgctgtgcgaagggctcctacacccggattgcaagctgcaagtgctagaattggacaactgtaacctcaccagtcattgctgctgggatctttctactctactaacaagttcgcagtccttgcgcaagctgtccctgggtaacaacgacctgggggatcttggagtaatgatgttttgtgaagtcctcaaacaacagtcttgcttgctccaaaacctgggtctcagtgagatgtactttaattacgagacaaaatccgccctcgagaccctgcaagaggaaaagcccgaactgactgtggtgtttgaaccctcttggtag

SEQ ID NO: 340925 - DNA, 3111 bp, Artificial Sequence
  derived and/or modified sequence
atgaagatggccagcaccagatgcaagctggccagatacctggaggacctggaggacgtggacctgaagaagttcaagatgcacctggaggactaccccccccagaagggctgcatccccctgcccagaggccagaccgagaaggccgaccacgtggacctggccaccctgatgatcgacttcaacggcgaggagaaggcctgggccatggccgtgtggatcttcgccgccatcaacagaagagacctgtacgagaaggccaagagagacgagcccaagtggggcagcgacaacgccagagtgagcaaccccaccgtgatctgccaggaggacagcatcgaggaggagtggatgggcctgctggagtacctgagcagaatcagcatctgcaagatgaagaaggactacagaaagaagtacagaaagtacgtgagaagcagattccagtgcatcgaggacagaaacgccagactgggcgagagcgtgagcctgaacaagagatacaccagactgagactgatcaaggagcacagaagccagcaggagagagagcaggagctgctggccatcggcaagaccaagacctgcgagagccccgtgagccccatcaagatggagctgctgttcgaccccgacgacgagcacagcgagcccgtgcacaccgtggtgttccagggcgccgccggcatcggcaagaccatcctggccagaaagatgatgctggactgggccagcggcaccctgtaccaggacagattcgactacctgttctacatccactgcagagaggtgagcctggtgacccagagaagcctgggcgacctgatcatgagctgctgccccgaccccaacccccccatccacaagatcgtgagaaagcccagcagaatcctgttcctgatggacggcttcgacgagctgcagggcgccttcgacgagcacatcggccccctgtgcaccgactggcagaaggccgagagaggcgacatcctgctgagcagcctgatcagaaagaagctgctgcccgaggccagcctgctgatcaccaccagacccgtggccctggagaagctgcagcacctgctggaccaccccagacacgtggagatcctgggcttcagcgaggccaagagaaaggagtacttcttcaagtacttcagcgacgaggcccaggccagagccgccttcagcctgatccaggagaacgaggtgctgttcaccatgtgcttcatccccctggtgtgctggatcgtgtgcaccggcctgaagcagcagatggagagcggcaagagcctggcccagaccagcaagaccaccaccgccgtgtacgtgttcttcctgagcagcctgctgcagcccagaggcggcagccaggagcacggcctgtgcgcccacctgtggggcctgtgcagcctggccgccgacggcatctggaaccagaagatcctgttcgaggagagcgacctgagaaaccacggcctgcagaaggccgacgtgagcgccttcctgagaatgaacctgttccagaaggaggtggactgcgagaagttctacagcttcatccacatgaccttccaggagttcttcgccgccatgtactacctgctggaggaggagaaggagggcagaaccaacgtgcccggcagcagactgaagctgcccagcagagacgtgaccgtgctgctggagaactacggcaagttcgagaagggctacctgatcttcgtggtgagattcctgttcggcctggtgaaccaggagagaaccagctacctggagaagaagctgagctgcaagatcagccagcagatcagactggagctgctgaagtggatcgaggtgaaggccaaggccaagaagctgcagatccagcccagccagctggagctgttctactgcctgtacgagatgcaggaggaggacttcgtgcagagagccatggactacttccccaagatcgagatcaacctgagcaccagaatggaccacatggtgagcagcttctgcatcgagaactgccacagagtggagagcctgagcctgggcttcctgcacaacatgcccaaggaggaggaggaggaggagaaggagggcagacacctggacatggtgcagtgcgtgctgcccagcagcagccacgccgcctgcagccacggcctggtgaacagccacctgaccagcagcttctgcagaggcctgttcagcgtgctgagcaccagccagagcctgaccgagctggacctgagcgacaacagcctgggcgaccccggcatgagagtgctgtgcgagaccctgcagcaccccggctgcaacatcagaagactgtggctgggcagatgcggcctgagccacgagtgctgcttcgacatcagcctggtgctgagcagcaaccagaagctggtggagctggacctgagcgacaacgccctgggcgacttcggcatcagactgctgtgcgtgggcctgaagcacctgctgtgcaacctgaagaagctgtggctggtgagctgctgcctgaccagcgcctgctgccaggacctggccagcgtgctgagcaccagccacagcctgaccagactgtacgtgggcgagaacgccctgggcgacagcggcgtggccatcctgtgcgagaaggccaagaacccccagtgcaacctgcagaagctgggcctggtgaacagcggcctgaccagcgtgtgctgcagcgccctgagcagcgtgctgagcaccaaccagaacctgacccacctgtacctgagaggcaacaccctgggcgacaagggcatcaagctgctgtgcgagggcctgctgcaccccgactgcaagctgcaggtgctggagctggacaactgcaacctgaccagccactgctgctgggacctgagcaccctgctgaccagcagccagagcctgagaaagctgagcctgggcaacaacgacctgggcgacctgggcgtgatgatgttctgcgaggtgctgaagcagcagagctgcctgctgcagaacctgggcctgagcgagatgtacttcaactacgagaccaagagcgccctggagaccctgcaggaggagaagcccgagctgaccgtggtgttcgagcccagctggtag

SEQ ID NO: 340926 - protein, 979 aa, Artificial Sequence
  derived and/or modified sequence
MKMASTRCKLARYLEDLEDVDLKKFKMHLEDYPPQKGCIPLPRGQTEKADHVDLATLMIDFNGEEKAWAMAVWIFAAINRRDLYEKAKRDEPKWGSDNARVSNPTVICQEDSIEEEWMGLLEYLSRISICKMKKDYRKKYRKYVRSRFQCIEDRNARLGESVSLNKRYTRLRLIKEHRSQQEREQELLAIGKTKTCESPVSPIKMELLFDPDDEHSEPVHTVVFQGAAGIGKTILARKMMLDWASGTLYQDRFDYLFYIHCREVSLVTQRSLGDLIMSCCPDPNPPIHKIVRKPSRILFLMDGFDELQGAFDEHIGPLCTDWQKAERGDILLSSLIRKKLLPEASLLITTRPVALEKLQHLLDHPRHVEILGFSEAKRKEYFFKYFSDEAQARAAFSLIQENEVLFTMCFIPLVCWIVCTGLKQQMESGKSLAQTSKTTTAVYVFFLSSLLQPRGGSQEHGLCAHLWGLCSLAADGIWNQKILFEESDLRNHGLQKADVSAFLRMNLFQKEVDCEKFYSFIHMTFQEFFAAMYYLLEEEKEGRTNVPGSRLKLPSRDVTVLLENYGKFEKGYLIFVVRFLFGLVNQERTSYLEKKLSCKISQQIRLELLKWIEVKAKAKKLQIQPSQLELFYCLYEMQEEDFVQRAMDYFPKIEINLSTRMDHMVSSFCIENCHRVESLSLGFLHNMPKEEEEEEKEGRHLDMVQCVLPSSSHAACSHGLGRCGLSHECCFDISLVLSSNQKLVELDLSDNALGDFGIRLLCVGLKHLLCNLKKLWLVSCCLTSACCQDLASVLSTSHSLTRLYVGENALGDSGVAILCEKAKNPQCNLQKLGLVNSGLTSVCCSALSSVLSTNQNLTHLYLRGNTLGDKGIKLLCEGLLHPDCKLQVLELDNCNLTSHCCWDLSTLLTSSQSLRKLSLGNNDLGDLGVMMFCEVLKQQSCLLQNLGLSEMYFNYETKSALETLQEEKPELTVVFEPSW

SEQ ID NO: 340927 - DNA, 2940 bp, Artificial Sequence
  derived and/or modified sequence
atgaagatggcgagcacaaggtgcaagctggctcgttaccttgaggacctggaggacgtggacctgaagaagttcaaaatgcatctcgaggattatccaccccagaaaggttgcatccctcttcctagaggacagacagagaaggctgaccatgtcgaccttgctactctaatgatagattttaatggagaggagaaggcttgggcaatggctgtgtggatcttcgcagcaattaacaggcgggatctttatgaaaaagccaaacgcgacgaacctaagtgggggtctgacaatgctagggtgtctaatccaactgtgatctgtcaggaggactcaatcgaggaagaatggatgggactcctggagtatctatccagaataagcatctgcaagatgaagaaggactaccgaaaaaaatacagaaaatatgtgcgatcccgcttccagtgcatcgaggatagaaatgccagactaggggaatccgtcagtctcaacaagaggtataccaggttgcgcctgataaaagaacatagatcccagcaggagcgcgaacaggaactgctcgctattgggaaaactaagacttgcgagtcaccagtgagtccaattaagatggaactgttattcgacccggacgacgagcactcagagcctgttcacacagtggtatttcagggggctgctggcatcggcaaaactatattagcgcggaagatgatgctggactgggcgtccggaactctatatcaggataggtttgattatctgttttacatccactgtcgagaagtgtccctggtcacgcaacggtcattgggtgaccttatcatgtcctgttgtccggaccctaacccacccatccataaaattgtgagaaaacccagtcgcatattgtttcttatggatggctttgatgagctgcagggtgccttcgatgagcatataggccctttgtgtaccgactggcagaaggccgagagaggcgacattctgctcagctcacttatcaggaaaaaattattgcccgaggccagtctgttaattacaactcggccagttgccctcgagaaactgcagcacctgctcgatcacccacgacacgttgagattttgggtttttcagaggccaaacggaaggagtacttcttcaaatacttctctgacgaggctcaagcgcgcgccgcgttctctctgattcaagaaaatgaggtgttattcactatgtgcttcatccctctggtctgctggattgtttgtacagggcttaagcagcagatggagagcggcaaaagccttgcacaaacatctaaaactaccactgccgtctacgtgttcttcttatctagtctcctgcaacccaggggcgggagtcaggagcatggactttgtgcacacctgtggggactgtgttctcttgcggccgacggcatttggaaccagaagattttatttgaagaaagtgaccttagaaaccacggtttacagaaggccgatgtgtccgctttcctgcgaatgaacctgttccagaaagaggtggactgtgagaaattctactcttttatccacatgacattccaggagtttttcgcggcaatgtattacctactggaggaagaaaaagaaggccggacaaatgttcccgggagcagactcaagctaccctcacgcgatgtgacagttctattggagaattatggtaaatttgaaaagggttacctaattttcgtggtgcgctttctgttcggactggtgaatcaggagcgtacctcttatctggagaaaaagctaagctgcaaaatcagccagcagatcagacttgagctcctcaaatggattgaggttaaggctaaagctaagaaactgcagatccagccctcccagcttgaactgttttactgtctgtacgagatgcaggaagaagacttcgtgcaacgggccatggactactttcccaagattgagattaatttgtcgacacgtatggaccacatggtaagtagtttttgtattgagaactgccaccgggtggagtccctgagtttaggcttcctgcacaacatgcccaaggaagaggaggaggaagagaaggaagggaggcatctagacatggtgcagtgcgtattaccatcatcttcgcacgctgcctgttcccacgggctgggccgttgcggtttatctcatgagtgctgctttgatatctcacttgtgctctccagtaaccagaagttggtcgaattggacctgtctgacaacgcactcggagactttggaataaggctcctttgcgtgggactgaagcatctcttgtgtaatctcaagaagctttggctggtctcatgttgcctgaccagcgcctgctgtcaggacctggcaagcgtgcttagcacctcccatagtctgactcgattgtatgtgggcgaaaatgcgttgggggattcaggggtcgcgattctgtgtgaaaaggctaagaacccacagtgtaatctccagaaactgggcctggtgaattctggcctgacttccgtgtgttgctcagcacttagtagcgtactgtctacaaatcaaaacctgacacacctgtacctgcggggcaatactttgggcgataagggtataaagctactttgcgaaggcctcctgcaccctgactgtaaactacaagtccttgagctggacaactgtaatctgacctcgcattgctgctgggacctgtctactttactgacctctagtcaatctctaagaaaactttcccttgggaacaatgatctcggcgatctgggagtcatgatgttttgcgaggtgttgaaacagcaaagttgtctgctccagaacttagggctgtcagagatgtacttcaactatgaaactaagagcgcgctggaaaccctgcaggaggagaagccagaactcacagtcgtgtttgagccctcttggtag

SEQ ID NO: 340928 - DNA, 2940 bp, Artificial Sequence
  derived and/or modified sequence
atgaagatggccagcacccgctgcaagctggcccgctacctggaggacctggaggatgtggacctgaagaagttcaagatgcacctggaggactacccaccccagaagggctgcatccccctgccccggggccagacagagaaggctgaccacgtggacctggccaccctgatgattgacttcaacggggaggagaaggcctgggccatggctgtgtggatctttgctgccatcaacagaagagacctgtatgagaaggccaagagagatgagcccaagtggggcagtgacaatgcccgggtgagcaaccccaccgtcatctgccaggaggacagcattgaggaggagtggatgggcctgctggagtacctgagccgcatcagcatctgcaagatgaagaaggactacaggaagaagtacagaaaatatgtgcgcagccgcttccagtgcatcgaggacagaaatgcccggctgggggagagcgtgtccctgaacaagcgctacacccggctgcggctcatcaaggagcacaggagccagcaggagcgggagcaggagctgctggccatcggcaagaccaagacctgtgagagccctgtgagccccatcaagatggagctgctgtttgatcctgatgatgagcacagcgagcctgtgcacacagtggtgttccagggcgccgccggcatcggcaagaccatcctggccaggaagatgatgctggactgggccagcggcaccctgtaccaggacagatttgactacctgttctacatccactgccgggaggtgtccctggtgacccagaggagcctgggggacctgatcatgagctgctgcccagaccccaacccccccatccacaagatcgtgaggaagcccagccgcatcctcttcctgatggatggctttgatgagctgcagggcgcctttgatgagcacatcggccccctgtgcacagactggcagaaggccgagcggggggacatcctgctgagcagcctcatcaggaagaagctgctgcctgaggccagcctgctgatcaccaccaggcctgtggccctggagaagctgcagcacctgctggaccaccccaggcatgtggagatcctgggcttcagcgaggccaagaggaaggagtacttcttcaagtacttcagtgatgaggcccaggcccgggccgccttcagcctcatccaggagaatgaggtgctcttcaccatgtgcttcatccccctggtgtgctggatcgtgtgcaccggcctgaagcagcagatggagagcggcaagagcctggcccagaccagcaagaccaccacagctgtgtatgtgttcttcctgagcagcctgctgcagccccggggcggcagccaggagcacggcctgtgtgcccacctgtggggcctgtgcagcctggccgcagatggcatctggaaccagaagatcctgtttgaggagagtgacctgaggaaccacggcctgcagaaggcagatgtgtctgccttcctgaggatgaacctcttccagaaggaggtggactgtgagaagttctacagcttcatccacatgaccttccaggagttctttgctgccatgtactacctgctggaggaggagaaggagggccgcaccaacgtgcccggcagccggctgaagctgcccagcagagatgtgacagtgctgctggagaactacggcaagtttgagaagggctacctgatctttgtggtgcgcttcctgtttggcctggtgaaccaggagaggaccagctacctggagaagaagctgagctgcaagatcagccagcagatccggctggagctgctgaagtggattgaggtgaaggccaaggccaagaagctgcagatccagcccagccagctggagctgttctactgcctgtatgagatgcaggaggaggactttgtgcagagggccatggactacttccccaagattgagatcaacctgagcaccaggatggaccacatggtgtcctccttctgcatcgagaactgccaccgggtggagagcctgagcctgggcttcctgcacaacatgcccaaggaggaggaggaggaggagaaggagggccgccacctggacatggtgcagtgtgtgctgcccagcagcagccacgccgcctgcagccacggcctgggccgctgtggcctgagccatgagtgctgctttgacatcagcctggtgctgagcagcaaccagaagctggtggagctggacctgagtgacaatgccctgggggactttggcatccggctgctgtgtgtgggcctgaagcacctgctgtgcaacctgaagaagctgtggctggtgtcctgctgcctgaccagcgcctgctgccaggacctggcctctgtgctgagcaccagccacagcctgacccggctgtatgtgggagaaaatgccctgggggacagcggcgtggccatcctgtgtgagaaggccaagaacccccagtgcaacctgcagaagctgggcctggtgaacagcggcctgacctctgtgtgctgcagcgccctgagctctgtgctgagcaccaaccagaacctgacccacctgtacctgcggggcaacaccctgggggacaagggcatcaagctgctgtgtgagggcctgctgcacccagactgcaagctgcaggtgctggagctggacaactgcaacctgaccagccactgctgctgggacctgagcaccctgctgaccagcagccagagcctgaggaagctgagcctgggcaacaatgacctgggggacctgggcgtgatgatgttctgtgaggtgctgaagcagcagagctgcctgctgcagaacctgggcctgtctgagatgtacttcaactatgagaccaagagcgccctggagaccctgcaggaggagaagccagagctgactgtggtgtttgagcccagctggtag

SEQ ID NO: 340929 - DNA, 2940 bp, Artificial Sequence
  derived and/or modified sequence
atgaagatggccagcacccggtgcaagctggcccggtacctggaggatcttgaagacgtagacctcaaaaagttcaagatgcatctggaagactaccctccccagaaaggttgcatcccacttccacgcggccaaactgaaaaagctgaccatgtggacctggccaccttaatgattgacttcaatggtgaagagaaggcgtgggcgatggccgtttggatctttgccgcaattaatcgaagagacttgtacgaaaaggcaaaacgcgacgaacccaagtggggcagcgataatgcacgcgtttccaacccaactgtgatatgccaagaggatagcattgaggaagagtggatgggtctgctggaatacctctcacggatcagcatttgtaaaatgaagaaagattatcggaagaagtacagaaagtatgtccgatccagatttcagtgtatagaagatagaaacgcccgcctcggagaaagtgtgtctttgaataagaggtataccagactgagactgattaaggaacaccggtcccaacaagaaagggaacaggagctgctggccatcggcaagactaagacttgcgagtccccagtgtcccccatcaagatggagctcttgttcgacccagacgacgagcactccgaacctgtccataccgtggtatttcagggtgcagccggaatcggtaaaaccattcttgcacggaagatgatgcttgactgggcaagcgggactctctaccaggatcgctttgattatctattctatatccactgcagggaggtcagcctcgttacccagcggagtctgggcgatttaattatgagctgttgcccagatccaaatcctccaattcacaagatagtgagaaagccttctaggattctattcctcatggatggatttgacgagctgcagggagcctttgacgaacacatcgggcccctgtgtacggactggcaaaaagcagagcgcggtgatatattgttatccagcctgataagaaagaagctgctcccagaagcatcactcttgatcactacaagacctgtagcactcgagaaactgcagcacttgcttgaccacccaagacacgtcgagattctgggtttctccgaggccaaaagaaaagagtattttttcaagtacttttcggatgaagctcaggccagagccgcgttcagtctgattcaggagaacgaggtgctgttcaccatgtgctttataccactcgtgtgttggatcgtctgtacggggctgaagcaacaaatggaaagcggtaagtcactggcccagacatccaaaaccaccactgctgtatacgtgttcttcctaagctcattgctacaacctagaggaggtagtcaggagcatggactgtgtgcgcacctctgggggctgtgttctttggccgccgatggcatttggaaccaaaagatccttttcgaggaatctgatctgcgtaaccatgggttgcagaaagcggatgtcagcgccttcttgcgaatgaatctgttccagaaggaggtggattgtgaaaagttctattcctttatccatatgacgtttcaggagttcttcgcagccatgtactacctgctcgaggaggagaaggaaggcaggacaaatgttcctggctcccgattgaagctccccagtcgagacgtgactgtgctcctcgagaactacgggaagttcgaaaagggatacctgatcttcgtcgtgcggtttctgttcggacttgtgaatcaggagaggaccagttacttagaaaaaaagctgagttgtaagatctcccaacaaattaggctggagctgctcaagtggatcgaggtcaaagccaaagcgaaaaaactgcaaatccaaccttcacagcttgagcttttctactgcctttacgagatgcaagaggaggactttgtgcagcgcgctatggactatttccctaagatcgagatcaacctctccacccgcatggaccatatggtcagcagcttttgcattgaaaactgccatcgagtggagagtctgtctcttggtttcttacataacatgcccaaggaagaggaagaagaagagaaggaagggcgacatctggacatggtgcagtgcgtcttgccttcctcaagccacgctgcctgtagccacggcctgggccggtgtggactgtctcatgaatgttgcttcgatatctcacttgtgctgtcttctaatcagaagctcgtggagctggatctcagcgacaatgcattgggcgactttgggatcagactgctatgtgtcgggctaaagcacctgctgtgtaatctcaagaaactgtggctcgtgtcatgttgcctgacctccgcatgttgccaagatcttgctagcgtgttatctacatcacatagcctgacgcggctttacgtaggggagaacgcacttggcgactcaggcgtggcaatcttgtgcgaaaaagccaaaaaccctcaatgcaatctccaaaaactgggcctcgtgaacagcggactgacaagcgtgtgctgctctgccctgtcatcagtcctgtccactaaccagaatctcacccatctgtacctgcgtggcaacaccctaggagataagggcattaagttgttgtgtgaagggctcctgcatcccgactgtaagctccaggtgcttgaactggacaattgcaaccttacatcacattgctgctgggatctcagcacactcctgacatcctcccagtccctgaggaagttaagtctaggcaataatgatctgggagacctgggcgtgatgatgttctgcgaggtgctcaaacagcagagttgtctgttacagaacctcggcttgagtgagatgtacttcaattatgaaaccaaatctgctttggagacactacaggaagagaaaccagagctgacggtagtatttgagccaagctggtag

SEQ ID NO: 340930 - DNA, 2940 bp, Artificial Sequence
  derived and/or modified sequence
atgaagatggcaagcacccgctgcaagctggccaggtacctggaggacctggaggatgtggacttgaagaaatttaagatgcacttagaggactatcctccccagaagggctgcatccccctcccgaggggtcagacagagaaggcagaccatgtggatctagccacgctaatgatcgacttcaatggggaggagaaggcgtgggccatggccgtgtggatcttcgctgcgatcaacaggagagacctttatgagaaagcaaaaagagatgagccgaagtggggttcagataatgcacgtgtttcgaatcccactgtgatatgccaggaagacagcattgaagaggagtggatgggtttactggagtacctttcgagaatctctatttgtaaaatgaagaaagattaccgtaagaagtacagaaagtacgtgagaagcagattccagtgcattgaagacaggaatgcccgtctgggtgagagtgtgagcctcaacaaacgctacacacgactgcgtctcatcaaggagcaccggagccagcaggagagggagcaggagcttctggccatcggcaagaccaagacgtgtgagagccccgtgagtcccattaagatggagttgctgtttgaccccgatgatgagcattctgagcctgtgcacaccgtggtgttccagggggcggcagggattgggaaaacaatcctggccaggaagatgatgttggactgggcgtcggggacactctaccaagacaggtttgactatctgttctatatccactgtcgagaggtgagccttgtgacacagaggagcctgggggacctgatcatgagctgctgccccgacccaaacccacccatccacaagatcgtgagaaaaccctccagaatcctcttcctcatggacggcttcgatgagctgcaaggtgcctttgacgagcacataggaccgctctgcactgactggcagaaggccgagcggggagacattctcctgagcagcctcatcagaaagaagctgcttcccgaggcctctctgctcatcaccacgagacctgtggccctggagaaactgcagcacttgctggaccatcctcggcatgtggagatcctgggtttctccgaggccaaaaggaaagagtacttcttcaagtacttctctgatgaggcccaagccagggcagccttcagtctgattcaggagaacgaggtcctcttcaccatgtgcttcatccccctggtctgctggatcgtgtgcactggactgaaacagcagatggagagtggcaagagccttgcccagacatccaagaccaccaccgcggtgtacgtcttcttcctttccagtttgctgcagccccggggagggagccaggagcacggcctctgcgcccacctctgggggctctgctctttggctgcagatggaatctggaaccagaaaatcctgtttgaggagtccgacctcaggaatcatggactgcagaaggcggatgtgtctgctttcctgaggatgaacctgttccaaaaggaagtggactgcgagaagttctacagcttcatccacatgactttccaggagttctttgccgccatgtactacctgctggaagaggaaaaggaaggaaggacgaacgttccagggagtcgtttgaagcttcccagccgagacgtgacagtccttctggaaaactatggcaaattcgaaaaggggtatttgatttttgttgtacgtttcctctttggcctggtaaaccaggagaggacctcctacttggagaagaaattaagttgcaagatctctcagcaaatcaggctggagctgctgaaatggattgaagtgaaagccaaagctaaaaagctgcagatccagcccagccagctggaattgttctactgtttgtacgagatgcaggaggaggacttcgtgcaaagggccatggactatttccccaagattgagatcaatctctccaccagaatggaccacatggtttcttccttttgcattgagaactgtcatcgggtggagtcactgtccctggggtttctccataacatgcccaaggaggaagaggaggaggaaaaggaaggccgacaccttgatatggtgcagtgtgtcctcccaagctcctctcatgctgcctgttctcatgggttggggcgctgtggcctctcgcatgagtgctgcttcgacatctccttggtcctcagcagcaaccagaagctggtggagctggacctgagtgacaacgccctcggtgacttcggaatcagacttctgtgtgtgggactgaagcacctgttgtgcaatctgaagaagctctggttggtcagctgctgcctcacatcagcatgttgtcaggatcttgcatcagtattgagcaccagccattccctgaccagactctatgtgggggagaatgccttgggagactcaggagtcgcaattttatgtgaaaaagccaagaatccacagtgtaacctgcagaaactggggttggtgaattctggccttacgtcagtctgttgttcagctttgtcctcggtactcagcactaatcagaatctcacgcacctttacctgcgaggcaacactctcggagacaaggggatcaaactactctgtgagggactcttgcaccccgactgcaagcttcaggtgttggaattagacaactgcaacctcacgtcacactgctgctgggatctttccacacttctgacctccagccagagcctgcgaaagctgagcctgggcaacaatgacctgggcgacctgggggtcatgatgttctgtgaagtgctgaaacagcagagctgcctcctgcagaacctggggttgtctgaaatgtatttcaattatgagacaaaaagtgcgttagaaacacttcaagaagaaaagcctgagctgaccgtcgtctttgagccttcttggtag

SEQ ID NO: 340931 - DNA, 2940 bp, Artificial Sequence
  derived and/or modified sequence
atgaagatggctagcacgcgctgcaaactcgcgcgatacctcgaagatctggaagatgtggatctgaagaaattcaaaatgcacttggaagactatccgcctcagaaaggctgtatcccgctgccccgtggccagaccgagaaagcagatcacgtggatctcgctactctgatgattgattttaacggggaggaaaaagcatgggccatggcagtttggatttttgcagcaatcaataggcgcgacttatatgagaaggcgaaacgtgacgaaccgaaatgggggtctgacaatgctcgggttagcaacccaaccgtcatatgccaagaggacagtattgaagaagaatggatggggctcctggagtacctgagcaggatctctatctgcaaaatgaagaaagattatcgcaagaaataccggaaatatgtgcgctcccgctttcagtgcattgaggaccggaatgcacggcttggtgaaagtgtcagtctgaataagcgatacacccgactaagactcattaaggaacataggtcacaacaggagagggaacaggagttattggctattgggaaaacaaaaacgtgtgaaagccccgtgtctcccatcaaaatggagttactgtttgaccccgacgacgaacactccgaaccagtgcacacggtggtcttccagggcgctgctgggatcgggaagaccatcctggcccgtaagatgatgcttgattgggcaagcggcactctgtatcaggatcgctttgattatctgttttacattcattgccgggaggtctccttggtgacccagcgcagcctcggagatctgattatgtcttgttgccccgaccctaaccccccaatccataagattgtgaggaaaccttctcgaatcctatttctgatggatggcttcgacgagctccaaggagctttcgatgaacacatcggcccattgtgcactgattggcaaaaggccgagagaggagatatactgctgtcttccctcatcaggaaaaagctgttgcccgaggcttccttgctgatcacgacaagaccggtcgcactggaaaagctccagcatttgctggatcatccgaggcatgtggagatcctcggcttttctgaggccaagcggaaagagtactttttcaagtacttctccgatgaggctcaagcccgagctgccttctctctcattcaggagaatgaggtgctgtttactatgtgtttcatacccctcgtgtgctggatcgtttgtactggattgaagcaacagatggagtcaggaaaaagcctggcacagactagcaagaccaccacggccgtatacgtctttttcttatctagcttacttcagcccagaggtggcagccaggaacatgggttgtgcgcccatctctggggtttatgctcactggcggcagacgggatctggaatcagaagatccttttcgaagagtccgaccttcggaaccatggcctgcagaaggccgatgtctccgcattcctgcggatgaatctgtttcagaaagaggtcgattgcgaaaagttttattcctttatccatatgacgttccaggagttcttcgctgctatgtactatctactagaagaggagaaggaaggacgaactaacgtacccggatctcgactgaaactcccttcccgtgatgtgactgtgctactcgagaactatgggaagttcgagaaaggctatttgatcttcgtcgtgcgcttcctgtttggtctggtaaaccaggaacgaaccagctatctcgaaaagaagttgtcgtgtaagatctctcagcagatccgacttgagttactgaaatggattgaggtcaaagccaaggccaagaagcttcagattcagccatcccagttggagctcttctactgcctatacgagatgcaggaagaggatttcgtccagcgtgccatggattactttcccaaaatagaaatcaacctgtcgacaagaatggatcatatggtatcaagcttttgcatagagaattgtcacagagtggagtctctatcactgggttttctccataatatgcctaaggaagaggaggaagaagagaaagagggccgtcatttggatatggtgcagtgcgtgctgccctctagcagccacgcggcatgctcacatgggctgggaagatgtgggctgagccacgaatgttgtttcgacatttcactggtgctctcatctaaccagaaactggtcgagctcgacctcagcgacaatgcgctcggcgactttggaattcgccttctgtgcgtgggcctaaaacacttgctgtgtaatttgaagaaactctggttagtgagttgttgtttgacaagtgcatgttgccaggaccttgcttcggtcctcagcacatcgcacagcctaacaaggctgtacgttggagagaacgctcttggggattccggtgtagccatcctgtgcgaaaaagcaaagaatccacagtgtaacctgcaaaagttgggactggttaactctgggctgacctccgtctgctgctcagctctcagttccgtgttgagcactaaccagaatctgacacatttatatctgcggggtaacacactaggagacaagggcattaaactgctatgcgaaggtctgctgcaccccgattgcaagttgcaggtactcgagctggataattgcaatttaacctctcactgttgttgggacctgagtacccttcttacatcatctcaatccctacgcaagcttagcctggggaataatgatctcggcgacctgggcgtgatgatgttttgtgaagttctcaagcagcagagctgccttctacagaaccttggactgagcgagatgtatttcaactatgagaccaagtcagcgttggagactctgcaagaggagaagccagagctcactgtagttttcgaaccctcttggtag

SEQ ID NO: 340932 - DNA, 2940 bp, Artificial Sequence
  derived and/or modified sequence
atgaagatggccagcaccagatgcaagctggccagatacctggaggacctggaggacgtggacctgaagaagttcaagatgcacctggaggactaccccccccagaagggctgcatccccctgcccagaggccagaccgagaaggccgaccacgtggacctggccaccctgatgatcgacttcaacggcgaggagaaggcctgggccatggccgtgtggatcttcgccgccatcaacagaagagacctgtacgagaaggccaagagagacgagcccaagtggggcagcgacaacgccagagtgagcaaccccaccgtgatctgccaggaggacagcatcgaggaggagtggatgggcctgctggagtacctgagcagaatcagcatctgcaagatgaagaaggactacagaaagaagtacagaaagtacgtgagaagcagattccagtgcatcgaggacagaaacgccagactgggcgagagcgtgagcctgaacaagagatacaccagactgagactgatcaaggagcacagaagccagcaggagagagagcaggagctgctggccatcggcaagaccaagacctgcgagagccccgtgagccccatcaagatggagctgctgttcgaccccgacgacgagcacagcgagcccgtgcacaccgtggtgttccagggcgccgccggcatcggcaagaccatcctggccagaaagatgatgctggactgggccagcggcaccctgtaccaggacagattcgactacctgttctacatccactgcagagaggtgagcctggtgacccagagaagcctgggcgacctgatcatgagctgctgccccgaccccaacccccccatccacaagatcgtgagaaagcccagcagaatcctgttcctgatggacggcttcgacgagctgcagggcgccttcgacgagcacatcggccccctgtgcaccgactggcagaaggccgagagaggcgacatcctgctgagcagcctgatcagaaagaagctgctgcccgaggccagcctgctgatcaccaccagacccgtggccctggagaagctgcagcacctgctggaccaccccagacacgtggagatcctgggcttcagcgaggccaagagaaaggagtacttcttcaagtacttcagcgacgaggcccaggccagagccgccttcagcctgatccaggagaacgaggtgctgttcaccatgtgcttcatccccctggtgtgctggatcgtgtgcaccggcctgaagcagcagatggagagcggcaagagcctggcccagaccagcaagaccaccaccgccgtgtacgtgttcttcctgagcagcctgctgcagcccagaggcggcagccaggagcacggcctgtgcgcccacctgtggggcctgtgcagcctggccgccgacggcatctggaaccagaagatcctgttcgaggagagcgacctgagaaaccacggcctgcagaaggccgacgtgagcgccttcctgagaatgaacctgttccagaaggaggtggactgcgagaagttctacagcttcatccacatgaccttccaggagttcttcgccgccatgtactacctgctggaggaggagaaggagggcagaaccaacgtgcccggcagcagactgaagctgcccagcagagacgtgaccgtgctgctggagaactacggcaagttcgagaagggctacctgatcttcgtggtgagattcctgttcggcctggtgaaccaggagagaaccagctacctggagaagaagctgagctgcaagatcagccagcagatcagactggagctgctgaagtggatcgaggtgaaggccaaggccaagaagctgcagatccagcccagccagctggagctgttctactgcctgtacgagatgcaggaggaggacttcgtgcagagagccatggactacttccccaagatcgagatcaacctgagcaccagaatggaccacatggtgagcagcttctgcatcgagaactgccacagagtggagagcctgagcctgggcttcctgcacaacatgcccaaggaggaggaggaggaggagaaggagggcagacacctggacatggtgcagtgcgtgctgcccagcagcagccacgccgcctgcagccacggcctgggcagatgcggcctgagccacgagtgctgcttcgacatcagcctggtgctgagcagcaaccagaagctggtggagctggacctgagcgacaacgccctgggcgacttcggcatcagactgctgtgcgtgggcctgaagcacctgctgtgcaacctgaagaagctgtggctggtgagctgctgcctgaccagcgcctgctgccaggacctggccagcgtgctgagcaccagccacagcctgaccagactgtacgtgggcgagaacgccctgggcgacagcggcgtggccatcctgtgcgagaaggccaagaacccccagtgcaacctgcagaagctgggcctggtgaacagcggcctgaccagcgtgtgctgcagcgccctgagcagcgtgctgagcaccaaccagaacctgacccacctgtacctgagaggcaacaccctgggcgacaagggcatcaagctgctgtgcgagggcctgctgcaccccgactgcaagctgcaggtgctggagctggacaactgcaacctgaccagccactgctgctgggacctgagcaccctgctgaccagcagccagagcctgagaaagctgagcctgggcaacaacgacctgggcgacctgggcgtgatgatgttctgcgaggtgctgaagcagcagagctgcctgctgcagaacctgggcctgagcgagatgtacttcaactacgagaccaagagcgccctggagaccctgcaggaggagaagcccgagctgaccgtggtgttcgagcccagctggtag

SEQ ID NO: 340933 - protein, 922 aa, Artificial Sequence
  derived and/or modified sequence
MKMASTRCKLARYLEDLEDVDLKKFKMHLEDYPPQKGCIPLPRGQTEKADHVDLATLMIDFNGEEKAWAMAVWIFAAINRRDLYEKAKRDEPKWGSDNARVSNPTVICQEDSIEEEWMGLLEYLSRISICKMKKDYRKKYRKYVRSRFQCIEDRNARLGESVSLNKRYTRLRLIKEHRSQQEREQELLAIGKTKTCESPVSPIKMELLFDPDDEHSEPVHTVVFQGAAGIGKTILARKMMLDWASGTLYQDRFDYLFYIHCREVSLVTQRSLGDLIMSCCPDPNPPIHKIVRKPSRILFLMDGFDELQGAFDEHIGPLCTDWQKAERGDILLSSLIRKKLLPEASLLITTRPVALEKLQHLLDHPRHVEILGFSEAKRKEYFFKYFSDEAQARAAFSLIQENEVLFTMCFIPLVCWIVCTGLKQQMESGKSLAQTSKTTTAVYVFFLSSLLQPRGGSQEHGLCAHLWGLCSLAADGIWNQKILFEESDLRNHGLQKADVSAFLRMNLFQKEVDCEKFYSFIHMTFQEFFAAMYYLLEEEKEGRTNVPGSRLKLPSRDVTVLLENYGKFEKGYLIFVVRFLFGLVNQERTSYLEKKLSCKISQQIRLELLKWIEVKAKAKKLQIQPSQLELFYCLYEMQEEDFVQRAMDYFPKIEINLSTRMDHMVSSFCIENCHRVESLSLGFLHNMPKEEEEEEKEGRHLDMVQCVLPSSSHAACSHGLGRCGLSHECCFDISLVLSSNQKLVELDLSDNALGDFGIRLLCVGLKHLLCNLKKLWLVNSGLTSVCCSALSSVLSTNQNLTHLYLRGNTLGDKGIKLLCEGLLHPDCKLQVLELDNCNLTSHCCWDLSTLLTSSQSLRKLSLGNNDLGDLGVMMFCEVLKQQSCLLQNLGLSEMYFNYETKSALETLQEEKPELTVVFEPSW

SEQ ID NO: 340934 - DNA, 2769 bp, Artificial Sequence
  derived and/or modified sequence
atgaaaatggcaagtacgagatgcaagttagccagatacctcgaggatcttgaggacgttgatctaaagaagttcaagatgcacctggaggattacccgcctcagaaagggtgtatccctcttcccagaggccagaccgaaaaggcggaccacgtggatttagcaactctcatgatcgattttaatggagaggagaaggcgtgggcaatggcggtttggatctttgctgctattaacagaagagacctgtacgagaaagctaaaagagatgagcccaagtggggttctgataatgcccgcgtgagcaatcctacagttatatgccaggaagactcgattgaggaggaatggatgggcctgctggaatacctgagtcgcataagtatctgtaagatgaaaaaagactacaggaagaaatatcggaagtatgtgcgctctaggttccaatgcatcgaagatcgtaacgctcggctgggcgagtctgtctctcttaataaacgctatactagattacggcttataaaagagcataggtcacagcaggagagggagcaggagctactggccatcggaaagactaagacatgtgagagcccggtgtcccctatcaagatggagcttcttttcgaccccgatgacgagcattccgaacccgtccacactgtggtcttccagggcgccgccgggattgggaagacaattctggccagaaagatgatgctggactgggcttctggtacattgtaccaagacagattcgactacctgttctatattcactgccgtgaggtttcactggtgacacaacgaagtctgggtgatttaatcatgagctgctgtcctgaccccaacccccccattcataagattgtgaggaagccatccagaattctattcctaatggatgggtttgatgaactgcaaggagccttcgatgaacacatcgggccactttgtaccgattggcaaaaagccgagcgaggagacatactcctgagcagccttattagaaaaaagctactacctgaggcaagcttgttaatcaccacacggcccgtggctctagaaaaactgcaacatctactggatcatcccaggcacgtggaaatccttggattctcagaagccaagcgtaaggaatacttttttaagtatttttcggacgaggcccaggcccgggcagcattttccctcatccaggaaaacgaagtgctgtttaccatgtgctttatccccctcgtctgctggatcgtgtgtaccgggttgaagcagcagatggagagtggaaagtccctcgcccagacgagcaaaactacgacagcagtatatgtgttcttcctctcatctctcctgcaaccgcgcggtgggtctcaggaacacggcctgtgtgctcatctgtggggactgtgtagcctggcagcagacggtatttggaatcagaagatcctcttcgaggaaagtgaccttcggaatcatggcctgcagaaggctgacgtgtcagcgttcttgcgaatgaatctgttccagaaggaagtagattgtgagaagttctacagtttcatacatatgacattccaagaattcttcgccgctatgtattatctgctggaggaagagaaagagggccggactaacgtaccaggttccaggctcaagctaccgtccagagacgttaccgtgctgctggagaattatggaaagttcgagaaagggtacctgatttttgtggtgcggttcttgtttgggctggtcaaccaggagcgcacaagctacctggagaagaaactgagctgcaaaattagccagcagatccgccttgagttgctcaaatggatagaggtcaaagctaaggctaaaaagctgcagatccaaccatcccagctagaactgttttattgtctgtacgagatgcaggaagaggattttgtccagcgggccatggattacttccccaagatagaaatcaatctgagcacacgcatggatcatatggtctcctcattttgcattgagaactgtcatcgggttgagtctctttcactcggcttcctgcacaacatgcctaaggaggaagaggaggaagagaaagaagggcgacacctggacatggtccagtgcgtgctgccgtcatcatctcatgctgcgtgctcccacggtctggggaggtgcggcctatcgcacgagtgttgcttcgacatatctctggtgctgtcttccaatcagaaattagtggagttggacctctcagataatgccctcggcgattttggaattcggctgttgtgcgtgggactgaaacatctcctctgcaacctgaaaaagctttggctggtcaattctggattgacttctgtgtgctgctcggccttatcctctgtgcttagtactaatcagaacctgactcacttgtacctccgaggaaacacactcggagacaaaggaattaagttgctctgcgaaggattgctgcacccggattgtaagctgcaggttctggaacttgataactgcaatctgactagccactgctgttgggatctcagtacactgttgacatccagccagtccctgcgcaagctttcactgggaaataacgatttgggagatctcggcgtgatgatgttctgcgaggtgctgaagcagcagtcctgtttgctgcagaacttgggattatctgagatgtattttaactatgaaacaaaaagcgctttggagaccttgcaggaagagaagccggagttgacagtggtgttcgagccatcctggtag

SEQ ID NO: 340935 - DNA, 2769 bp, Artificial Sequence
  derived and/or modified sequence
atgaagatggccagcacccgctgcaagctggcccgctacctggaggacctggaggatgtggacctgaagaagttcaagatgcacctggaggactacccaccccagaagggctgcatccccctgccccggggccagacagagaaggctgaccacgtggacctggccaccctgatgattgacttcaacggggaggagaaggcctgggccatggctgtgtggatctttgctgccatcaacagaagagacctgtatgagaaggccaagagagatgagcccaagtggggcagtgacaatgcccgggtgagcaaccccaccgtcatctgccaggaggacagcattgaggaggagtggatgggcctgctggagtacctgagccgcatcagcatctgcaagatgaagaaggactacaggaagaagtacagaaaatatgtgcgcagccgcttccagtgcatcgaggacagaaatgcccggctgggggagagcgtgtccctgaacaagcgctacacccggctgcggctcatcaaggagcacaggagccagcaggagcgggagcaggagctgctggccatcggcaagaccaagacctgtgagagccctgtgagccccatcaagatggagctgctgtttgatcctgatgatgagcacagcgagcctgtgcacacagtggtgttccagggcgccgccggcatcggcaagaccatcctggccaggaagatgatgctggactgggccagcggcaccctgtaccaggacagatttgactacctgttctacatccactgccgggaggtgtccctggtgacccagaggagcctgggggacctgatcatgagctgctgcccagaccccaacccccccatccacaagatcgtgaggaagcccagccgcatcctcttcctgatggatggctttgatgagctgcagggcgcctttgatgagcacatcggccccctgtgcacagactggcagaaggccgagcggggggacatcctgctgagcagcctcatcaggaagaagctgctgcctgaggccagcctgctgatcaccaccaggcctgtggccctggagaagctgcagcacctgctggaccaccccaggcatgtggagatcctgggcttcagcgaggccaagaggaaggagtacttcttcaagtacttcagtgatgaggcccaggcccgggccgccttcagcctcatccaggagaatgaggtgctcttcaccatgtgcttcatccccctggtgtgctggatcgtgtgcaccggcctgaagcagcagatggagagcggcaagagcctggcccagaccagcaagaccaccacagctgtgtatgtgttcttcctgagcagcctgctgcagccccggggcggcagccaggagcacggcctgtgtgcccacctgtggggcctgtgcagcctggccgcagatggcatctggaaccagaagatcctgtttgaggagagtgacctgaggaaccacggcctgcagaaggcagatgtgtctgccttcctgaggatgaacctcttccagaaggaggtggactgtgagaagttctacagcttcatccacatgaccttccaggagttctttgctgccatgtactacctgctggaggaggagaaggagggccgcaccaacgtgcccggcagccggctgaagctgcccagcagagatgtgacagtgctgctggagaactacggcaagtttgagaagggctacctgatctttgtggtgcgcttcctgtttggcctggtgaaccaggagaggaccagctacctggagaagaagctgagctgcaagatcagccagcagatccggctggagctgctgaagtggattgaggtgaaggccaaggccaagaagctgcagatccagcccagccagctggagctgttctactgcctgtatgagatgcaggaggaggactttgtgcagagggccatggactacttccccaagattgagatcaacctgagcaccaggatggaccacatggtgtcctccttctgcatcgagaactgccaccgggtggagagcctgagcctgggcttcctgcacaacatgcccaaggaggaggaggaggaggagaaggagggccgccacctggacatggtgcagtgtgtgctgcccagcagcagccacgccgcctgcagccacggcctgggccgctgtggcctgagccatgagtgctgctttgacatcagcctggtgctgagcagcaaccagaagctggtggagctggacctgagtgacaatgccctgggggactttggcatccggctgctgtgtgtgggcctgaagcacctgctgtgcaacctgaagaagctgtggctggtgaacagcggcctgacctctgtgtgctgcagcgccctgagctctgtgctgagcaccaaccagaacctgacccacctgtacctgcggggcaacaccctgggggacaagggcatcaagctgctgtgtgagggcctgctgcacccagactgcaagctgcaggtgctggagctggacaactgcaacctgaccagccactgctgctgggacctgagcaccctgctgaccagcagccagagcctgaggaagctgagcctgggcaacaatgacctgggggacctgggcgtgatgatgttctgtgaggtgctgaagcagcagagctgcctgctgcagaacctgggcctgtctgagatgtacttcaactatgagaccaagagcgccctggagaccctgcaggaggagaagccagagctgactgtggtgtttgagcccagctggtag

SEQ ID NO: 340936 - DNA, 2769 bp, Artificial Sequence
  derived and/or modified sequence
atgaagatggccagcacccggtgcaagctggcccggtacctggaggatctggaggacgtggatttgaaaaagttcaagatgcatcttgaagactatccaccccaaaaggggtgtatacccctgccacgtgggcagaccgagaaggccgaccatgtagacttagctacactcatgattgactttaatggcgaggagaaggcttgggcaatggcagtttggatctttgctgccatcaacagacgggacctctacgagaaagcaaagcgtgatgagcccaagtggggctccgacaacgctagggttagtaacccgacggttatctgtcaagaggactccattgaggaagagtggatgggtcttctggagtacctgtcccgtatatccatatgtaagatgaagaaggattatcgcaaaaaatatcgcaaatatgtgcgcagtcgattccaatgcatcgaggatcgtaatgctaggttgggcgagtccgtctccctcaacaagaggtatacgcgattgaggcttattaaggagcaccggtcgcaacaggagcgcgagcaggaattgctggctatcggcaagacaaagacgtgtgagtcccctgtgtcccctatcaagatggaactcttgttcgatcctgatgacgagcactccgaacccgtgcacacggtggtgtttcagggcgcagctggaattggtaaaacaatcctagcacgtaaaatgatgctggactgggcgtcaggcacactttaccaggaccgatttgattaccttttctacattcattgtcgagaggtctcacttgtcacacagcggtctctcggagacctcatcatgtcttgttgtccggaccccaatcctcctattcacaagatcgttagaaaacctagccgcatactatttctaatggacggatttgatgagttacagggcgcttttgatgaacacatcggccccctctgtacggactggcagaaagcagaacgaggggatattcttctgagctctctgattaggaagaaactccttcccgaggcttctttattgataactaccagacctgtggctctagagaagctccagcaccttttggaccaccccagacacgtggagatactgggtttctccgaggccaagcgaaaagaatatttctttaaatacttttccgatgaagcgcaggccagggctgcgttctctttaatacaggagaacgaagtcctgttcacaatgtgttttattccacttgtatgttggatcgtttgtaccgggcttaagcagcagatggaatccggcaaatctcttgcacagacatccaaaactacaaccgccgtgtatgtctttttcttgagcagtctgttgcagcctcgtggcggatcacaggaacacggcctatgcgcacatctttggggcctgtgcagtttagcggccgacggaatttggaatcagaaaatacttttcgaggagagcgacctcaggaaccacggactccagaaggccgatgtatctgcttttctaagaatgaacctgtttcagaaagaggtggactgcgagaagttttactcctttatccatatgacattccaggagttctttgctgccatgtattacttgctggaagaggagaaggagggccgcaccaacgtgcctggatcccggctgaagcttccctcacgcgacgtgaccgtactgttggagaattacgggaagtttgagaagggctatttaatcttcgtagtgaggtttctgttcggcctcgtaaaccaagaaaggacgtcctatttggagaagaaactgagctgtaaaatcagccaacagataaggctggagctgctgaaatggattgaggtgaaggctaaggccaagaagctgcagatccagccctcccagctcgagctgttctattgcctgtacgagatgcaggaagaggatttcgttcagcgcgctatggactattttccgaagatagagatcaacctcagtactagaatggaccatatggtcagctcattttgcatcgagaactgccaccgcgtggaatcactgagtcttgggttcctgcacaacatgccaaaggaggaagaggaggaggaaaaggaggggaggcacctggacatggttcagtgtgtgctcccctcatcctcccatgccgcctgttcacatggactgggcaggtgcggattgagtcacgaatgctgtttcgacatctctctggttctgtcttccaaccagaagttggtggaattggatttatccgataacgctctgggagatttcggaatccgtctattgtgcgtcggcttgaaacatctgctgtgcaatctcaaaaagctatggcttgtgaattccggcctgaccagcgtgtgctgttcagcccttagctccgtcctgtctacgaatcagaatctgacccacctgtacctcaggggtaatacactgggggataaggggatcaaactgctgtgcgaagggctgctccacccagactgtaagctgcaagtattggagctcgataactgcaacttgacttctcactgctgctgggacctgtccacacttctgaccagctcccagagcctaaggaagctaagcctgggaaataatgatctcggggatctgggcgtaatgatgttctgcgaggtgctcaagcagcaaagctgtctgttgcagaatcttgggctttctgaaatgtattttaactatgaaactaagagcgctctggagactctgcaggaggagaaacctgaactcactgtcgtgttcgaaccctcctggtag

SEQ ID NO: 340937 - DNA, 3828 bp, Artificial Sequence
  derived and/or modified sequence
gtagatgaggaaactgaagttgaggaatagtgaagagtttgtccaatgtcatagccccgtaatcaacgggacaaaaattttcttgctgatgggtcaagatggcatcgtgaagtggttgttcaccgtaaactgtaatacaatcctgtttatggatttgtttgcatatttttccctccatagggaaacctttcttccatggctcaggacacactcctggatcgagccaacaggagaactttctggtaagcatttggctaacttttttttttttgagatggagtcttgctgtgtcgcctaggctggagtgcagtggcgtgatcttggctcactgcagcctccacttcccgggttcaatcaattctcctacctcaacttcctgagtagctgggattacaggcgcccgccaccacacccggctcatttttgtacttttagtagagacacagttttgccatgttggccaggctggtcttgaattcctcagctcaggtgatctgcctgccttggcctctcaaagtgctgggattacaggcgtgagccactgtgcccggccttggctaacttttcaaaattaaagattttgacttgttacagtcatgtgacatttttttctttctgtttgctgagtttttgataatttatatctctcaaagtggagactttaaaaaagactcatccgtgtgccgtgttcactgcctggtatcttagtgtggaccgaagcctaaggaccctgaaaacagctgcagatgaagatggcaagcacccgctgcaagctggccaggtacctggaggacctggaggatgtggacttgaagaaatttaagatgcacttagaggactatcctccccagaagggctgcatccccctcccgaggggtcagacagagaaggcagaccatgtggatctagccacgctaatgatcgacttcaatggggaggagaaggcgtgggccatggccgtgtggatcttcgctgcgatcaacaggagagacctttatgagaaagcaaaaagagatgagccgaagtggggttcagataatgcacgtgtttcgaatcccactgtgatatgccaggaagacagcattgaagaggagtggatgggtttactggagtacctttcgagaatctctatttgtaaaatgaagaaagattaccgtaagaagtacagaaagtacgtgagaagcagattccagtgcattgaagacaggaatgcccgtctgggtgagagtgtgagcctcaacaaacgctacacacgactgcgtctcatcaaggagcaccggagccagcaggagagggagcaggagcttctggccatcggcaagaccaagacgtgtgagagccccgtgagtcccattaagatggagttgctgtttgaccccgatgatgagcattctgagcctgtgcacaccgtggtgttccagggggcggcagggattgggaaaacaatcctggccaggaagatgatgttggactgggcgtcggggacactctaccaagacaggtttgactatctgttctatatccactgtcgagaggtgagccttgtgacacagaggagcctgggggacctgatcatgagctgctgccccgacccaaacccacccatccacaagatcgtgagaaaaccctccagaatcctcttcctcatggacggcttcgatgagctgcaaggtgcctttgacgagcacataggaccgctctgcactgactggcagaaggccgagcggggagacattctcctgagcagcctcatcagaaagaagctgcttcccgaggcctctctgctcatcaccacgagacctgtggccctggagaaactgcagcacttgctggaccatcctcggcatgtggagatcctgggtttctccgaggccaaaaggaaagagtacttcttcaagtacttctctgatgaggcccaagccagggcagccttcagtctgattcaggagaacgaggtcctcttcaccatgtgcttcatccccctggtctgctggatcgtgtgcactggactgaaacagcagatggagagtggcaagagccttgcccagacatccaagaccaccaccgcggtgtacgtcttcttcctttccagtttgctgcagccccggggagggagccaggagcacggcctctgcgcccacctctgggggctctgctctttggctgcagatggaatctggaaccagaaaatcctgtttgaggagtccgacctcaggaatcatggactgcagaaggcggatgtgtctgctttcctgaggatgaacctgttccaaaaggaagtggactgcgagaagttctacagcttcatccacatgactttccaggagttctttgccgccatgtactacctgctggaagaggaaaaggaaggaaggacgaacgttccagggagtcgtttgaagcttcccagccgagacgtgacagtccttctggaaaactatggcaaattcgaaaaggggtatttgatttttgttgtacgtttcctctttggcctggtaaaccaggagaggacctcctacttggagaagaaattaagttgcaagatctctcagcaaatcaggctggagctgctgaaatggattgaagtgaaagccaaagctaaaaagctgcagatccagcccagccagctggaattgttctactgtttgtacgagatgcaggaggaggacttcgtgcaaagggccatggactatttccccaagattgagatcaatctctccaccagaatggaccacatggtttcttccttttgcattgagaactgtcatcgggtggagtcactgtccctggggtttctccataacatgcccaaggaggaagaggaggaggaaaaggaaggccgacaccttgatatggtgcagtgtgtcctcccaagctcctctcatgctgcctgttctcatgggttggggcgctgtggcctctcgcatgagtgctgcttcgacatctccttggtcctcagcagcaaccagaagctggtggagctggacctgagtgacaacgccctcggtgacttcggaatcagacttctgtgtgtgggactgaagcacctgttgtgcaatctgaagaagctctggttggtgaattctggccttacgtcagtctgttgttcagctttgtcctcggtactcagcactaatcagaatctcacgcacctttacctgcgaggcaacactctcggagacaaggggatcaaactactctgtgagggactcttgcaccccgactgcaagcttcaggtgttggaattagacaactgcaacctcacgtcacactgctgctgggatctttccacacttctgacctccagccagagcctgcgaaagctgagcctgggcaacaatgacctgggcgacctgggggtcatgatgttctgtgaagtgctgaaacagcagagctgcctcctgcagaacctggggttgtctgaaatgtatttcaattatgagacaaaaagtgcgttagaaacacttcaagaagaaaagcctgagctgaccgtcgtctttgagccttcttggtaggagtggaaacggggctgccagacgccagtgttctccggtccctccagctgggggccctcaggtggagagagctgcgatccatccaggccaagaccacagctctgtgatccttccggtggagtgtcggagaagagagcttgccgacgatgccttcctgtgcagagcttgggcatctcctttacgccagggtgaggaagacaccaggacaatgacagcatcgggtgttgttgtcatcacagcgcctcagttagaggatgttcctcttggtgacctcatgtaattagctcattcaataaagcactttctttatttt

SEQ ID NO: 340938 - DNA, 2769 bp, Artificial Sequence
  derived and/or modified sequence
atgaaaatggcctccacaagatgcaagcttgccagatatctggaggacctggaagatgtcgatttaaagaagttcaagatgcacctggaggattacccacctcagaaaggctgcatccctctccctaggggacaaaccgaaaaggccgaccatgttgacctggcaacgttaatgatagactttaacggggaagagaaggcctgggccatggctgtctggatctttgcggcaattaatcgtagggatttgtatgaaaaagctaaaagagacgaaccaaaatggggctcggataacgcacgcgtcagtaaccctactgtaatttgtcaggaagatagtatcgaggaggagtggatgggcctactggaatacctttcacgaatctctatttgcaaaatgaaaaaggactacagaaaaaagtatcggaagtacgtccggagccggttccaatgcatcgaggataggaacgcacggttgggagagtctgtgtccttaaataaacgttatacaaggctgaggctaatcaaggagcataggtcccagcaagaacgcgaacaggaactgctggcaatcggcaagacaaaaacctgcgaaagccccgtgtcccccatcaagatggaactcctgttcgatccagacgacgagcacagtgagccagtgcacactgtggtgtttcaaggagctgctggtatcgggaagaccattttagcacgaaagatgatgcttgactgggcctctggaacgctgtatcaggacaggttcgattacttgttctacatccactgtcgggaggtctctttggtgactcagaggtccctgggagatcttataatgtcttgctgccctgatccaaatcctcccatccacaagatcgttcgtaagccaagcagaatcttgtttctcatggatgggttcgacgaactgcagggcgcttttgatgaacatatcggaccattgtgtacagattggcaaaaagccgagagaggcgatatcctcttgtcgagtctgatacggaagaaactgctgccagaggccagccttctgataacgacacgccctgtcgcattggaaaaactacagcatctcctcgatcaccctagacacgtggagattcttggatttagtgaggccaagagaaaagagtatttttttaagtatttcagcgacgaggctcaggctcgtgcagctttttcactcatccaagagaatgaggtcttgtttacaatgtgtttcatccccctggtgtgctggatcgtctgcacagggttaaaacaacagatggagagcggtaaatccctggcccagacctcaaaaaccacaactgcagtctatgtgttttttcttagctctttacttcagccacggggaggctctcaggagcacggactgtgtgcccatttgtggggtctttgcagcttggccgctgatgggatttggaatcagaaaattctcttcgaggaaagcgatctcaggaatcatggtcttcagaaagccgacgtgtccgcgtttttgaggatgaatctcttccaaaaggaagttgattgtgagaagttttactcttttattcatatgacgttccaagagttcttcgcagctatgtactacctcctggaagaagaaaaggaaggacgtacaaatgtgcctgggtcaaggctgaagctgccgtctagagatgtgacagttctcctggagaattatggaaaatttgagaaaggctatctcatctttgtggttaggttcttgttcggcctcgttaatcaggagagaacctcgtacctggagaagaaactgagctgcaagatcagccaacagatacgattggagctccttaagtggatcgaggtaaaggcaaaggccaaaaagctccagattcaacctagtcagctggaattgttctattgcctgtacgagatgcaggaggaggacttcgtccagagagcaatggattactttcccaaaatcgaaattaacctgtcaacgcggatggaccacatggtatccagcttttgcattgaaaactgtcatcgggttgagtcactgagcctaggtttcctccacaatatgcccaaagaagaagaagaggaggagaaggaaggccgtcacctggacatggtgcagtgtgtgcttcctagtagttctcacgctgcgtgtagtcatggcctggggcgatgtggattatcacacgaatgctgttttgatatctccctggttctctccagtaatcagaaattagtcgaattggacttgtctgataacgcactcggtgatttcggcatcagactcttatgtgtgggcctaaagcacctgttatgtaacctgaagaagctgtggctggtgaatagcggtctcactagcgtgtgttgtagcgccttgtcttccgtgctaagtaccaatcagaatctcacccacctctatctgaggggcaacacactgggggataaaggcatcaaactcctgtgcgaagggctcctgcaccccgattgtaaactgcaggtcctggaattggacaactgcaatctgaccagtcactgctgttgggacctgagcaccctgctgacctcctctcagtccctccggaagttgagtctcgggaacaacgacctcggcgatctgggagtgatgatgttttgtgaagtgctgaagcagcagtcctgtctgttgcagaatctaggactatcagaaatgtatttcaattatgagaccaagagtgctcttgagacgcttcaagaagaaaaaccagagcttaccgtggtgtttgaacctagctggtag

SEQ ID NO: 340939 - DNA, 2769 bp, Artificial Sequence
  derived and/or modified sequence
atgaagatggccagcaccagatgcaagctggccagatacctggaggacctggaggacgtggacctgaagaagttcaagatgcacctggaggactaccccccccagaagggctgcatccccctgcccagaggccagaccgagaaggccgaccacgtggacctggccaccctgatgatcgacttcaacggcgaggagaaggcctgggccatggccgtgtggatcttcgccgccatcaacagaagagacctgtacgagaaggccaagagagacgagcccaagtggggcagcgacaacgccagagtgagcaaccccaccgtgatctgccaggaggacagcatcgaggaggagtggatgggcctgctggagtacctgagcagaatcagcatctgcaagatgaagaaggactacagaaagaagtacagaaagtacgtgagaagcagattccagtgcatcgaggacagaaacgccagactgggcgagagcgtgagcctgaacaagagatacaccagactgagactgatcaaggagcacagaagccagcaggagagagagcaggagctgctggccatcggcaagaccaagacctgcgagagccccgtgagccccatcaagatggagctgctgttcgaccccgacgacgagcacagcgagcccgtgcacaccgtggtgttccagggcgccgccggcatcggcaagaccatcctggccagaaagatgatgctggactgggccagcggcaccctgtaccaggacagattcgactacctgttctacatccactgcagagaggtgagcctggtgacccagagaagcctgggcgacctgatcatgagctgctgccccgaccccaacccccccatccacaagatcgtgagaaagcccagcagaatcctgttcctgatggacggcttcgacgagctgcagggcgccttcgacgagcacatcggccccctgtgcaccgactggcagaaggccgagagaggcgacatcctgctgagcagcctgatcagaaagaagctgctgcccgaggccagcctgctgatcaccaccagacccgtggccctggagaagctgcagcacctgctggaccaccccagacacgtggagatcctgggcttcagcgaggccaagagaaaggagtacttcttcaagtacttcagcgacgaggcccaggccagagccgccttcagcctgatccaggagaacgaggtgctgttcaccatgtgcttcatccccctggtgtgctggatcgtgtgcaccggcctgaagcagcagatggagagcggcaagagcctggcccagaccagcaagaccaccaccgccgtgtacgtgttcttcctgagcagcctgctgcagcccagaggcggcagccaggagcacggcctgtgcgcccacctgtggggcctgtgcagcctggccgccgacggcatctggaaccagaagatcctgttcgaggagagcgacctgagaaaccacggcctgcagaaggccgacgtgagcgccttcctgagaatgaacctgttccagaaggaggtggactgcgagaagttctacagcttcatccacatgaccttccaggagttcttcgccgccatgtactacctgctggaggaggagaaggagggcagaaccaacgtgcccggcagcagactgaagctgcccagcagagacgtgaccgtgctgctggagaactacggcaagttcgagaagggctacctgatcttcgtggtgagattcctgttcggcctggtgaaccaggagagaaccagctacctggagaagaagctgagctgcaagatcagccagcagatcagactggagctgctgaagtggatcgaggtgaaggccaaggccaagaagctgcagatccagcccagccagctggagctgttctactgcctgtacgagatgcaggaggaggacttcgtgcagagagccatggactacttccccaagatcgagatcaacctgagcaccagaatggaccacatggtgagcagcttctgcatcgagaactgccacagagtggagagcctgagcctgggcttcctgcacaacatgcccaaggaggaggaggaggaggagaaggagggcagacacctggacatggtgcagtgcgtgctgcccagcagcagccacgccgcctgcagccacggcctgggcagatgcggcctgagccacgagtgctgcttcgacatcagcctggtgctgagcagcaaccagaagctggtggagctggacctgagcgacaacgccctgggcgacttcggcatcagactgctgtgcgtgggcctgaagcacctgctgtgcaacctgaagaagctgtggctggtgaacagcggcctgaccagcgtgtgctgcagcgccctgagcagcgtgctgagcaccaaccagaacctgacccacctgtacctgagaggcaacaccctgggcgacaagggcatcaagctgctgtgcgagggcctgctgcaccccgactgcaagctgcaggtgctggagctggacaactgcaacctgaccagccactgctgctgggacctgagcaccctgctgaccagcagccagagcctgagaaagctgagcctgggcaacaacgacctgggcgacctgggcgtgatgatgttctgcgaggtgctgaagcagcagagctgcctgctgcagaacctgggcctgagcgagatgtacttcaactacgagaccaagagcgccctggagaccctgcaggaggagaagcccgagctgaccgtggtgttcgagcccagctggtag

SEQ ID NO: 340940 - protein, 133 aa, Artificial Sequence
  derived and/or modified sequence
MVMLEDSNSSTGCGARNCVECLVFLSVLGCQSERKGQMRTQQAGRWLRAGREASSETNPEGTLILDFQSPELPLAARGWQEHEPVVRCNVLPHAFSSWCFGQNFPKWSETQELRNRVTVKRWEIISCENSGES

SEQ ID NO: 340941 - DNA, 402 bp, Artificial Sequence
  derived and/or modified sequence
atggtgatgctggaggacagcaacagcagcaccggctgcggcgccagaaactgcgtggagtgcctggtgttcctgagcgtgctgggctgccagagcgagagaaagggccagatgagaacccagcaggccggcagatggctgagagccggcagagaggccagcagcgagaccaaccccgagggcaccctgatcctggacttccagagccccgagctgcccctggccgccagaggctggcaggagcacgagcccgtggtgagatgcaacgtgctgccccacgccttcagcagctggtgcttcggccagaacttccccaagtggagcgagacccaggagctgagaaacagagtgaccgtgaagagatgggagatcatcagctgcgagaacagcggcgagagctag

SEQ ID NO: 340942 - DNA, 402 bp, Artificial Sequence
  derived and/or modified sequence
atggtaatgcttgaagattctaactcttcgactgggtgtggagcccgcaactgtgtcgaatgtttggtttttctatctgtcctggggtgccaatccgaacgaaaaggtcagatgcgcacccagcaggctgggcggtggctaagagctggaagggaggcttcttctgaaacaaacccagagggcaccctaatcctagatttccagtcaccagagctgccactcgctgcccgggggtggcaggaacatgagcccgtggttcgctgcaatgtcctgcctcacgcattctcctcatggtgtttcgggcagaatttccccaagtggagcgagacacaggaactacgcaatcgggtgactgtcaaacgctgggagattatttcctgtgaaaacagcggcgagtcttag

SEQ ID NO: 340943 - DNA, 402 bp, Artificial Sequence
  derived and/or modified sequence
atggtgatgctggaggacagcaacagcagcacaggctgtggggccaggaactgtgtggagtgcctggtgttcctgtctgtgctgggctgccagagcgagaggaagggccagatgaggacccagcaggccggccgctggctgcgggccggccgggaggccagcagcgagaccaaccctgagggcaccctcatcctggacttccagagccctgagctgcccctggccgcccggggctggcaggagcacgagcctgtggtgcgctgcaatgtgctgccccacgccttcagctcctggtgcttcggccagaacttccccaagtggagcgagacccaggagctgaggaacagagtgacagtgaagcgctgggagatcatcagctgtgagaacagcggggagagctag

SEQ ID NO: 340944 - DNA, 402 bp, Artificial Sequence
  derived and/or modified sequence
atggtgatgctggaggacagcaacagcagcaccggctgcggcgccaggaactgtgtcgagtgcctggttttcctgagcgtgttgggctgccagtcagagaggaaaggacagatgcggacccagcaggctggcaggtggcttcgagcgggcagggaggccagctccgagacaaatcctgaagggacgcttattcttgactttcaaagccccgaacttccgttagccgctagggggtggcaggaacatgagcctgtcgttcgctgtaatgttttgccacacgctttctcctcttggtgctttgggcaaaatttccccaaatggagtgaaacccaagaacttaggaatcgggtgactgtgaaacgctgggagattattagctgtgaaaactcgggggagagctag

SEQ ID NO: 340945 - DNA, 402 bp, Artificial Sequence
  derived and/or modified sequence
atggtgatgctggaggacagcaacagttcaaccggctgcggcgcacgcaattgtgtggaatgcttggtgttcttgtcagtgctgggctgccaaagtgagcggaagggacagatgagaacccaacaggctggtagatggttacgggctggcagagaagcatcttccgagacaaacccagagggaacactgattctggactttcagagcccagaactgccactagctgccagaggttggcaggaacacgagccagtggtcaggtgcaacgtcctccctcacgccttttcatcctggtgcttcggccagaactttcctaaatggagcgaaacacaagaactgagaaatagagtcaccgtgaagagatgggagatcatcagctgcgaaaattccggtgagagctag

SEQ ID NO: 340946 - DNA, 560 bp, Artificial Sequence
  derived and/or modified sequence
aatgccaacactgtcctgtttctacaagagacaatgacaaatatgagcctgaaggaagatgagctgatggcattcccagcttattaccactccttgggggccttatcttacatacatggattcaattcgtagattcagctgggatttactgcctcaagatggttatgttggaggattccaatagttctactggatgtggagccagaaattgtgtggaatgcctggtgtttctttcagttcttggatgccaatctgagaggaaaggccagatgaggacacagcaagcaggcagatggctgcgagctggaagggaagcgtcatcagaaaccaaccctgagggtaccttgatcttggacttccagtctccagaactgcccctggcagctcgtggttggcaagagcacgaacccgtggtcagatgcaacgtcctgcctcatgcattttcctcttggtgctttggtcagaacttccccaagtggagtgaaactcaggagctgagaaaccgagtcactgtgaaaagatgggaaattatctcctgcgaaaactcaggtgagtcttga

SEQ ID NO: 340947 - DNA, 4130 bp, Artificial Sequence
  derived and/or modified sequence
acaagagacaatgacaaatatgagcctgaaggaagatgagctgatggcattcccagcttattaccactccttgggggccttatcttacatacatggattcaattcgtagattcagctgggatttactgcctcaagatggttatgttggaggattccaatagttctactggatgtggagccagaaattgtgtggaatgcctggtgtttctttcagttcttggatgccaatctgagaggaaaggccagatgaggacacagcaagcaggcagatggctgcgagctggaagggaagcgtcatcagaaaccaaccctgagggtaccttgatcttggacttccagtctccagaactgcccctggcagctcgtggttggcaagagcacgaacccgtggtcagatgcaacgtcctgcctcatgcattttcctcttggtgctttggtcagaacttccccaagtggagtgaaactcaggagctgagaaaccgagtcactgtgaaaagatgggaaattatctcctgcgaaaactcaggcaggaaatgactacatttgaaagaaaacttcaagatcaagataagaaaagccaagaagtttcatccacttctaatcaggaaaacgagaatggcagtggttctgaagaagtgtgctacactgtcattaatcacatcccccatcagagatcctccctgagctccaatgatgatggctatgagaacattgactccctcacaaggaaagtgagacagtttagagaaaggtcagagacagaatatgcccttcttaggacttctgttagtaggccttgttcctgcacccatgagcatgattatgaagttgtgtttccacactaaaatcctcaagctgctttatcaccttccagcaatgaagacaatgcagaatagcagactctggcgaagttgttcaccctgagcagtgcatgaaacattcctttctggctaaagtttagaaatattatcttattatatatccttaggcaactctgatatgtggcatctctgtggcttaggtgaaatcatagaaattgacacaatgacctaaaatattctatgtgtttttgcttgtaaagtttgaggacatggaggtgataaaaaaaactttcttaggacaataatgtaaaatgaaaataaatttctaatccccctgactaactgaatggaccctcttctaggccaaagagacctcagatgaacctgaaagactgaattctggccatgataggaagggaggtgagacacaccttgttataccccttcccttttggagtttatgcacaagtgaccaggatgagtcataagactgatgaaatagactgattgtggcaataagagtcccaattccaacctgactctggtgtagatcacacactgtctgagggattccatctatgagactttgtctacataacagagaccttggtttccacaacccctttattttagctaaagcattcttttctactgacttcttaagtctttagacaaagcttaactctttcaaccaattgccaatcagacaaactttgaatctacctatgacctgtaagctctctcctgcttcaagatcttgcctctttaagctgaaccgatgtgcactttccatttaatgatttatgtctttgcttgtaactcctgtctccctaaaatgtataaaagtaaacggtgacctgaccacctcaggcacactttctcaggacctcctgagagtgtatcccaggccatggtaagtcatgttggctcagaatcaacctctttaaatattttacagaatttgggttttggttaccaataagtctccacaaatatatgtccaagaatcttcaattccaagcctgctcaccaaatttcaaatgccaacatctccccatccaattacctatttcatctttgaggtgtaatctactcaataaactgtgtaagaccagtgaccagaccctttgctaacctgacatttacttcaatttttctttttctatgtactggatatttttgcatataaacttgcagtaatagttcaaaaattaatagtttttgacattggcttttctgagaagagaaattgaaagtgtcacaaaataaaaaaagatgaaatgaagcatatataattgtcaattttttcaattttctagccaacagagaatcgaaggattctgttcaaatattagtaaaaattgaaaataaacttgtgcttatattttgtttgcaacacactagttaatttaacctgtgactagttatctctaccgaaggtggatgtgtagtttctggttttaaaattcaagcaaactggaaaataatccatctaattatgctttctttcccaagaagttttttaatgatatgccagcttcctaatttggagacaaaagccttaattgacaatgcattcattatatatttttttgtatagttacagtatacgagttgagtatcccttagatgagatgcttgggaccagaagtgttttggatttcagatttatttttggattttggaatatttccatacatataatgagagagttggaaaatgggattcaagtctaatcataaaattcacttatgtttgatatacaccttatctgaatagcctgaaggtaattttatacaatattttaaataattttatgcctgaaacagagtttgcgcacattggaccatcagaaagcagaagtgtcactatttcaagtcagtgctcaaaaagtttcagatgttaagctggtgatgcagttcatgccagtgatccgagtactttgggaagccaagacaggtggatctcttgagcccaggagtttgaggccagactgcacaacacagtgagacctcgtttctacaaataattaaaaaattagccaggtgtggtggtgcacacctgtagtcccaggtactcaggaggctgaggtagtaggattgtttgagactgggaggttgaggctgaactgagccaggatcttgccaccacattccagcttgggcaacagagtgagaccctgtctcaaaaaaaaaaaaagtttcagattttggagcatttcagatcttcagattagggattttcaacctgtactgaccttttagtcattgacaagcattaatcaataggtggactccagataactcatttgctgtatacacattttgcctctctattcaacgaattcttatgccctcttgtggtgattttaatgtgcggaagggaaacaatagaaattttgcaattctagaaaagtcattctgtcaaaatatgtcagtcctgtagatattagccaattttaggaaaatgacaaaattttttacttttcgtctgcctttgtagctgttttatgatataaataccttatttgtaataaaattaattttaatttgagtaacaatctggaattatcagagaaggggcaagcaataggttaataaacagtattgattggtagaaggaacgttgaaatccaagagcatcaatgtcttctggtggttcaccataagccacagcagatgtcttaatctttccgagatctagtttttcagcaaagcaggatttaagaaatgtaactatcttatgtggttatgaagaacaatagaatcattgctgtataagtgctttttaacctgtaaattttgtgaagcttatcttttatgcatataaatatttgaacattttacattgtttatatttttaatcagttttactcaagtgtgattatatacaagaaaatgtaaccactgtaagggtagagttataagaattttgtcaaatgtattcacccatgtagtcacctccttatgaagagacagaacacgtacatcctcccagaaagttccacagtgctccttttccctgagtttcaccagtcctggcaaccaatgatctgcttcgtataattataactgttctagatatttgtagcaatgtaccctttccatatttattttgtgtgtgtaaggcttcttttagtcattataatatttttgagattcatctatgtttaatgttctatcagtagttgtacatcttacttgtctcagcatatcaccatatagatatactataatttgttaatctaatcactgatggatatgtaggatatttaagtttttgacattatgaataaagtggctataaatg

SEQ ID NO: 340948 - protein, 444 aa, Artificial Sequence
  derived and/or modified sequence
MRMDSQKKIAKINVGKRIALVENIPEGLNYSENAPFHLSLFQGWMNLLNMAKKSVDIVSSHWDLNHTHPSACQGQRLFEKLLQLTSQNIEIKLVSDVTADSKVLEALKLKGAEVTYMNMTAYNKGRLQSSFWIVDKQHVYIGSAGLDWQSLGQMKELGVIFYNCSCLVLDLQRIFALYSSLKFKSRVPQTWSKRLYGVYDNEKKLQLQLNETKSQAFVSNSPKLFCPKNRSFDIDAIYSVIDDAKQYVYIAVMDYLPISSTSTKRTYWPDLDAKIREALVLRSVRVRLLLSFWKETDPLTFNFISSLKAICTEIANCSLKVKFFDLERENACATKEQKNHTFPRLNRNKYMVTDGAAYIGNFDWVGNDFTQNAGTGLVINQADVRNNRSIIKQLKDVFERDWYSPYAKTLQPTKQPNCSSLFKLKPLSNKTATDDTGGKDPRNV

SEQ ID NO: 340949 - DNA, 1335 bp, Artificial Sequence
  derived and/or modified sequence
atgagaatggacagccagaagaagatcgccaagatcaacgtgggcaagagaatcgccctggtggagaacatccccgagggcctgaactacagcgagaacgcccccttccacctgagcctgttccagggctggatgaacctgctgaacatggccaagaagagcgtggacatcgtgagcagccactgggacctgaaccacacccaccccagcgcctgccagggccagagactgttcgagaagctgctgcagctgaccagccagaacatcgagatcaagctggtgagcgacgtgaccgccgacagcaaggtgctggaggccctgaagctgaagggcgccgaggtgacctacatgaacatgaccgcctacaacaagggcagactgcagagcagcttctggatcgtggacaagcagcacgtgtacatcggcagcgccggcctggactggcagagcctgggccagatgaaggagctgggcgtgatcttctacaactgcagctgcctggtgctggacctgcagagaatcttcgccctgtacagcagcctgaagttcaagagcagagtgccccagacctggagcaagagactgtacggcgtgtacgacaacgagaagaagctgcagctgcagctgaacgagaccaagagccaggccttcgtgagcaacagccccaagctgttctgccccaagaacagaagcttcgacatcgacgccatctacagcgtgatcgacgacgccaagcagtacgtgtacatcgccgtgatggactacctgcccatcagcagcaccagcaccaagagaacctactggcccgacctggacgccaagatcagagaggccctggtgctgagaagcgtgagagtgagactgctgctgagcttctggaaggagaccgaccccctgaccttcaacttcatcagcagcctgaaggccatctgcaccgagatcgccaactgcagcctgaaggtgaagttcttcgacctggagagagagaacgcctgcgccaccaaggagcagaagaaccacaccttccccagactgaacagaaacaagtacatggtgaccgacggcgccgcctacatcggcaacttcgactgggtgggcaacgacttcacccagaacgccggcaccggcctggtgatcaaccaggccgacgtgagaaacaacagaagcatcatcaagcagctgaaggacgtgttcgagagagactggtacagcccctacgccaagaccctgcagcccaccaagcagcccaactgcagcagcctgttcaagctgaagcccctgagcaacaagaccgccaccgacgacaccggcggcaaggaccccagaaacgtgtag

SEQ ID NO: 340950 - DNA, 1335 bp, Artificial Sequence
  derived and/or modified sequence
atgcgcatggatagtcaaaaaaaaatagcaaagattaatgtaggcaagcggattgcactggtcgagaacattccagagggtctcaattattcggagaatgccccctttcatctgtccctgtttcaggggtggatgaacctacttaatatggccaagaagtccgtagatatcgtgagcagccactgggaccttaaccatacccatcccagtgcttgtcaagggcaaagactgtttgagaagctgctccaactcacctcccagaatattgaaatcaagctggttagcgatgttaccgcggactccaaggtgctcgaagcccttaaactcaagggtgcggaggtgacatacatgaatatgactgcttacaataaggggcgactgcagagttcattctggatagtcgataaacagcacgtgtacataggaagcgcgggcctcgactggcagtcactagggcagatgaaagagttaggggtcatcttctataactgctcttgcttggtgctggatcttcagcgcatctttgccctctactcttccctgaaattcaagtcgcgggtcccccagacttggtccaaaaggctttatggagtgtacgacaacgagaaaaaactgcagttgcagctgaacgagaccaagagccaagcattcgtgtccaattcccctaagttattttgccctaagaatcgctcattcgatattgatgctatctattcagtgattgacgacgcaaagcagtacgtctacatagccgtgatggactatcttccaatctcgtctacctcaacaaagcggacctattggcctgacctggatgccaagatcagggaggctcttgtgctgaggagcgttagggtacgactgcttctgtcgttctggaaggaaaccgaccccctgaccttcaactttatctcttcattaaaggctatttgtaccgaaatcgccaactgtagcttgaaggtgaaattcttcgacctggagcgagagaacgcttgcgctacaaaggagcagaaaaaccacacattcccacggttaaacagaaacaaatacatggtcaccgacggcgcagcctacatcggaaactttgattgggttgggaatgatttcacacaaaacgctgggacgggtctggttattaaccaggcagatgttaggaacaatcggagcatcatcaaacagcttaaagacgtctttgaaagagattggtattctccatacgccaaaaccctgcaaccgactaagcagcccaactgcagtagcctgttcaaattgaagccattatctaataagaccgctaccgatgataccggcggaaaggacccaaggaacgtgtag

SEQ ID NO: 340951 - DNA, 1335 bp, Artificial Sequence
  derived and/or modified sequence
atgaggatggacagccagaagaagatcgccaagatcaacgtgggcaagagaattgccctggtggagaacatccctgagggcctgaactacagtgaaaatgcccccttccacctgagcctcttccagggctggatgaacctgctgaacatggccaagaagtctgtggacatcgtgagcagccactgggacctgaaccacacccaccccagcgcctgccagggccagaggctgtttgagaagctgctgcagctgaccagccagaacatcgagatcaagctggtgtctgatgtgacagctgacagcaaggtgctggaggccctgaagctgaagggagctgaggtgacctacatgaacatgacagcctacaacaagggccgcctgcagagcagcttctggatcgtggacaagcagcacgtgtacatcggcagcgctggcctggactggcagagcctgggccagatgaaggagctgggcgtcatcttctacaactgcagctgcctggtgctggacctgcagaggatctttgccctgtacagcagcctgaagttcaagagccgggtgccccagacctggagcaagaggctgtatggagtgtatgacaatgagaagaagctgcagctgcagctgaatgagaccaagagccaggcctttgtgagcaacagccccaagctgttctgccccaagaacagaagctttgatattgatgccatctacagcgtgattgatgatgccaagcagtatgtgtacatcgctgtgatggactacctgcccatcagcagcaccagcaccaagaggacctactggccagacctggatgccaagatccgggaggccctggtgctgcggtctgtgcgggtgcggctgctgctgtccttctggaaggagacagaccccctgaccttcaacttcatcagcagcctgaaggccatctgcacagagatcgccaactgcagcctgaaggtgaagttctttgacctggagagagaaaatgcctgtgccaccaaggagcagaagaaccacaccttcccccggctgaacagaaacaagtacatggtgacagatggagctgcctacatcggcaactttgactgggtgggcaatgacttcacccagaatgccggcaccggcctggtgatcaaccaggctgatgtgaggaacaacagaagcatcatcaagcagctgaaggatgtgtttgagcgggactggtacagcccctatgccaagaccctgcagcccaccaagcagcccaactgcagcagcctcttcaagctgaagcccctgagcaacaagacagccacagatgacaccggcggcaaggaccccagaaatgtgtag

SEQ ID NO: 340952 - DNA, 1335 bp, Artificial Sequence
  derived and/or modified sequence
atgcggatggacagccagaagaagatcgccaagatcaacgtgggcaaaaggatcgcactggtggagaacatccccgagggattgaattacagtgagaacgctccatttcatctgtccctgttccagggatggatgaatctgttgaacatggctaagaagtccgtcgacatcgtctccagccattgggatctgaatcatacccatccttctgcctgtcagggtcagagattgttcgaaaaattgcttcagctgaccagccagaacatagagatcaagctcgtgagtgacgttaccgcagacagcaaagttctggaggctttgaagctcaaaggagctgaggtgacctacatgaacatgactgcttataacaagggtagactccagagcagtttttggatagtcgataagcaacacgtttacattggttccgcaggcctggattggcagtctttaggccaaatgaaggagctcggggtcattttctacaattgctcttgcctggtgttagacctgcagagaatatttgccctgtattcgtcgctcaaattcaagagccgtgtgccacaaacctggagtaagaggctctacggggtatacgacaacgagaagaaacttcagttgcagttaaacgagacaaagtcgcaagccttcgtgagcaactcaccaaagctcttttgccctaaaaaccggtcctttgacattgatgcaatatattctgtgatagatgatgcaaaacaatatgtctatatcgctgtgatggattatttgccaatctctagtacaagcacaaagcgcacctactggccagatctggacgcaaagatacgggaggccctcgtgttacgcagcgtacgggtgcggttgcttcttagcttctggaaggagactgaccctctgacctttaatttcatctcatctctgaaggctatctgtacagagatcgctaattgctctctaaaggtgaagttctttgaccttgaaagggagaacgcctgcgcaacgaaggagcagaaaaatcacaccttcccacggctgaataggaataaatatatggtgaccgacggcgcggcatatattggtaactttgattgggtgggcaatgatttcacccagaatgctggaaccggactcgtcatcaatcaggctgacgtccgaaacaacaggagcattatcaagcagctcaaagacgtgttcgagagggactggtactctccatatgccaagaccctgcaacctactaagcagcccaattgcagtagcctctttaagctcaagcctttatccaacaagacagcgaccgacgacacaggaggaaaagacccacgcaacgtttag

SEQ ID NO: 340953 - DNA, 2729 bp, Artificial Sequence
  derived and/or modified sequence
gtaggtgccgcaaggagccggcgagcggagcgcccgctcgggaccgcagccgccgggcgacgtcgccgccgcaccgggcacttctgtctccccggagcagctcctccagctcagtctccagctccacctccggctcccgctgggcctcccgctcgccctccgcgcccggctccccgcgcgcccgtcccgagtccgctgctcgccggcggccgcccggtcatgtcaggatggagatccggcagcacgagtggctctcggcctccccccatgagggcttcgagcagatgaggctcaaaagccgccccaaggagccctccccaagcctgacccgagtgggcgcgaacttctacagcagcgtcaagcagcaggactacagcgccagcgtctggcttcggaggaaagacaagctggagcactcccagcagaagtgcatcgtgatctttgccctggtgtgctgctttgccattctggttgcactgatcttttcagccgtggacatcatgggagaggatgaggatggactctcagaaaaaaattgccaaaataaatgtcggtaagagaattgccctggtggaaaatattcctgaaggccttaactattcagaaaatgcaccatttcacttatcacttttccaaggctggatgaatttactcaacatggccaaaaagtctgttgacatagtgtcttcccattgggatctcaaccacactcatccatcagcatgtcagggtcaacgtctttttgaaaagttgctccagctgacttcgcaaaatattgaaatcaagctagtgagtgatgtaacagctgattcaaaggtattagaagccttgaaattaaagggagccgaggtgacgtacatgaacatgaccgcttacaacaagggccggctgcagtcctccttctggatcgtggacaaacagcacgtgtatatcggcagtgccggtttggactggcaatccctgggacagatgaaagaactcggtgtcatcttctacaactgcagctgcctggtcctagatttacaaaggatatttgctctatatagttcattaaaattcaaaagcagagtgcctcaaacctggtccaaaagactctatggagtctatgacaatgaaaagaaattgcaacttcagttgaatgaaaccaaatctcaagcatttgtatcgaattctccaaaactcttttgccctaaaaacagaagttttgacatagatgccatctacagtgtgatagatgatgccaagcagtatgtgtacatcgctgtcatggactacctgcctatctccagcacaagcaccaaaaggacttactggccagacttggatgcaaaaataagagaagcattagttttacgaagcgttagagttcgactccttttaagcttctggaaggaaactgatccccttacgtttaactttatttcatctcttaaagcgatttgcactgaaatagccaactgcagtttgaaagttaaattttttgatctggaaagagagaatgcttgtgctacaaaagaacaaaagaatcacacctttcctaggttaaatcgcaacaagtacatggtgacagatggagcagcttatattggaaattttgattgggtagggaatgatttcactcagaatgctggcacgggccttgttatcaaccaggcagatgtgaggaacaacagaagcatcattaagcaacttaaagatgtgtttgaaagggactggtattcaccgtatgccaaaaccttacagccaaccaaacagccgaactgctcaagcctgttcaaactcaaacccctctccaacaaaactgccacagacgacacaggcggaaaggatccccggaacgtataacatgatgaagaaactgacaggacagctctgtatttcatatttatacataaaggacttgaggagagaaaaaacactttaatatgtctctttttttagggaaaaagcacacttataaaaaatattctctgaacaacacataatacctatctaacaatatcttagcgtcgtgtacactaaaattaagacttttgtatttgttacctctgacagagaatgtcattctggcgtagaagttagtttttacgtttgcatacaaattttaagactttcattcctgctcctttctagttttagaactttttctgctgacctacccggtcagttgttaggaagcttagcatgaggtgggctctttaacaccattctgagaactgttgatttagagaggaaggtgaggattttgccttggagaagagactgataaaaccaagtgtttattcttgtaaatcgtctccaagacctacacagtcagctaagcatgaatagcttacatctcatgccagccttcaacacccttgaaaaatatccttttctgtcttgctcattttcttcttataccataagttttatttggtatcattttctcttctcacaaaatgttcctattatatagcattttctgtattcacctcaacattacttctaactatgataacatcttttgaaaacatacaaatttttcagaatggatactaagtggaaatagcagtctttcattttcacctttcaactgaatccttttttcccctaccgaattggtatttaaaaaaaatcacagtcagcaatatgtatcctttctctcaagctcagaaaaattatgtagccacctgctaatatccagcaagctatcaagtctgcattttgggaataaagtagtttttcac

SEQ ID NO: 340954 - DNA, 1335 bp, Artificial Sequence
  derived and/or modified sequence
atgagaatggactcccagaagaaaatcgctaaaatcaacgtggggaaacgaatagctctcgtcgaaaacattcccgaagggctcaattatagtgagaatgccccatttcatctgtcgctgttccagggatggatgaatctcctgaacatggcgaaaaagtccgttgatatcgtgagttcacactgggatctgaatcatacccatccttccgcctgccaggggcagagactgttcgaaaaattactgcagttaactagccaaaatatcgaaattaagctcgtctccgacgtgacagcggactctaaggtgttagaggctttaaaactaaaaggtgctgaggtgacatatatgaacatgaccgcttataacaaaggcagattacagtcttctttttggatcgtggataagcagcacgtgtatatcggcagcgccggtctcgattggcagtcactggggcagatgaaggaactgggcgtgatattctataattgttcttgcttggtgctcgatctgcagcggatctttgctctttattcatccctgaagttcaagagccgcgttccacagacctggtccaaaaggttgtacggggtgtacgacaatgagaaaaagctgcagctccagcttaacgagaccaaaagtcaagcttttgtgagtaacagccccaagttattctgcccaaagaacaggagcttcgatattgatgcaatctatagtgtcattgatgatgccaaacagtatgtgtacatcgcagtcatggactaccttcctatctcttccacttccactaaacgcacctattggcctgatctggatgccaagatcagggaagcactggtcctgagatctgttagggtgagactactgctttctttttggaaagagaccgacccactgaccttcaacttcattagcagcctgaaagccatttgcacagagatcgctaattgtagtctcaaggtaaaattcttcgacttggagcgcgagaatgcttgtgccaccaaggagcagaaaaaccacaccttccctcgcctgaatcgaaacaaatatatggtcaccgacggggcagcctacattggtaattttgactgggttggcaacgactttacgcaaaacgccggtacagggttggtgatcaatcaggcggatgtgcgtaataacagatccattattaagcagcttaaggacgtgtttgaacgagattggtattctccttatgccaaaacattgcagccaacaaaacagcccaattgttcttcgctttttaagctgaagcccctgtccaataagacggcaacggacgacactggcggaaaggatccacggaacgtatag

SEQ ID NO: 340955 - DNA, 798 bp, Artificial Sequence
  derived and/or modified sequence
atggtgagaagcggccaggacccctacgccagaaacaagttcaaccaggtggagagcgacaagctgagaatggacagagccatccccgacaccagacacgaccagtgccagagaaagcagtggagagtggacctgcccgccaccagcgtggtgatcaccttccacaacgaggccagaagcgccctgctgagaaccgtggtgagcgtgctgaagaagagccccccccacctgatcaaggagatcatcctggtggacgactacagcaacgaccccgaggacggcgccctgctgggcaagatcgagaaggtgagagtgctgagaaacgacagaagagagggcctgatgagaagcagagtgagaggcgccgacgccgcccaggccaaggtgctgaccttcctggacagccactgcgagtgcaacgagcactggctggagcccctgctggagagagtggccgaggacagaaccagagtggtgagccccatcatcgacgtgatcaacatggacaacttccagtacgtgggcgccagcgccgacctgaagggcggcttcgactggaacctggtgttcaagtgggactacatgacccccgagcagagaagaagcagacagggcaaccccgtggcccccatcaaggacctggtgcccagagtggccgtgtggtggcagcccggcgaccaccccgtgcagccctgcggcaccagagtgcccgaggccgcccccctgcacgtgcccggctggcagtggcactgcctgtgccccaagcacccccccggcagcagaggcctggacggctag

SEQ ID NO: 340956 - DNA, 1086 bp, Artificial Sequence
  derived and/or modified sequence
atgagaagaagaagcagaatgctgctgtgcttcgccttcctgtgggtgctgggcatcgcctactacatgtacagcggcggcggcagcgccctggccggcggcgccggcggcggcgccggcagaaaggaggactggaacgagatcgaccccatcaagaagaaggacctgcaccacagcaacggcgccgaggacggcgccctgctgggcaagatcgagaaggtgagagtgctgagaaacgacagaagagagggcctgatgagaagcagagtgagaggcgccgacgccgcccaggccaaggtgctgaccttcctggacagccactgcgagtgcaacgagcactggctggagcccctgctggagagagtggccgaggacagaaccagagtggtgagccccatcatcgacgtgatcaacatggacaacttccagtacgtgggcgccagcgccgacctgaagggcggcttcgactggaacctggtgttcaagtgggactacatgacccccgagcagagaagaagcagacagggcaaccccgtggcccccatcaagacccccatgatcgccggcggcctgttcgtgatggacaagttctacttcgaggagctgggcaagtacgacatgatgatggacgtgtggggcggcgagaacctggagatcagcttcagagtgtggcagtgcggcggcagcctggagatcatcccctgcagcagagtgggccacgtgttcagaaagcagcacccctacaccttccccggcggcagcggcaccgtgttcgccagaaacaccagaagagccgccgaggtgtggatggacgagtacaagaacttctactacgccgccgtgcccagcgccagaaacgtgccctacggcaacatccagagcagactggagctgagaaagaagctgagctgcaagcccttcaagtggtacctggagaacgtgtaccccgagctgagagtgcccgaccaccaggacatcgccttcggcgccctgcagcagggcaccaactgcctggacaccctgggccacttcgccgacggcgtggtgggcgtgtacgagtgccacgtggccggcctgagacagtag

SEQ ID NO: 340957 - DNA, 798 bp, Artificial Sequence
  derived and/or modified sequence
atggtcagaagcgggcaggatccgtacgcccggaacaagtttaaccaggtggaatctgataaactgcgcatggatcgggccatccctgatacgagacacgatcaatgccagcggaaacagtggcgggttgacttaccagctacttctgtggtcataactttccataacgaggccaggtccgccctattacgtacagtggtcagcgtgttgaaaaagagcccgcctcacttaatcaaagaaatcatcctggtcgatgattattctaatgatcccgaagatggagcacttctgggtaagatcgaaaaggtgagggtactgagaaacgaccgccgggaaggacttatgaggagcagagtcaggggagcagatgccgcccaggctaaggtactaacatttctcgacagccactgtgaatgcaacgaacattggctcgagcctctactggaacgggtggcagaagaccgcacaagagtggtgagccctatcatagacgtgatcaacatggacaacttccagtacgtcggagctagcgcagatctgaagggaggcttcgactggaacttggtctttaaatgggactacatgactcctgaacagcggcgctcgagacagggaaacccagtggccccgatcaaggacctggttcctagagtggcagtatggtggcagccaggggatcatccggtccagccttgtgggactagggttccagaggcggcaccgctgcacgtccctggatggcagtggcactgcctgtgtcctaaacatcccccgggctcaagaggactggacggttag

SEQ ID NO: 340958 - DNA, 1086 bp, Artificial Sequence
  derived and/or modified sequence
atgagaagaagatctaggatgctactgtgctttgcatttctatgggtgctgggaattgcctattatatgtacagcggcggcggctccgccctcgcaggaggcgcgggaggtggagcggggcggaaagaagactggaatgagatcgacccgatcaagaagaaggatctgcaccatagcaatggtgccgaggatggagcccttctgggaaaaatcgagaaagtaagagttctgaggaatgaccggcgggagggcctgatgcgttccagagtgaggggtgcggacgctgcacaggcgaaggtgttgacttttctcgattctcattgcgagtgtaacgagcattggctggagcccctgctggaaagggttgctgaggatcgtacaagagtggtgtcacctatcatcgacgtaataaacatggataactttcagtatgtcggcgcctctgccgatttgaaagggggcttcgactggaatctagtatttaaatgggactacatgacgcctgagcagcgccgctccagacagggcaacccagtagcccccattaaaacgccaatgattgccgggggactctttgtgatggacaagttctatttcgaggagctgggcaagtacgatatgatgatggacgtctggggcggcgagaacctggagatttcctttcgggtgtggcaatgtggcggatccctggagatcattccctgctctagggttggacacgtttttagaaaacaacacccttacaccttccctggcggcagcgggactgtattcgcaagaaataccaggcgagctgccgaagtctggatggacgagtataagaacttttactatgctgccgtcccatctgccaggaatgtaccttacggcaacattcaaagcaggcttgaactgcgcaaaaaattatcctgcaaaccattcaagtggtacctcgagaatgtttatcctgaattgcgggtgcctgaccaccaagacattgcctttggggccctgcaacagggcaccaattgcttagatacactggggcacttcgctgatggagttgttggcgtctatgaatgtcacgttgctggactgaggcagtag

SEQ ID NO: 340959 - DNA, 798 bp, Artificial Sequence
  derived and/or modified sequence
atggtgcgcagcggccaggacccctatgccaggaacaagttcaaccaggtggagagtgacaagctgaggatggaccgggccatcccagacaccaggcatgaccagtgccagaggaagcagtggagggtggacctgcctgccacctctgtggtgatcaccttccacaatgaggcccggagcgccctgctgaggacagtggtgtctgtgctgaagaagagccccccccacctgatcaaggagatcatcctggtggatgactacagcaatgaccctgaagatggagccctgctgggcaagattgagaaggtgcgggtgctgagaaatgaccggcgggagggcctgatgaggagccgggtgagaggagcagatgctgcccaggccaaggtgctgaccttcctggacagccactgtgagtgcaatgagcactggctggagcccctgctggagcgggtggccgaggacaggaccagggtggtgagccccatcattgatgtgatcaacatggacaacttccagtatgtgggcgccagcgctgacctgaagggcggctttgactggaacctggtgttcaagtgggactacatgaccccagagcagaggaggagccggcagggcaaccctgtggcccccatcaaggacctggtgccccgggtggccgtgtggtggcagcccggggaccaccctgtgcagccctgtggcaccagggtgcctgaggccgcccccctgcacgtgcccggctggcagtggcactgcctgtgccccaagcaccccccaggcagccggggcctggatggatag

SEQ ID NO: 340960 - DNA, 1086 bp, Artificial Sequence
  derived and/or modified sequence
atgagaagaagaagcaggatgctgctgtgctttgccttcctgtgggtgctgggcatcgcctactacatgtacagcggcggcggcagcgccctggccggcggggccggcggcggggccggcaggaaagaagactggaatgaaattgaccccatcaagaagaaggacctgcaccacagcaatggagcagaagatggagccctgctgggcaagattgagaaggtgcgggtgctgagaaatgacagaagagagggcctgatgaggagccgggtgagaggagcagatgctgcccaggccaaggtgctgaccttcctggacagccactgtgaatgtaatgagcactggctggagcccctgctggagcgggtggccgaggacaggaccagggtggtgagccccatcattgatgtgatcaacatggacaacttccagtatgtgggcgccagcgctgacctgaagggcggctttgactggaacctggtgttcaagtgggactacatgaccccagagcagaggaggagccggcagggcaaccctgtggcccccatcaagacccccatgattgctgggggcctgtttgtgatggacaagttctactttgaggagctgggcaagtatgacatgatgatggatgtgtggggcggggagaacctggagatctccttccgggtgtggcagtgtggcggcagcctggagatcatcccctgcagccgggtgggccacgtgttcaggaagcagcacccctacaccttccctgggggcagcggcaccgtgtttgccaggaacaccaggagagctgctgaggtgtggatggatgagtacaagaacttctactatgctgctgtgcccagcgccagaaatgtgccctacggcaacatccagagccggctggagctgaggaagaagctgagctgcaagcccttcaagtggtacctggagaatgtgtacccagagctgcgggtgcctgaccaccaggacatcgccttcggggccctgcagcagggcaccaactgcctggacaccctgggccactttgctgatggagtggtgggcgtgtatgaatgtcatgtggccggcctgcggcagtag

SEQ ID NO: 340961 - DNA, 798 bp, Artificial Sequence
  derived and/or modified sequence
atggtgcggagcggccaggacccctacgcccggaacaagttcaaccaggtcgaatccgacaaactgcgaatggaccgagcaattcctgacacccggcatgaccagtgtcagcggaagcagtggcgagtggatctgcctgcaacctccgtggtgatcactttccacaatgaggctcgctcagccttgttacgtaccgtcgtttcagttctgaagaaaagccctcctcatctaattaaggagataatccttgtagatgattacagcaacgaccctgaagacggggccttacttggaaagatcgagaaagtacgcgtgctccggaacgaccgtagggagggactcatgaggagcagagtgcgaggcgcagacgcggcccaggccaaggtgctcacattcctggacagccactgcgagtgtaacgaacactggctagagcctttgctggaaagggtggccgaggatcgtactcgggtagtgagccctattatcgacgtcattaacatggacaactttcagtacgtgggtgcatcagcagacctaaaaggggggtttgactggaacttggtttttaagtgggactacatgacacccgaacagcgtcggtctagacagggcaaccccgttgctccgatcaaggatctcgtgccccgcgtggccgtgtggtggcagccaggggatcacccagtccagccctgcgggacccgagttccagaggccgctcccctccatgtcccgggttggcagtggcactgcctgtgccccaagcacccccctggtagcagagggctggacggctag

SEQ ID NO: 340962 - DNA, 1086 bp, Artificial Sequence
  derived and/or modified sequence
atgcggcggcggagccggatgctgctgtgcttcgccttcctgtgggtcctcggaatcgcatattacatgtactccggtggcggtagtgccttggccgggggagcagggggaggggcaggccgcaaggaggattggaatgagattgaccctattaaaaaaaaggacctgcaccatagcaacggtgccgaggacggtgctctcctcggtaagatcgaaaaggtgagagtgttaaggaatgacaggcgggagggacttatgcgttcccgcgttcggggagccgacgccgctcaggctaaagtattgacatttctggactcccattgtgagtgtaacgaacattggctagaacctctgttagaacgcgttgctgaggacaggacaagagtggttagtccaattattgacgtgatcaacatggataacttccaatatgtcggtgcctccgccgaccttaaaggcggcttcgactggaatttagtttttaagtgggattacatgactcccgagcaaagacgctccagacaaggtaaccccgtggcacccatcaagacgccgatgattgccggggggctctttgttatggataagttttattttgaagagctgggcaaatatgacatgatgatggatgtgtggggaggggaaaatctggaaattagcttcagggtgtggcagtgcggtggctcactggaaattatcccgtgctcgcgcgtgggtcatgtattcaggaaacagcacccctatacattccctggggggtccggaaccgttttcgctagaaataccaggagagcagccgaggtgtggatggatgagtataagaatttctattatgctgccgtgccctcggcgcggaatgtgccgtacggcaacatccagtccaggctggaactgcggaaaaagctgagctgtaaaccgttcaaatggtatctggagaatgtgtaccctgagcttcgggtgcccgatcatcaagacatcgcattcggcgctttgcagcagggcactaactgcctcgatacactcggacacttcgccgatggggtggtgggcgtgtatgagtgccatgtggcggggttaagacaatag

SEQ ID NO: 340963 - DNA, 798 bp, Artificial Sequence
  derived and/or modified sequence
atggtgcgcagcgggcaggacccatatgcacggaacaagttcaatcaggtggagtctgacaaactccgtatggacagagccattccggacactagacacgaccaatgccaacgcaagcagtggagggtcgaccttccggctacctctgtcgtaattactttccacaacgaggccagatctgccctgcttcgcaccgtggtttctgtgctgaagaaatcgccccctcacctaattaaagaaatcatcctggtagacgattactccaatgatccagaagacggagcgttgcttggcaaaatcgagaaagtacgggttctgaggaacgatcgtcgtgaaggactgatgcgatcccgcgttagaggagccgatgccgctcaggccaaggtgctgaccttcctcgattcacattgcgaatgtaacgagcactggttagagccactgctggaacgcgtcgcggaagacagaacacgcgtagtctcacccattatcgacgtgatcaacatggacaacttccaatacgtaggggcttccgccgatctgaagggaggctttgattggaatctcgtctttaagtgggattatatgactcctgagcagcggcgtagtagacagggaaatcccgtggcacccatcaaggacttggtcccaagagtagcagtgtggtggcagcctggtgatcatccggttcaaccctgtggtacaagagtacccgaggcggctccgctgcacgtacccggttggcagtggcattgcctgtgtcctaaacacccgcctgggagcaggggcttggacggttag

SEQ ID NO: 340964 - DNA, 1086 bp, Artificial Sequence
  derived and/or modified sequence
atgaggcggaggagtcgcatgctcctgtgtttcgcctttctctgggtcctgggtatcgcttactacatgtacagtggaggcggttctgcactagccggtggggcaggcggaggagcaggccgtaaggaggattggaatgaaattgatccaatcaagaaaaaggatctccaccacagcaatggggctgaggacggggctttacttggaaaaatcgagaaggtccgagtcctgaggaacgaccgccgagagggactcatgcggtctcgggtgcgcggagcggacgcagcacaggctaaggtactgacttttctggactctcactgcgaatgcaacgagcactggttagagccattgttggagcgtgtggcggaagatcgcactagggtcgtttctcccattatagacgtgatcaatatggataacttccaatacgtcggcgcaagtgcagacctcaaaggagggttcgattggaacctggtgtttaagtgggactacatgacccccgagcagaggcgttcgcgccagggaaaccccgtggctcctattaaaacaccaatgatcgcagggggtttgttcgtgatggataaattctactttgaggagctgggtaagtacgatatgatgatggacgtttggggcggagaaaatctggaaatatcctttagagtttggcagtgtggagggtctctggaaattataccctgttcaagggttggacacgtgtttagaaagcagcacccttatacgtttcccggagggtctgggacggtgtttgctaggaatacgaggagagctgcagaggtgtggatggacgagtacaaaaacttttactacgcagccgtgccctccgctagaaatgtgccctacggaaatattcaaagtcgtctggagctgcggaagaaactcagctgtaagccgtttaaatggtatctcgaaaacgtctacccagagcttcgggtacctgatcaccaggatatagcctttggagcccttcaacagggtacaaactgcttggatactctcggacacttcgctgatggcgtggtgggggtgtatgaatgccacgtggctggactccggcagtag

SEQ ID NO: 340965 - DNA, 1167 bp, Artificial Sequence
  derived and/or modified sequence
actcgcgagcagcggcggccccgccggcggccgagttgggagaatgcggcggcgctcgcggatgctgctctgcttcgccttcctgtgggtgctgggcatcgcctactacatgtactcggggggcggctctgcgctggccgggggcgcgggcggcggcgccggcaggaaggaggactggaatgaaattgaccccattaaaaagaaagaccttcatcacagcaatggagctgaggacggggctctcttggggaaaattgagaaagtgcgagttcttagaaatgatcgacgagaaggcctcatgcgctcacgggttcggggggccgatgctgcccaagccaaggtcctgaccttcctggacagtcactgcgagtgtaatgagcactggctggagcccctcctggaaagggtggcggaggacaggactcgggttgtgtcacccatcatcgatgtcattaatatggacaactttcagtatgtgggggcatctgctgacttgaagggcggttttgattggaacttggtattcaagtgggattacatgacgcctgagcagagaaggtcccggcaggggaacccagtcgcccctataaaaacccccatgattgctggtgggctgtttgtgatggataagttctattttgaagaactggggaagtacgacatgatgatggatgtgtggggaggagagaacctagagatctcgttccgcgtgtggcagtgtggtggcagcctggagatcatcccgtgcagccgtgtgggacacgtgttccggaagcagcacccctacacgttcccgggtggcagtggcactgtctttgcccgaaacacccgccgggcagcagaggtctggatggatgaatacaaaaatttctattatgcagcagtgccttctgctagaaacgttccttatggaaatattcagagcagattggagcttaggaagaaactcagctgcaagcctttcaaatggtaccttgaaaatgtctatccagagttaagggttccagaccatcaggatatagcttttggggccttgcagcagggaactaactgcctcgacactttgggacactttgctgatggtgtggttggagtttatgaatgtcacgtggcaggtttacgtcaatagtccctctctctgctcctccattcgcaagtgtcttcctg

SEQ ID NO: 340966 - protein, 523 aa, Artificial Sequence
  derived and/or modified sequence
MRPRTEGFFPPAGASLPFSTRNKQPAVPAAAARAAEHAPGAGPGRDSGAGTAPPALRRRASPCGLLPPFLPPGSAGGGGGGARRGPPSAAPPPRAGAGGAGPASASRGGSSAARRRGQRAPHSNLPRKDSLRPTMHRGGQPLKKRRGSFKMAELDQLPDESSSAKALVSLKEGSLSNTWNEKYSSLQKTPVWKGRNTSSAVEMPFRNSKRSRLFSDEDDRQINTRSPKRNQRVAMVPQKFTATMSTPDKKASQKIGFRLRNLLKLPKAHKWCIYEWFYSNIDKPLFEGDNDFCVCLKESFPNLKTRKLTRVEWGKIRRLMGKPRRCSSAFFEEERSALKQKRQKIRLLQQRKVADVSQFKDLPDEIPLPLVIGTKVTARLRGVHDGLFTGQIDAVDTLNATYRVTFDRTGLGTHTIPDYEVLSNEPHETMPIAAFGQKQRPSRFFMTPPRLHYTPPLQSPIIDNDPLLGQSPWRSKISGSDTETLGGFPVEFLIQVTRLSKILMIKGTYQEIKGNEHRSRKIG

SEQ ID NO: 340967 - DNA, 1572 bp, Artificial Sequence
  derived and/or modified sequence
atgagacccagaaccgagggcttcttcccccccgccggcgccagcctgcccttcagcaccagaaacaagcagcccgccgtgcccgccgccgccgccagagccgccgagcacgcccccggcgccggccccggcagagacagcggcgccggcaccgccccccccgccctgagaagaagagccagcccctgcggcctgctgccccccttcctgccccccggcagcgccggcggcggcggcggcggcgccagaagaggcccccccagcgccgcccccccccccagagccggcgccggcggcgccggccccgccagcgccagcagaggcggcagcagcgccgccagaagaagaggccagagagccccccacagcaacctgcccagaaaggacagcctgagacccaccatgcacagaggcggccagcccctgaagaagagaagaggcagcttcaagatggccgagctggaccagctgcccgacgagagcagcagcgccaaggccctggtgagcctgaaggagggcagcctgagcaacacctggaacgagaagtacagcagcctgcagaagacccccgtgtggaagggcagaaacaccagcagcgccgtggagatgcccttcagaaacagcaagagaagcagactgttcagcgacgaggacgacagacagatcaacaccagaagccccaagagaaaccagagagtggccatggtgccccagaagttcaccgccaccatgagcacccccgacaagaaggccagccagaagatcggcttcagactgagaaacctgctgaagctgcccaaggcccacaagtggtgcatctacgagtggttctacagcaacatcgacaagcccctgttcgagggcgacaacgacttctgcgtgtgcctgaaggagagcttccccaacctgaagaccagaaagctgaccagagtggagtggggcaagatcagaagactgatgggcaagcccagaagatgcagcagcgccttcttcgaggaggagagaagcgccctgaagcagaagagacagaagatcagactgctgcagcagagaaaggtggccgacgtgagccagttcaaggacctgcccgacgagatccccctgcccctggtgatcggcaccaaggtgaccgccagactgagaggcgtgcacgacggcctgttcaccggccagatcgacgccgtggacaccctgaacgccacctacagagtgaccttcgacagaaccggcctgggcacccacaccatccccgactacgaggtgctgagcaacgagccccacgagaccatgcccatcgccgccttcggccagaagcagagacccagcagattcttcatgaccccccccagactgcactacaccccccccctgcagagccccatcatcgacaacgaccccctgctgggccagagcccctggagaagcaagatcagcggcagcgacaccgagaccctgggcggcttccccgtggagttcctgatccaggtgaccagactgagcaagatcctgatgatcaagggcacctaccaggagatcaagggcaacgagcacagaagcagaaagatcggctag

SEQ ID NO: 340968 - DNA, 1572 bp, Artificial Sequence
  derived and/or modified sequence
atgcggcctcgcacagaagggttttttccccctgctggtgcaagcttgcctttctcgacccgtaacaagcagcccgccgtgcccgcagctgcagcccgagctgccgagcatgctcctggggccggccccggaagagattcaggggccgggaccgcgccacctgcactaaggcgtcgggccagcccatgtggcctccttccacctttcctgccacctggaagtgctgggggcggagggggcggcgccagacggggacctccttctgcagcaccgcctccccgcgcaggtgccgggggcgcagggccggcctccgcctctcgaggcgggtcctctgcggctcggagacgcggtcagcgggccccacactctaatctcccccgtaaggattctcttagacccacaatgcaccgaggagggcagccccttaagaagcggcgcggatcgtttaagatggccgaactggatcagctgccagacgaatctagtagcgctaaagctctggtgagtctgaaggagggatccctcagtaatacttggaacgaaaagtattcttctcttcagaaaactcccgtctggaaagggcgtaatacgagcagtgccgtggaaatgccatttcggaattcgaaaagatctagactcttttccgatgaggacgataggcagattaatactcgcagtccgaagcggaaccagcgggtcgctatggtcccacagaagttcaccgccactatgagcacacctgataaaaaggccagccagaaaatcggctttcggctgagaaacttgttgaaattgcctaaggctcacaagtggtgcatttacgagtggttttatagtaatatcgacaagccactcttcgagggggacaacgacttctgtgtttgcctgaaagagtcattccccaatctgaagacccgaaaactgacgcgtgtcgagtggggcaaaatccgaagactcatgggcaagcctaggagatgcagtagcgctttcttcgaagaggagcgctccgccctgaaacaaaaacgccagaagatccgattgttacaacaacgcaaagtggctgacgtcagtcaattcaaggatctgcctgatgagatcccgctgcctctcgttataggaaccaaggtgacagcaagattaagaggagtacatgatgggctgtttactggccaaatcgacgcagttgacacactcaatgctacctaccgcgtgacattcgatcgaacaggcctcgggacacacactatccctgactacgaagtcctctccaatgagccacatgagaccatgccaatcgcagcgttcggccagaagcaaagaccatcacggttctttatgacccctccccggctccactacaccccaccattgcaaagccccatcattgacaacgacccactgttggggcaaagcccatggcgctccaaaatcagtgggtccgacaccgagaccttgggtggattccccgtggagtttctgatccaagtgacacgactgtccaagatcttaatgattaaaggcacttatcaggaaataaaaggtaatgagcatcgcagccgcaagataggctag

SEQ ID NO: 340969 - DNA, 1572 bp, Artificial Sequence
  derived and/or modified sequence
atgaggcccaggacagagggcttcttccccccagctggggccagcctgcccttcagcaccaggaacaagcagcctgctgtgcctgctgctgctgcccgggctgctgagcacgcccctggagctggccctggccgggacagcggggccggcacagcccccccagccctgcggcggcgggccagcccctgtggcctgctgccccccttcctgcccccaggcagcgctgggggcggcggcggcggggcccggcggggcccccccagcgctgcccccccacccagggctggagctggaggagctggccctgccagcgccagccggggcggcagcagcgctgccaggagaagaggccagagggccccccacagcaacctgcccaggaaggacagcctgcggcccaccatgcaccggggcggccagcccctgaagaagagaagaggcagcttcaagatggccgagctggaccagctgcctgatgagagcagcagcgccaaggccctggtgtccctgaaggagggcagcctgagcaacacctggaatgagaagtacagcagcctgcagaagacccctgtgtggaagggcaggaacaccagcagcgctgtggagatgcccttcaggaacagcaagaggagccgcctcttcagtgatgaagatgaccggcagatcaacaccaggagccccaagaggaaccagagggtggccatggtgccccagaagttcaccgccaccatgagcaccccagacaagaaggccagccagaagattggcttccggctgaggaacctgctgaagctgcccaaggcccacaagtggtgcatctatgagtggttctacagcaacatcgacaagcccctgtttgaaggagacaatgacttctgtgtgtgcctgaaggagagcttccccaacctgaagaccaggaagctgaccagggtggagtggggcaagatccggcggctgatgggcaagccccggcgctgcagcagcgccttctttgaggaggagaggtctgccctgaagcagaagaggcagaagatccggctgctgcagcagaggaaggtggctgatgtgtcccagttcaaggacctgcctgatgagatccccctgcccctggtgattggcaccaaggtgacagcccggctgcggggcgtgcatgatggcctcttcaccggccagattgatgctgtggacaccctgaatgccacctacagagtgacctttgacagaacaggcctgggcacccacaccatcccagactatgaggtgctgagcaatgagccccatgagaccatgcccatcgccgccttcggccagaagcagaggcccagccgcttcttcatgaccccaccccggctgcactacaccccacccctgcagagccccatcatcgacaatgaccccctgctgggccagagcccctggaggagcaagatcagcggcagtgacacagagaccctgggcggcttccctgtggagttcctgatccaggtgacccggctgagcaagatcctgatgatcaagggcacctaccaggagatcaagggaaatgagcacaggagcaggaagattggatag

SEQ ID NO: 340970 - DNA, 1569 bp, Artificial Sequence
  derived and/or modified sequence
atgcgacccagaaccgagggcttctttccccccgccggggcctccctcccgttctccactcggaacaaacagcctgcagttcccgcagctgcagcgcgggccgcggaacatgcgccgggagcggggcccgggcgggactccggagctggtactgctccccccgcgctccggcgccgggcctcgccgtgcggcctccttcctcccttcctcccgcccggctcggccggaggcggcggcggaggggcgaggcgcggccccccttcggcggcacctcctccccgggcaggcgcgggcggagccgggcccgcctcagccagccgcggcgggagcagcgcagcgcggcgccgcgggcagcgagctccgcattcgaacctccctcgcaaagacagtctccgccccacaatgcaccgcggcgggcagcctttgaaaaagcggcgcggctcgttcaagatggcggagctcgaccagttgcctgacgagagctcttcagcaaaagcccttgtcagtttaaaagaaggaagcttatctaacacgtggaatgaaaagtacagttctttacagaaaacacctgtttggaaaggcaggaatacaagctctgctgtggaaatgcctttcagaaattcaaaacgaagtcgacttttttctgatgaagatgataggcaaataaatacaaggtcacctaaaagaaaccagagggttgcaatggttccacagaaatttacagcaacaatgtcaacaccagataagaaagcttcacagaagattggttttcgattacgtaatctgctcaagcttcctaaagcacataaatggtgtatatacgagtggttctattcaaatatagataaaccactttttgaaggtgataatgacttctgtgtatgtctaaaggaatcttttcctaatttgaaaacaagaaagttaacaagagtagaatggggaaaaattcggcggcttatgggaaaaccacggagatgttcttctgcattttttgaggaagagagatcagcattaaaacagaaacggcagaaaataaggctcttacaacaaaggaaagttgcagatgtttcacaattcaaagatctcccagatgaaattcctttgcctctggttattggaacgaaagttacagcacgattacgtggtgttcatgatggtttgttcactggacaaatagatgctgtggatactcttaatgctacttatagagtaacttttgataggacagggcttggaacccataccatccctgactatgaagttctcagtaatgaacctcatgagacaatgccaattgctgcctttggacaaaaacagcggccttctcgattttttatgaccccaccacggttacattatactcctcctctccagtcaccaattatagataatgatcctttattaggacagtcgccgtggagaagtaaaatttctggctctgacactgaaacattaggtggttttccagtagaatttcttatccaagtgaccagattatcaaaaattctcatgattaaaggaacatatcaagaaattaagggaaatgaacacagaagcagaaaaattggt

SEQ ID NO: 340971 - DNA, 1572 bp, Artificial Sequence
  derived and/or modified sequence
atgcggccccggaccgagggcttcttcccccccgccggcgccagcctgccgttcagcacccggaataaacagcccgccgtgccagctgccgcagctagggcggctgagcacgcgcccggtgccggccccggtagagattctggggccggcacagccccgccggcgctccgtcgcagggcctctccctgcgggttgctccctcctttcttgccacctggtagcgcaggtggcggcggcggaggtgcccggagaggaccccccagcgccgctccacccccccgagcgggggctgggggtgccggccccgccagcgccagcagaggtggctccagcgctgctcggaggcggggtcagcgcgctcctcacagcaatttaccaaggaaagatagcctccggccaaccatgcacaggggcggacagcctctgaagaaacgcaggggcagcttcaagatggcggagttagaccagctccctgatgagtcctcatccgctaaggctcttgtcagtctcaaggagggttcactaagcaacacttggaacgagaagtatagcagcttgcaaaaaaccccagtgtggaagggcaggaacacttcctcagcggttgagatgccattcaggaattccaagcgttcaaggttattcagcgacgaagatgatcgacagatcaacacgcgctcacctaaaaggaaccagcgggtcgccatggttccacagaagtttactgcgacaatgtctacacctgataagaaggcgtcacagaaaatcggtttcaggcttcggaatttgcttaaactgccgaaggcacataagtggtgcatatatgaatggttctatagcaacattgataagccactatttgagggtgataatgacttctgtgtgtgtctgaaagaaagtttccccaatctgaagactagaaagttaacgcgggtcgagtggggcaaaatcaggcgactgatggggaagccgcgacggtgcagctctgccttcttcgaggaggagagatctgccttgaagcaaaaaagacagaagattcgcctgctgcagcagcgcaaggtggcagacgtgtctcagttcaaggacctgccagatgaaatccctctgcctcttgtcattggcacgaaggtaacagcccgattgcgcggggtgcatgacggactgtttactgggcagatagacgccgtggatactctgaatgcgacttaccgtgtgacgtttgacagaacagggctgggcacccacaccatacccgattatgaggtgctgagcaatgaacctcatgagacaatgccaatcgctgcatttggacagaaacagcggccgtcgcgcttctttatgacgccaccacgactgcattacacacctccattgcagtccccaatcattgataatgatccactcctgggacaaagcccatggcggagtaagatttctggctccgataccgagaccctaggggggtttccagttgagtttcttatccaggtgacgagactttccaagatcctgatgattaaagggacttaccaggaaattaagggcaacgagcacaggagccggaagatagggtag

SEQ ID NO: 340972 - DNA, 1572 bp, Artificial Sequence
  derived and/or modified sequence
atgcggcctaggaccgagggattcttccctcccgcaggggctagcctacccttttccactcgcaataagcagcccgcagtgccagccgctgccgctcgtgccgctgagcacgcccctggcgctggtcctgggagggacagtggcgcagggactgctccccctgcgctcaggagacgggcatcgccctgcggcttgcttcccccattcctgcctcccggtagcgctggcggaggcggagggggagcaaggcgtggaccacccagcgcagctcctcccccaagagcgggtgcagggggtgcaggcccagcctccgcgtccaggggcggatcatccgccgctcgtcgaagagggcaacgtgctccccactcaaatctgcccaggaaggactctctccggcctacaatgcaccgtgggggacagcccctgaaaaaacggagggggtcttttaaaatggctgagttagaccaacttccggatgaatcatcgtcggccaaagcgttggtgtcactgaaagaaggtagcttgagcaacacttggaacgaaaaatacagcagccttcagaaaactcctgtgtggaaaggacggaataccagttccgccgtggagatgccttttcggaatagtaagaggtccaggttgttctccgacgaggacgatcgacagattaatacacggtcacccaaaaggaatcaaagagttgctatggtaccgcagaagttcacagccaccatgtcaaccccggacaagaaagcctcccagaaaatcggttttaggcttcggaaccttttgaaactgccaaaagcccacaagtggtgtatttatgagtggttctactccaacattgataaacctctgtttgaaggtgacaatgacttctgtgtttgcctaaaggagtcattccctaatctcaagacgcggaaattgaccagggttgagtggggaaagatacgaaggctgatgggtaaacctcggcgatgttcttcagccttctttgaggaagagcgctccgcgctgaaacagaaacgacaaaaaatccgcctcctgcagcagcggaaggtcgcagacgtgagccagttcaaagacctgcctgacgaaattccgctgccattggttatcggaacaaaagtcaccgcccgactgcgaggagtgcatgacggcctgtttactggtcaaattgacgcagtagacactctaaacgctacgtaccgagtgacctttgaccggactggcttgggcacacatacgattcctgattatgaggttttgtccaatgaaccgcatgagacgatgccaatagccgctttcggacagaagcaaagaccgtcaagatttttcatgaccccaccgcgactccattatacccctccccttcagagccctataatagacaatgatccactgctgggacaaagtccatggcgaagtaagatcagtggtagcgacacagaaacactcggagggtttcctgtggaattcctgattcaggtgaccagactttctaaaatcctgatgataaaagggacctaccaggaaatcaaggggaatgagcaccgttctaggaaaattggctag

SEQ ID NO: 340973 - DNA, 760 bp, Artificial Sequence
  derived and/or modified sequence
atgtcgggccccaggcctgtggtgctgagcgggccttcgggagctgggaagagcaccctgctgaagaggctgctccaggagcacagcggcatctttggcttcagcgtgtcccgtgagtccaataccacgaggaacccgaggcccggcgaggagaacggcaaagattactactttgtaaccagggaggtgatgcagcgtgacatagcagccggcgacttcatcgagcatgccgagttctcggggaacctgtatggcacgagcaaggtggcggtgcaggccgtgcaggccatgaaccgcatctgtgtgctggacgtggacctgcagggtgtgcggaacatcaaggccaccgatctgcggcccatctacatctctgtgcagccgccttcactgcacgtgctggagcagcggctgcggcagcgcaacactgaaaccgaggagagcctggtgaagcggctggctgctgcccaggccgacatggagagcgaaatcaagaaagctcaaaggaccggcgcctgaggcttgctgtctgttctcggcaccccgggcccatacaggaccagggcagcagcattgagccacccccttggcaggcgatacggcagctctgtgcccttggccagcatgtggagtggaggagatgctgcccctgtggttggaacatcctggggtgacccccgacccagcctcgctgggctgtcccctgtccctatctctcactctggacccagggctgacatcctaataaaataactgttggatt

SEQ ID NO: 340974 - DNA, 663 bp, Artificial Sequence
  derived and/or modified sequence
atgaaaggctacggtcatacagtgcctctctcagatggcgggaaagctttttgtattatctactccgttatcggcatcccattcacacttctgttcttgactgctgtggtccaacggatcaccgtccatgtgacgaggcggcctgtactgtatttccacattcgctggggattttcaaagcaagtcgtcgctatagtgcatgccgtcttgctgggctttgttaccgtctcatgcttctttttcatccccgcggccgtcttctccgtgttagaagatgactggaactttctggagagtttctacttttgtttcatttctttatctaccattggcttgggtgactacgtccctggtgaaggttataatcagaagtttcgggaactgtacaaaatcgggatcacctgttacctgctcctgggattgatcgcaatgcttgtggttttggaaaccttttgcgagctgcacgagctgaaaaaatttcgcaagatgttctatgtcaaaaaggacaaggatgaagaccaggtccacataatagagcacgaccagttgtccttttctagcatcactgaccaagcagcgggtatgaaggaggatcagaagcagaatgagccatttgtggccactcaaagctctgcctgcgtagacgggccagccaaccactag

SEQ ID NO: 340975 - DNA, 663 bp, Artificial Sequence
  derived and/or modified sequence
atgaagggctacggccacacagtgcccctgagtgatggcggcaaggccttctgcatcatctacagcgtcatcggcatccccttcaccctgctcttcctgacagctgtggtgcagaggatcaccgtgcacgtgacccggcggcctgtgctgtacttccacatccgctggggcttcagcaagcaggtggtggccatcgtgcatgctgtgctgctgggctttgtgacagtgtcctgcttcttcttcatcccagctgctgtgttttctgtgctggaggatgactggaacttcctggagagcttctacttctgcttcatcagcctgagcaccatcggcctgggggactatgtgcctggagagggctacaaccagaagttccgggagctgtacaagattggcatcacctgctacctgctgctgggcctcatcgccatgctggtggtgctggagaccttctgtgagctgcacgagctgaagaagttcaggaagatgttttatgtgaagaaggacaaggatgaggaccaggtgcacatcatcgagcatgaccagctgtccttcagcagcatcacagaccaggccgccggcatgaaggaggaccagaagcagaatgagccctttgtggccacccagagcagcgcctgtgtggatggccctgccaaccactag

SEQ ID NO: 340976 - DNA, 663 bp, Artificial Sequence
  derived and/or modified sequence
atgaagggctacggccacaccgtgcccctgagcgacggcggcaaggctttttgcatcatttactccgtcataggcatcccgtttacattgctcttcttgacagccgtggtgcagcgtatcactgtgcacgtcacccgccgtcctgttctttatttccacatacgatggggcttttctaagcaggtggtggccattgtccatgccgtacttctgggcttcgtaaccgtgtcttgtttctttttcattcctgccgccgtgtttagtgtgttagaagacgattggaattttctggaaagtttttatttctgcttcatttctttatctaccattggtttaggcgactatgtacctggggaggggtacaaccagaaattcagagagctttacaaaatcggcatcacatgttatctcctgctaggactgattgctatgctggtagttctggaaactttctgtgagctgcatgaactcaagaagttcagaaaaatgttctatgttaagaaggataaagacgaggatcaggtccacatcatcgagcacgaccagttgtccttcagcagcatcactgatcaggctgcaggaatgaaggaggaccagaagcaaaatgagccttttgtggccacacagagttccgcatgtgtcgacgggcctgcaaatcattag

SEQ ID NO: 340977 - DNA, 2001 bp, Artificial Sequence
  derived and/or modified sequence
gataaatagcctgtcctgcaacctggcttaaaacagggaaagccggagttaggcaacagagtgcctagctttctcagtcattcaaacacaagcacggaagaagagattgcactgaccagaggaccgccagggtgtgatgctccgtagtcgcagggatgaaggaaaaccatgggcggagcttgtcatggacagctcctaggtggacataaatggaaactcattggttctggggcacggcgggaagagggagacggccctggacggccgcaccaagaatttcacaacccaaacccgactagaaagcctggggctcccaatattacaagtctgttcttgacaaggaagttgggatgacagaactactgtatgaaaactcagaaatgctcagaagtgcagacctttggttctgttttcttcctcatcagataggaattttttttaactacgcacagaatcacacttgcgaagtcttcttttccttcttgttactttatttagaagctgtgaactcaagaagtaggtcccatgttgaatctacatgtgcgcaggtgattcttttagccaagtcatttccacactcatgcccaagtctggagatacacaggtgcgggtttctgacaacatcaagatatgaaaggttatggccacaccgtgcccttgtcagatggaggtaaggccttctgcatcatctactccgtcattggcattcccttcaccctcctgttcctgacggctgtggtccagcgcatcaccgtgcacgtcacccgcaggccggtcctctacttccacatccgctggggcttctccaagcaggtggtggccatcgtccatgccgtgctccttgggtttgtcactgtgtcctgcttcttcttcatcccggccgctgtcttctcagtcctggaggatgactggaacttcctggaatccttttatttttgttttatttccctgagcaccattggcctgggggattatgtgcctggggaaggctacaatcaaaaattcagagagctctataagattgggatcacgtgttacctgctacttggccttattgccatgttggtagttctggaaaccttctgtgaactccatgagctgaaaaaattcagaaaaatgttctatgtgaagaaggacaaggacgaggatcaggtgcacatcatagagcatgaccaactgtccttctcctcgatcacagaccaggcagctggcatgaaagaggaccagaagcaaaatgagccttttgtggccacccagtcatctgcctgcgtggatggccctgcaaaccattgagcgtaggatttgttgcattatgctagagcaccagggtcagggtgcaaggaagaggcttaagtatgttcatttttatcagaatgcaaaagcgaaaattatgtcactttaagaaatagctactgtttgcaatgtcttattaaaaaacaacaaaaaaagacaaatggaacaaagaagctgtgaccccagcaggatgtctaatatgtgaggaaatgagatgtccacctaaaattcatatgtgacaaaattatctcgaccttacataggaggagaatacttgaagcagtatgctgctgtggttagaagcagattttatacttttaactggaaactttggggtttgcatttagatcatttagctgatggctaaatagcaaaatttatatttagaagcaaaaaaaaaaagcatagagatgtgttttataaataggtttatgtgtactggtttgcatgtacccacccaaaatgattatttttgtagaatctaagttaaacttactatttataatgcataggtaaccattaactatgtacatataaagtataaatatgtttatattctgtacatatggtttaggtcaccagatcctagtgtagttctgaaactaagactatagatattttgtttcttttgatttctctttatactaaagaatccagagttgctacaataaaataaggggaataataaacttgagagtgaataaccat

SEQ ID NO: 340978 - DNA, 663 bp, Artificial Sequence
  derived and/or modified sequence
atgaagggatacgggcacacggtgccgctgtctgacggagggaaagcgttctgcatcatttacagcgtgatcggcattccatttacgctactttttctgacagcagtggtgcagcggattaccgtgcacgtcacccgcaggcccgtgctttatttccacatccggtgggggttcagcaagcaggtcgtcgccattgtacatgccgttttactaggttttgttacagtgagctgcttttttttcatacccgctgccgttttctctgttctggaggatgactggaattttttggagtctttctatttctgcttcatcagtctgtccacaataggccttggagattacgtgcctggggaaggctacaaccaaaaattcagggaactctacaagattggaataacgtgctatctgctacttggtctgatcgctatgcttgtggttctcgagaccttctgtgagctccacgagctcaaaaaattccgcaagatgttttatgttaagaaggacaaagacgaggaccaggtgcatattatagaacacgaccagttgagctttagttccataaccgaccaggcggctgggatgaaagaggatcagaagcagaatgaaccttttgtggccacccaatcctctgcatgcgtcgacggcccagccaatcattag

SEQ ID NO: 340979 - DNA, 663 bp, Artificial Sequence
  derived and/or modified sequence
atgaagggctacggccacaccgtgcccctgagcgacggcggcaaggccttctgcatcatctacagcgtgatcggcatccccttcaccctgctgttcctgaccgccgtggtgcagagaatcaccgtgcacgtgaccagaagacccgtgctgtacttccacatcagatggggcttcagcaagcaggtggtggccatcgtgcacgccgtgctgctgggcttcgtgaccgtgagctgcttcttcttcatccccgccgccgtgttcagcgtgctggaggacgactggaacttcctggagagcttctacttctgcttcatcagcctgagcaccatcggcctgggcgactacgtgcccggcgagggctacaaccagaagttcagagagctgtacaagatcggcatcacctgctacctgctgctgggcctgatcgccatgctggtggtgctggagaccttctgcgagctgcacgagctgaagaagttcagaaagatgttctacgtgaagaaggacaaggacgaggaccaggtgcacatcatcgagcacgaccagctgagcttcagcagcatcaccgaccaggccgccggcatgaaggaggaccagaagcagaacgagcccttcgtggccacccagagcagcgcctgcgtggacggccccgccaaccactag

SEQ ID NO: 340980 - protein, 615 aa, Artificial Sequence
  derived and/or modified sequence
MPSRKFADGEVVRGRWPGSSLYYEVEILSHDSTSQLYTVKYKDGTELELKENDIKPLTSFRQRKGGSTSSSPSRRRGSRSRSRSRSPGRPPKSARRSASASHQADIKEARREVEVKLTPLILKPFGNSISRYNGEPEHIERNDAPHKNTQEKFSLSQESSYIATQYSLRPRREEVKLKEIDSKEEKYVAKELAVRTFEVTPIRAKDLEFGGVPGVFLIMFGLPVFLFLLLLMCKQKDPSLLNFPPPLPALYELWETRVFGVYLLWFLIQVLFYLLPIGKVVEGTPLIDGRRLKYRLNGFYAFILTSAVIGTSLFQGVEFHYVYSHFLQFALAATVFCVVLSVYLYMRSLKAPRNDLSPASSGNAVYDFFIGRELNPRIGTFDLKYFCELRPGLIGWVVINLVMLLAEMKIQDRAVPSLAMILVNSFQLLYVVDALWNEEALLTTMDIIHDGFGFMLAFGDLVWVPFIYSFQAFYLVSHPNEVSWPMASLIIVLKLCGYVIFRGANSQKNAFRKNPSDPKLAHLKTIHTSTGKNLLVSGWWGFVRHPNYLGDLIMALAWSLPCGFNHILPYFYIIYFTMLLVHREARDEYHCKKKYGVAWEKYCQRVPYRIFPYIY

SEQ ID NO: 340981 - protein, 128 aa, Artificial Sequence
  derived and/or modified sequence
IGRELNPRIGTFDLKYFCELRPGLIGWVVINLVMLLAEMKIQDRAVPSLAMILVNSFQLLYVVDALWNEEALLTTMDIIHDGFGFMLAFGDLVWVPFIYSFQAFYLVSHPNEVSWPMASLIIVLKREY

SEQ ID NO: 340982 - protein, 107 aa, Artificial Sequence
  derived and/or modified sequence
  misc_feature (1)..(1): Xaa can be any naturally occurring amino acid
XSTSLKMYFYFYIDLKTIHTSTGKNLLVSGWWGFVRHPNYLGDLIMALAWSLPCGFNHILPYFYIIYFTMLLVHREARDEYHCKKKYGVAWEKYCQRVPYRIFPYIY

SEQ ID NO: 340983 - DNA, 1848 bp, Artificial Sequence
  derived and/or modified sequence
atgccaagccggaaattcgccgacggtgaggtagttcgcggcaggtggcccgggtcctccctatactatgaagtagagattttgtcacacgattccacatcgcagctatacaccgttaagtacaaggatgggactgagttggaactgaaagagaacgacatcaaacccctgacatccttcaggcagaggaaaggcggaagcacctctagctctccatcaaggagaagaggaagccgttcgcgaagccggtcccggtccccaggacgaccaccgaaatctgcccggaggtccgccagtgccagccatcaagcagatatcaaggaagcccggcgcgaggtggaggtgaaactgactccactcatcctgaagcctttcggaaattcaatctctagatacaatggagagccagagcatattgaacggaatgatgctcctcacaagaatactcaggagaaattttctctctctcaggaaagtagttacattgcaacccagtactctttgcgacctagacgagaggaagtcaagcttaaggaaattgattctaaagaggagaaatatgttgctaaggagctggcagtgagaactttcgaggtgactccgatccgagccaaggaccttgaattcgggggcgtgcctggcgtgttcctcatcatgttcggcttgccagtatttctgttcctgctgctgctgatgtgcaaacaaaaggatcctagtctactcaatttcccccctccacttcccgcattatacgaactatgggaaacaagagtgtttggagtctatctgctgtggtttcttattcaggtgttgttctatctgttgccgatcggaaaggtcgtcgagggcaccccacttatcgacgggaggaggctgaagtatcgcctcaatggcttttatgcgttcatccttacatccgccgtaattggtacctcactgtttcagggcgtggaatttcactatgtctactcccattttctgcagttcgcgctggcagcgacagtcttttgcgtggtcctttcagtttatctgtatatgagatcgttgaaagcgccgcgcaatgacttgagtccagcttctagtggtaacgctgtctacgactttttcatcggacgagagctgaatccaagaatcggcacatttgaccttaagtatttctgtgagctcaggccagggctgataggctgggtggtgatcaacctggtgatgcttctggctgagatgaagatccaggaccgagcagtgccttccctagcaatgattctagttaactctttccagctgctgtacgtagtcgatgccctgtggaacgaagaagcacttctaacgaccatggacattatccatgatggtttcggattcatgctggccttcggtgatctggtgtgggtgccgttcatttattcttttcaggcattttatctcgtctcccatccaaatgaagtgtcttggccaatggcaagcctcatcatcgtcctcaaactctgtggatatgttatcttcagaggcgccaacagccaaaagaacgcttttagaaaaaatccgtccgaccctaagctggcacacctgaaaaccatccacacttctaccggcaaaaacttactggtgtccggctggtggggcttcgttaggcatcctaactatctgggagatctgattatggcgcttgcatggtccctcccctgtgggtttaaccatattctcccatacttctacatcatttacttcacaatgctgttagtacatcgcgaagcacgagacgagtaccactgcaaaaaaaaatatggcgtcgcatgggagaagtattgtcagcgggtaccctatcgcatcttcccatatatatactag

SEQ ID NO: 340984 - DNA, 1848 bp, Artificial Sequence
  derived and/or modified sequence
atgccctctcggaaatttgcagacggagaagtagtgcgaggaaggtggccggggtcatccctgtactatgaggtggagatcctctctcatgactcaacttcccagctttataccgtaaagtataaagacggaaccgaactagagctgaaagagaacgatataaagcctctgactagctttcggcagcgtaagggcggcagcacctccagttccccctcaaggaggcgcggctccaggtcacgatcaaggtcccgctcccccggaaggcctcctaagagtgcacgtcgtagcgcaagcgcatcacaccaggccgatattaaggaagctagacgagaagttgaggtaaagctgactccactaattctaaaaccttttggcaattccatctcgaggtacaacggtgagcccgagcatattgaaaggaacgacgcaccacataaaaacactcaggagaagttttcactcagtcaagagtcgagctatatcgctacacaatacagcctcaggccccgccgggaggaagtaaagctgaaggaaattgattctaaggaagaaaagtacgtggctaaagaactggcagtccgcactttcgaggtgaccccaatccgagccaaagacctcgagtttggaggcgttcccggcgtgttcctcattatgttcggactgcccgtcttcctctttttattacttctaatgtgtaaacaaaaagaccccagtctgttgaatttcccgccgcctcttcccgcgctatatgagctctgggagactcgagtgtttggcgtttatctcctttggttcctgatccaggtgctgttttacctgctacctattggaaaagtggttgaaggaacacccctgatcgatggtagacggcttaagtatcgattgaatggattctacgctttcattttaacctcggccgtcattggaacgagcctgttccagggtgtcgaattccactatgtttattcccacttccttcagttcgccctggcagccactgtattctgcgtggtgttatccgtgtatctttacatgcgcagccttaaagctcctaggaacgatctgagccctgctagcagcggcaatgccgtgtacgatttcttcattggacgcgaactcaatcctcggataggcacatttgatctgaaatacttctgcgaactccgcccaggcctgatcggctgggtagtgatcaatctagtcatgttgctggctgagatgaaaatccaagaccgtgccgtgccctcactcgctatgatcctggtgaacagctttcagcttctatacgtcgttgatgcattatggaatgaagaagccctcctaaccactatggacattattcacgacggatttggcttcatgctcgcttttggagatctcgtctgggtgccatttatctatagttttcaggccttctacctcgtgtcacacccaaacgaggtgagctggcctatggcatcgctgatcattgttctaaaactctgcggctatgtcatctttcgtggtgcaaactcacagaaaaatgcttttcgaaagaacccttccgatcctaagctggcccatttaaagaccatacatacttcaaccggtaaaaatctgttggtgagcggatggtggggctttgtgcgccacccaaattacctcggggacctgatcatggcattagcctggtcattgccatgtggttttaaccatattctcccatatttttacattatctacttcaccatgcttcttgttcaccgggaggcacgtgacgaatatcactgtaagaaaaagtatggcgtcgcttgggagaaatactgccagcgcgtgccctatcgaattttcccttacatctactag

SEQ ID NO: 340985 - DNA, 3745 bp, Artificial Sequence
  derived and/or modified sequence
gtcgcgcgcgtggatctgccgccgggttgctgtgcgactattctccgggagccgtccgtgtcaccgccggaacctggcgcaggttaattatagaaaatgccaagtaggaaatttgccgatggtgaagtggtaagaggtcgatggcctgggagttcactttattatgaagtagaaattctgagccacgacagcacctcccagctttacactgtgaagtataaagatggaacagagcttgaattgaaagagaatgatattaagcctttaacttcctttaggcaaaggaaaggtggctcaacttccagttccccttccagacgccgagggagtcgatcaaggtcacgctcccgatcccctggtcgaccacctaaaagtgcccgccgatctgcttctgcttcccaccaggccgacattaaggaagcaaggagggaagtggaagttaaattgactccgctgattctgaagccatttggaaatagcatcagcagatataatggggagcctgagcatattgagagaaatgacgcacctcataaaaatacacaggaaaaattcagtttgtcacaagaaagcagttacatagcaacacagtatagccttcgtccaagaagagaagaagtcaaattaaaagaaatagattctaaggaagaaaaatacgttgcaaaagaactggcagtgagaacctttgaagtgacccccatccgggcaaaggacttggagtttggaggagtacctggtgtgtttctcatcatgtttggcctgcctgtgttcctcttcctgttgctgttgatgtgtaaacagaaagatcccagtcttctgaatttccctcctcctttgccagctttgtatgagttatgggaaaccagagtatttggggtctacctcctgtggtttttgattcaagtcctgttctacctactgccaattggaaaggttgtagaaggaacgcctcttattgatggaagaagactcaagtatagattaaatggattctatgcttttatcctgacatctgcagtcatcggaacatctctcttccagggcgtagagtttcattacgtgtacagtcattttcttcagtttgcacttgcggccactgttttttgtgtggtcttgagtgtgtatctctacatgcgctctttgaaagcgccccggaatgacctgtcgcctgccagctctggaaatgctgtctatgatttcttcattggccgtgaattaaaccctcgaattggtacttttgatctcaaatacttttgtgaattgcgccccggattgattggatgggtggttattaacttggtgatgcttttggctgaaatgaaaatacaggaccgcgctgttccatccttggccatgattttagttaatagtttccagcttctctatgtggtggatgctctctggaatgaggaagcgttgttgacgaccatggacatcatccacgatggatttggattcatgctggcttttggagacttggtgtgggttccctttatttacagcttccaagccttttatttagtcagtcatccaaatgaagtgtcttggccaatggcttctctaattattgttctgaaactttgtggttatgtaatcttccgaggtgcaaattctcagaaaaatgcattccggaaaaatcccagtgatccaaagcttgcacatttaaaaaccattcatacttcaacgggaaaaaatcttctagtttctggatggtggggctttgttcgccaccccaattacttgggtgatctcatcatggccttggcgtggtccctcccatgtggttttaaccacattctgccttatttctacataatttatttcaccatgttgcttgtccaccgagaagctcgtgacgagtaccactgtaagaagaaatacggcgtggcttgggaaaagtactgtcagcgtgtgccctaccgtatatttccatacatctactaatgctcttctggcttttctacaaaatactcctgcaattccagctgccatttgcaaaaacaaggaaaaaaatccgaaactttcttttgttgcactgacagggtctgtacttttttttttctttttgagtcaggactatggagccgagtagttgatcttttaatatagccgtgtttacttgtattaacttacagttaacataggaaaaatacaagtaaggatgtgagaatttgcattttaatgggaaattttcaacccttaatctgaaaacagaagacagtcttaatataaatgtactgtgaagaatgctattgatgtttatggtttctgattacttttcaaattttgatgtttttttgccagttggcttttcttaaatgaaaacactgttccatttaaagtacatttatgttttattcagtaagagaatagaattttcatttgtttttctttaaatcctttactaattatataatttgaaagcaaaaagaagggcctatattaaatgctgaaagtgaaaagtgatgacattattagcagacactgcttaaaggagaccatttgtagcagttggcttaacctcaacttctaaaactacattgaaaatgtaaatacatagcttagttttttgtaatatatggtgacttcagatttttttgtacagtattttgaatgtgagatgattgtcaggactaactgtctttttaacaaaacattttcagtattttaaataaaattttgtaaagtaatgtgaattaaaaattttggaacaattagaattcattcactattgtatagaagatgctgttaaaacataggaagggtatttttcttgatccaaagtttgtgaatttggctttgctacctcaattgcaggtgtttgtttgcctttataaactgttgcaaatagaaaaaaaatagaataagtatatatttttggagtaacatcaatatttaaacatttttacacagatcggtgtttgaaaatttgccatttcaggctaatatttttatatatttttgactttttaaaagttcatcagtgtttttgctactgttaagcttatgcagtttatactgtattttttatgtatcctttatatttaccaaacctgactccctgtaaaggagtgctgtcttaaaaacaactgaaggggttaaagtcgtttcttttagtttaatagatgtgcataaggtagctttagcaattaaattctagtgaagttgatatagtctcatttttaattgtcctgtaatggaacagtagcaaattcactaaacttttgtgttcagagttaaattgttctcagtactttcaatgtaggggaatgtaataaacatagtgtgtatgtttgggttttaattacacattttatatatgagccatttagatatgcagtgttaattctatactgcatttgaagtgtatgtaacttagcttatgttaatgcagtcatgaagttggtttgctccagcatccggtagtctttaaacattcttttagtgaaattgtcattgttttatcagtgctaatgtgtgcaagcagtttttttattttgcttttctcctggcatcagaaagtggtggcgttttctgtactggattgcaccaaggaagcttttggggaggaaggaaggacattaaattctttccctggtaatgaaaagagccctttatcaatacagtgctgcaatttctggatatcagctacactttgtttttaagtttgtttttgacatgtttatttggcaaattttataatgaagttttaagttgaaaataaaatgtagcaacattttgatca

SEQ ID NO: 340986 - DNA, 3774 bp, Artificial Sequence
  derived and/or modified sequence
tgtgtttcggtgtgtaacgcataaaacttcttgttccacgctccgcggtgttggggattttctactgcatctcgacagcatctcgggtaacaaccgagcccctcctcgcagcgttaattatagaaaatgccaagtaggaaatttgccgatggtgaagtggtaagaggtcgatggcctgggagttcactttattatgaagtagaaattctgagccacgacagcacctcccagctttacactgtgaagtataaagatggaacagagcttgaattgaaagagaatgatattaagcctttaacttcctttaggcaaaggaaaggtggctcaacttccagttccccttccagacgccgagggagtcgatcaaggtcacgctcccgatcccctggtcgaccacctaaaagtgcccgccgatctgcttctgcttcccaccaggccgacattaaggaagcaaggagggaagtggaagttaaattgactccgctgattctgaagccatttggaaatagcatcagcagatataatggggagcctgagcatattgagagaaatgacgcacctcataaaaatacacaggaaaaattcagtttgtcacaagaaagcagttacatagcaacacagtatagccttcgtccaagaagagaagaagtcaaattaaaagaaatagattctaaggaagaaaaatacgttgcaaaagaactggcagtgagaacctttgaagtgacccccatccgggcaaaggacttggagtttggaggagtacctggtgtgtttctcatcatgtttggcctgcctgtgttcctcttcctgttgctgttgatgtgtaaacagaaagatcccagtcttctgaatttccctcctcctttgccagctttgtatgagttatgggaaaccagagtatttggggtctacctcctgtggtttttgattcaagtcctgttctacctactgccaattggaaaggttgtagaaggaacgcctcttattgatggaagaagactcaagtatagattaaatggattctatgcttttatcctgacatctgcagtcatcggaacatctctcttccagggcgtagagtttcattacgtgtacagtcattttcttcagtttgcacttgcggccactgttttttgtgtggtcttgagtgtgtatctctacatgcgctctttgaaagcgccccggaatgacctgtcgcctgccagctctggaaatgctgtctatgatttcttcattggccgtgaattaaaccctcgaattggtacttttgatctcaaatacttttgtgaattgcgccccggattgattggatgggtggttattaacttggtgatgcttttggctgaaatgaaaatacaggaccgcgctgttccatccttggccatgattttagttaatagtttccagcttctctatgtggtggatgctctctggaatgaggaagcgttgttgacgaccatggacatcatccacgatggatttggattcatgctggcttttggagacttggtgtgggttccctttatttacagcttccaagccttttatttagtcagtcatccaaatgaagtgtcttggccaatggcttctctaattattgttctgaaactttgtggttatgtaatcttccgaggtgcaaattctcagaaaaatgcattccggaaaaatcccagtgatccaaagcttgcacatttaaaaaccattcatacttcaacgggaaaaaatcttctagtttctggatggtggggctttgttcgccaccccaattacttgggtgatctcatcatggccttggcgtggtccctcccatgtggttttaaccacattctgccttatttctacataatttatttcaccatgttgcttgtccaccgagaagctcgtgacgagtaccactgtaagaagaaatacggcgtggcttgggaaaagtactgtcagcgtgtgccctaccgtatatttccatacatctactaatgctcttctggcttttctacaaaatactcctgcaattccagctgccatttgcaaaaacaaggaaaaaaatccgaaactttcttttgttgcactgacagggtctgtacttttttttttctttttgagtcaggactatggagccgagtagttgatcttttaatatagccgtgtttacttgtattaacttacagttaacataggaaaaatacaagtaaggatgtgagaatttgcattttaatgggaaattttcaacccttaatctgaaaacagaagacagtcttaatataaatgtactgtgaagaatgctattgatgtttatggtttctgattacttttcaaattttgatgtttttttgccagttggcttttcttaaatgaaaacactgttccatttaaagtacatttatgttttattcagtaagagaatagaattttcatttgtttttctttaaatcctttactaattatataatttgaaagcaaaaagaagggcctatattaaatgctgaaagtgaaaagtgatgacattattagcagacactgcttaaaggagaccatttgtagcagttggcttaacctcaacttctaaaactacattgaaaatgtaaatacatagcttagttttttgtaatatatggtgacttcagatttttttgtacagtattttgaatgtgagatgattgtcaggactaactgtctttttaacaaaacattttcagtattttaaataaaattttgtaaagtaatgtgaattaaaaattttggaacaattagaattcattcactattgtatagaagatgctgttaaaacataggaagggtatttttcttgatccaaagtttgtgaatttggctttgctacctcaattgcaggtgtttgtttgcctttataaactgttgcaaatagaaaaaaaatagaataagtatatatttttggagtaacatcaatatttaaacatttttacacagatcggtgtttgaaaatttgccatttcaggctaatatttttatatatttttgactttttaaaagttcatcagtgtttttgctactgttaagcttatgcagtttatactgtattttttatgtatcctttatatttaccaaacctgactccctgtaaaggagtgctgtcttaaaaacaactgaaggggttaaagtcgtttcttttagtttaatagatgtgcataaggtagctttagcaattaaattctagtgaagttgatatagtctcatttttaattgtcctgtaatggaacagtagcaaattcactaaacttttgtgttcagagttaaattgttctcagtactttcaatgtaggggaatgtaataaacatagtgtgtatgtttgggttttaattacacattttatatatgagccatttagatatgcagtgttaattctatactgcatttgaagtgtatgtaacttagcttatgttaatgcagtcatgaagttggtttgctccagcatccggtagtctttaaacattcttttagtgaaattgtcattgttttatcagtgctaatgtgtgcaagcagtttttttattttgcttttctcctggcatcagaaagtggtggcgttttctgtactggattgcaccaaggaagcttttggggaggaaggaaggacattaaattctttccctggtaatgaaaagagccctttatcaatacagtgctgcaatttctggatatcagctacactttgtttttaagtttgtttttgacatgtttatttggcaaattttataatgaagttttaagttgaaaataaaatgtagcaacattttgatc

SEQ ID NO: 340987 - DNA, 1848 bp, Artificial Sequence
  derived and/or modified sequence
atgcccagcaggaagtttgctgatggagaggtggtgcggggccgctggccaggcagcagcctgtactatgaggtggagatcctgagccatgacagcaccagccagctgtacacagtgaagtacaaggatggaacagagctggagctgaaggaaaatgacatcaagcccctgaccagcttccggcagaggaagggcggcagcaccagcagcagccccagcagaagaagaggcagccgcagccgcagccgcagccgcagccctggccggccccccaagagcgccaggagaagtgccagcgccagccaccaggccgacatcaaggaggcccggcgggaggtggaggtgaagctgacccccctcatcctgaagccctttggaaacagcatcagccgctacaatggagagcctgagcacattgaaagaaatgatgccccccacaagaacacccaggagaagttcagcctgagccaggagagcagctacatcgccacccagtacagcctgcggccccggcgggaggaggtgaagctgaaggagattgacagcaaggaggagaagtatgtggccaaggagctggccgtgaggacctttgaggtgacccccatccgggccaaggacctggagtttggaggagtgcctggggtcttcctgatcatgtttggcctgcctgtgttcctgttcctgctgctgctgatgtgcaagcagaaggaccccagcctgctgaacttccccccacccctgcctgccctgtatgagctgtgggagaccagggtgtttggagtgtacctgctgtggttcctgatccaggtgctcttctacctgctgcccatcggcaaggtggtggagggcacccccctgattgatggccggcggctgaagtaccgcctgaatggcttctacgccttcatcctgaccagcgctgtgattggcaccagcctcttccagggcgtggagttccactacgtgtacagccacttcctgcagtttgccctggccgccaccgtcttctgtgtggtgctgtctgtgtacctgtacatgaggagcctgaaggcccccagaaatgacctgagccctgccagcagtggaaatgctgtgtatgacttcttcatcggccgggagctgaacccccgcatcggcacctttgacctgaagtacttctgtgagctgcggcccggcctcatcggctgggtggtgatcaacctggtgatgctgctggccgagatgaagatccaggacagagctgtgcccagcctggccatgatcctggtgaacagcttccagctgctgtatgtggtggatgccctgtggaatgaggaggccctgctgaccaccatggacatcatccatgatggcttcggcttcatgctggccttcggggacctggtgtgggtgcccttcatctacagcttccaggccttctacctggtgagccaccccaatgaggtgtcctggcccatggccagcctcatcatcgtgctgaagctgtgtggctacgtgatcttccggggggccaacagccagaagaatgccttcaggaagaaccccagcgaccccaagctggcccacctgaagaccatccacaccagcacaggcaagaacctgctggtgtctggctggtggggctttgtgcgccaccccaactacctgggggacctgatcatggccctggcctggagcctgccctgtggcttcaaccacatcctgccctacttctacatcatctacttcaccatgctgctggtgcaccgggaggccagagatgagtaccactgcaagaagaagtatggagtggcctgggagaagtactgccagagggtgccctaccgcatcttcccctacatctactag

SEQ ID NO: 340988 - DNA, 1848 bp, Artificial Sequence
  derived and/or modified sequence
atgcccagccggaagttcgccgacggcgaggtggtgcggggccggtggcccggcagctcgttgtattatgaagtcgagatactctcgcacgattccacttcccagttgtacacggtcaaatataaagatgggactgagctggaactcaaagagaatgatattaagcctttaaccagcttccggcaacgaaagggagggagcacatcctccagtccgagcagacgccgtggaagtagatccagaagccggagcaggagccctgggagacccccaaaatccgctagacgctccgcctctgcatcccatcaagcagatattaaagaagcgcgccgtgaagttgaggtcaaattaaccccccttatcctgaagcctttcggcaattctatttcacggtataacggagagccggagcatattgagcgcaatgatgctccccacaagaatacacaggaaaagttctctctgtctcaggagtcgtcttatatagccacacagtattccctgaggcccagacgcgaggaggtgaaactgaaagagattgactcgaaagaggaaaaatacgtggcaaaagaactcgccgtgcggacctttgaggtgaccccgattcgcgccaaggacctggagttcggaggggttcccggggtttttctgataatgtttggacttccagtcttcctgttcttgctgctccttatgtgtaaacagaaagacccttccctgttaaacttcccccctcctcttcctgctctgtacgaactctgggagacgcgggtcttcggggtatacctgctgtggttcttgattcaagttctgttctacctgttgcctattggtaaggtggtggaaggaactccccttatcgacggaaggagattaaagtataggctaaatggattttacgcatttatcctgaccagcgccgtgattggaaccagcctctttcaaggtgttgaatttcattatgtttattcacacttcctccaatttgcacttgccgccactgtgttctgtgtggtgttatcagtgtacctgtatatgcggtccctgaaggcaccccggaacgatttaagcccagcctccagcggcaacgccgtatacgacttctttataggacgggagctcaaccctcgcatcggaacgtttgatttaaaatatttttgcgaactgcggccaggcctgataggttgggtggtcattaatcttgtcatgctgctcgctgagatgaagattcaggacagggcagtcccatccctggctatgatcctcgtaaatagtttccagctgctgtacgtggttgatgccctgtggaacgaagaagctctgctcacaaccatggacataatccacgacggcttcggttttatgctggccttcggcgatcttgtctgggtccccttcatttacagtttccaagcattttatcttgtatcccaccctaatgaggtgagctggcctatggcctctctcattatcgtgctcaaactctgcggttatgtcatctttaggggagcgaacagccagaagaatgcgtttcggaaaaaccccagcgacccaaagctggcccatctgaagacgattcatacttccactggaaaaaacctgcttgtatctggctggtgggggtttgtgcgccaccccaattacctgggggatctgataatggcgctggcctggagcctgccttgtggcttcaatcacattctgccttacttttacatcatctacttcacaatgcttctcgtacaccgagaagccagagatgagtaccactgcaagaagaaatatggcgtcgcatgggagaaatattgccagcgggttccttacagaatttttccttatatctactag

SEQ ID NO: 340989 - DNA, 1848 bp, Artificial Sequence
  derived and/or modified sequence
atgcccagccggaagttcgccgacggcgaggtggtgcggggccggtggcccggcagctccctgtattacgaggtggaaatcttgagccacgacagtacatcccaactgtataccgtgaagtataaggacggaaccgagttggaacttaaagagaatgatatcaagcctctgacttcctttagacagagaaagggcggatccactagttcttcaccctctcgccggagaggctcaagaagcaggagtagatctcggagcccaggtcgcccgcctaagtccgcgagacggtcggcatctgctagccatcaagcagacatcaaggaggcccgaagggaagtagaggtgaaactgacccccctgatccttaagcctttcgggaatagcatttccaggtataacggcgagcccgagcacattgagcgcaatgacgccccacacaaaaacacacaggaaaaattctcactgtcacaggagagctcttacatagccacacagtactcgcttcgaccaaggcgggaggaggttaaacttaaggaaatcgacagcaaagaagagaagtatgtggcgaaagagctcgcagtccgaacattcgaagtaactcctattcgggctaaagacctcgagttcgggggagttccgggcgtctttctcataatgtttggactgccagtctttctcttcctgttgttactgatgtgcaagcaaaaagatccttctctgctcaacttccctccacctctccctgcattatacgaactgtgggaaacccgcgtgttcggagtgtacttgctgtggttcctcatccaggtgctcttttatctactgcccatcgggaaggtcgtcgaggggactcctttaatcgacgggagacggctgaaataccggctaaacggattctatgcctttatccttacaagcgccgtgattggcacatctttattccagggcgtggagttccattacgtgtactctcatttcctgcaatttgcgctagcagccacggtcttttgcgtggttctgtcagtgtatctttatatgagatctctgaaagcacccagaaatgacctctcacccgcatctagcggcaacgcggtctacgacttcttcattggcagagaacttaacccccggatcggcacctttgacctgaaatacttttgtgaattgagacctgggttgattggttgggtggtcatcaacctggttatgttgctagctgagatgaagattcaggaccgcgctgttccctctctcgccatgatactggtgaattcttttcagctcctttatgtggtagacgccctctggaacgaagaggccctgctgacgacgatggatattatccatgatgggttcggattcatgctggccttcggtgatctggtgtgggtgccctttatatattcttttcaagccttttatctcgtgagtcatccaaacgaggtgagttggcccatggcctccctaatcattgtccttaagctgtgcggatatgtgatctttaggggcgctaattctcaaaaaaacgcttttcggaaaaatcccagcgatcctaagctcgctcacttgaaaactattcacacaagcaccggcaagaacctcctcgtttccggctggtggggcttcgtgagacaccccaactaccttggagacttgatcatggcactcgcctggtccctcccgtgcggttttaatcacatattgccatacttttacatcatctattttactatgcttctcgtccaccgtgaagctagagatgagtatcactgtaagaaaaaatacggcgtggcttgggagaagtactgtcaacgtgtgccctatagaatatttccctacatatactag

SEQ ID NO: 340990 - DNA, 1848 bp, Artificial Sequence
  derived and/or modified sequence
atgccgagtagaaagtttgccgatggggaggtggtccgcggacgctggcctggaagttctctttattacgaagtcgaaattctcagccacgacagcaccagtcagctatataccgttaaatacaaggatggcacagagctggagctgaaggaaaacgatatcaaacctttaacttccttccgtcagcgaaaaggtgggtccacctcctcctcaccttccagacggagaggtagcaggtcgcgctcacgctcccgcagccccggtaggcctcccaaatccgcacggaggagcgcctctgccagtcatcaagccgatatcaaggaagctagacgcgaggtggaggtcaaactcacaccccttattttgaagccttttgggaacagcattagtagatataacggagagcccgaacatatagaacgcaatgatgcccctcataagaatacccaagaaaaatttagtctctcccaggagagctcttacatcgcaactcagtactctctccgccctagacgcgaagaggtgaagctcaaagagattgactccaaggaagagaaatatgtggccaaggaactcgctgtgaggaccttcgaagtgacgcctatccgcgcaaaggatctggaatttggaggagtgccgggtgtgttcctcatcatgttcgggctccctgtctttctgtttttgctgctgctgatgtgtaagcagaaggacccatctctgctgaatttcccgccacctctgccagccctttatgagttgtgggaaactcgtgtatttggagtttatctgctgtggttcttaatacaggtgctcttttatctgctccccataggaaaggtggtggagggtacgccactgatcgacggccgacggctgaagtacaggttgaacggattctacgccttcatcctgacttccgctgtcattgggacctctctatttcaaggtgtggaattccactatgtctactcgcatttcctgcagttcgccctggctgccactgttttttgcgttgtgctctctgtgtacttatatatgcgctctttaaaggccccaaggaacgatctttcaccagcctcatctggcaacgctgtgtacgatttttttattggaagagagttgaaccccagaattggcacattcgatttgaagtacttttgcgagctccgacctggtctgatcgggtgggtcgttataaacctggtcatgttactcgccgagatgaagatccaagatcgagccgtcccatccttagctatgattctggtaaactcatttcagctcttgtatgtagtggatgccctgtggaatgaggaggccctactcacaactatggacatcattcatgacgggtttggttttatgctggccttcggggacctcgtgtgggtgccatttatctactccttccaggcattctatctggtgagtcaccctaacgaagtgagctggcccatggcttctctgattattgttcttaaattatgcggctatgtcatctttcgtggagcaaattcccaaaaaaatgccttccgtaaaaatccctcagacccaaagctggcacacctcaagactatccacacgtccaccgggaaaaaccttttagtgtccggttggtgggggttcgtgcgacaccctaactatctgggggatctcattatggcattggcctggtctttgccctgcggctttaatcatatcctgccatatttttacataatctacttcactatgctgctggtgcaccgcgaggcacgggatgagtaccattgcaagaaaaagtatggcgtagcttgggaaaaatactgccagagggtgccataccgaatctttccttacatttactag

SEQ ID NO: 340991 - DNA, 1848 bp, Artificial Sequence
  derived and/or modified sequence
atgccgtcccgaaagttcgcggatggtgaagtggtccggggaaggtggccaggcagttcgttgtattatgaggtagagattctctctcatgatagcacctctcagctctacaccgtcaagtataaagatgggactgagctggagctaaaggagaacgacatcaaaccactcacatcattccgccagcgaaaaggaggctcgaccagctctagtccgtctagacgtcggggaagccgctctaggagccggagtcgatctcccggaagacccccaaagtccgccaggcggagtgcctctgcctcacaccaggcagacatcaaagaggccagaagagaggtcgaagttaaactgacgcctctgattctgaagccatttggtaattctatttcccggtacaatggcgagcccgagcacatcgaacgtaacgacgcccctcataagaatacccaagagaagttcagcctctctcaggagtcgagttacatcgctacacagtacagccttagacctcggagagaggaggtgaagttgaaagagattgatagcaaggaagaaaaatatgtagccaaggagttggcagtgcggacattcgaagtcacgcccataagagccaaggacttagagtttgggggtgtgccaggagtgtttctcattatgtttgggctgccagtctttctgttcttgttgttgttgatgtgtaagcaaaaggacccatctctcctcaacttcccacctcccttacctgcactttacgagctctgggagacacgagtgttcggggtttacctcctctggttcttgatccaggttctgttctacctcctcccaattggcaaggtggtcgagggaaccccccttatcgacggtagacgactgaagtaccgtctaaatggattctacgcttttatccttacgagtgccgtcattggtaccagcttgttccagggcgttgagttccactacgtatattcacactttctccagttcgcactggccgcaactgtgttttgcgtcgttctgtcggtttacctgtacatgcgcagcctgaaagcccctaggaatgatctgtcacctgccagctcaggtaatgcagtgtatgatttctttattgggagggaactgaaccctaggatcggcacttttgatctgaagtacttttgtgagcttcggccaggcctaatcgggtgggtggtgattaacctggtcatgttgttagccgagatgaagatccaggaccgcgctgtgccctccttggcaatgatcctggtgaactccttccagttgctatatgttgtagacgcgttatggaatgaggaagcgctgcttaccaccatggatatcatccacgatggtttcggctttatgctggcattcggtgacctggtctgggtacctttcatatactcatttcaggctttctacctcgtctcacaccccaacgaggtgtcttggccaatggcttctctcattatcgtgctgaagctatgcgggtatgtgatcttcagaggcgcaaattctcagaagaacgcattccggaaaaacccgtccgaccccaagctggcccacctgaagactatacacacaagcactggcaagaacctgttagtgagcggctggtgggggttcgtcagacacccaaactatcttggagacctgataatggctttggcttggtccctgccctgcggattcaaccatatcctgccctatttctacattatctattttaccatgctcctggttcatagagaagcccgagacgagtatcattgcaagaagaaatatggtgtcgcgtgggaaaagtactgccagcgagtcccttaccgtatttttccttacatctactag

SEQ ID NO: 340992 - DNA, 1848 bp, Artificial Sequence
  derived and/or modified sequence
atgcccagcagaaagttcgccgacggcgaggtggtgagaggcagatggcccggcagcagcctgtactacgaggtggagatcctgagccacgacagcaccagccagctgtacaccgtgaagtacaaggacggcaccgagctggagctgaaggagaacgacatcaagcccctgaccagcttcagacagagaaagggcggcagcaccagcagcagccccagcagaagaagaggcagcagaagcagaagcagaagcagaagccccggcagaccccccaagagcgccagaagaagcgccagcgccagccaccaggccgacatcaaggaggccagaagagaggtggaggtgaagctgacccccctgatcctgaagcccttcggcaacagcatcagcagatacaacggcgagcccgagcacatcgagagaaacgacgccccccacaagaacacccaggagaagttcagcctgagccaggagagcagctacatcgccacccagtacagcctgagacccagaagagaggaggtgaagctgaaggagatcgacagcaaggaggagaagtacgtggccaaggagctggccgtgagaaccttcgaggtgacccccatcagagccaaggacctggagttcggcggcgtgcccggcgtgttcctgatcatgttcggcctgcccgtgttcctgttcctgctgctgctgatgtgcaagcagaaggaccccagcctgctgaacttccccccccccctgcccgccctgtacgagctgtgggagaccagagtgttcggcgtgtacctgctgtggttcctgatccaggtgctgttctacctgctgcccatcggcaaggtggtggagggcacccccctgatcgacggcagaagactgaagtacagactgaacggcttctacgccttcatcctgaccagcgccgtgatcggcaccagcctgttccagggcgtggagttccactacgtgtacagccacttcctgcagttcgccctggccgccaccgtgttctgcgtggtgctgagcgtgtacctgtacatgagaagcctgaaggcccccagaaacgacctgagccccgccagcagcggcaacgccgtgtacgacttcttcatcggcagagagctgaaccccagaatcggcaccttcgacctgaagtacttctgcgagctgagacccggcctgatcggctgggtggtgatcaacctggtgatgctgctggccgagatgaagatccaggacagagccgtgcccagcctggccatgatcctggtgaacagcttccagctgctgtacgtggtggacgccctgtggaacgaggaggccctgctgaccaccatggacatcatccacgacggcttcggcttcatgctggccttcggcgacctggtgtgggtgcccttcatctacagcttccaggccttctacctggtgagccaccccaacgaggtgagctggcccatggccagcctgatcatcgtgctgaagctgtgcggctacgtgatcttcagaggcgccaacagccagaagaacgccttcagaaagaaccccagcgaccccaagctggcccacctgaagaccatccacaccagcaccggcaagaacctgctggtgagcggctggtggggcttcgtgagacaccccaactacctgggcgacctgatcatggccctggcctggagcctgccctgcggcttcaaccacatcctgccctacttctacatcatctacttcaccatgctgctggtgcacagagaggccagagacgagtaccactgcaagaagaagtacggcgtggcctgggagaagtactgccagagagtgccctacagaatcttcccctacatctactag

SEQ ID NO: 340993 - protein, 213 aa, Artificial Sequence
  derived and/or modified sequence
MPSRKFADGEVVRGRWPGSSLYYEVEILSHDSTSQLYTVKYKDGTELELKENDIKPLTSFRQRKGGSTSSSPSRRRGSRSRSRSRSPGRPPKSARRSASASHQADIKEARREVEVKLTPLILKPFGNSISRYNGEPEHIERNDAPHKNTQEKFSLSQESSYIATQYSLRPRREEVKLKEIDSKEEKYVAKELAVRTFEVTPIRAKDLEFGGVP

SEQ ID NO: 340994 - DNA, 387 bp, Artificial Sequence
  derived and/or modified sequence
atcggcagggagctcaatccccgaatcggcacattcgacctcaagtatttttgcgagctgcgccctggactaattggctgggtggtcattaatctagtgatgctacttgcagaaatgaagatacaggaccgggcggtgccctctctggccatgatccttgtgaattcttttcagctgctctatgtggtcgacgcgctgtggaatgaggaagctttgctgactaccatggatattattcatgacggcttcggattcatgcttgccttcggcgatctggtgtgggtacccttcatctacagctttcaggccttctatttggtttctcacccaaacgaggtatcttggcccatggcttctctgatcatcgtgctgaagcgagagtactag

SEQ ID NO: 340995 - DNA, 478 bp, Artificial Sequence
  derived and/or modified sequence
attggccgtgaattaaaccctcgaattggtacttttgatctcaaatacttttgtgaattgcgccccggattgattggatgggtggttattaacttggtgatgcttttggctgaaatgaaaatacaggaccgcgctgttccatccttggccatgattttagttaatagtttccagcttctctatgtggtggatgctctctggaatgaggaagcgttgttgacgaccatggacatcatccacgatggatttggattcatgctggcttttggagacttggtgtgggttccctttatttacagcttccaagccttttatttagtcagtcatccaaatgaagtgtcttggccaatggcttctctaattattgttctgaaacgtgagtattaattttagtctcagtttaatttattaaatattatgtactgaggcttttatgccctgctgtctacatacttgaaacatgccattttgaatggcc

SEQ ID NO: 340996 - DNA, 387 bp, Artificial Sequence
  derived and/or modified sequence
attggccgggagctgaaccccagaattggcacctttgacctgaagtacttctgtgagctgcggcccggcctgattggctgggtggtgatcaacctggtgatgctgctggccgagatgaagatccaggacagagctgtgcccagcctggccatgatcctggtgaacagcttccagctgctgtatgtggtggatgccctgtggaatgaggaggccctgctgaccaccatggacatcatccatgatggcttcggcttcatgctggcctttggagacctggtgtgggtgcccttcatctacagcttccaggccttctacctggtgagccaccccaatgaggtgtcctggcccatggccagcctcatcatcgtgctgaagcgggagtactag

SEQ ID NO: 340997 - DNA, 387 bp, Artificial Sequence
  derived and/or modified sequence
atcggccgggagctgaacccccggatcggcaccttcgacctgaagtacttttgtgaactgcgccccggcctgattggatgggtcgtcattaatcttgtgatgctgctggccgagatgaagattcaggaccgtgcggtcccatccttggccatgatcctggtgaacagctttcagctcctatatgtagtggacgcactttggaacgaggaggccttgctcaccacaatggatataatccacgatgggtttggatttatgctggcgttcggcgatctggtgtgggtccctttcatttactcatttcaggcattctacttagtatctcaccctaacgaagtcagttggcccatggccagtctgataattgtgctaaaacgcgaatattag

SEQ ID NO: 340998 - DNA, 387 bp, Artificial Sequence
  derived and/or modified sequence
atcggcagggagctcaacccaaggattggcacgttcgacctgaaatacttctgcgaacttcggccaggtttgatcggctgggtcgtcatcaacctggtgatgctcttggctgagatgaaaattcaggacagagccgtcccgtccttagccatgatcttggttaatagttttcagcttctgtatgttgtagatgccctgtggaacgaggaagctctcctaaccactatggatatcatccatgacggatttgggttcatgctggctttcggagatcttgtatgggtgccattcatatattcgtttcaggctttttatctggtaagccacccgaatgaagtgtcttggcccatggcatccctcatcatcgttttgaaaagagaatactag

SEQ ID NO: 340999 - DNA, 387 bp, Artificial Sequence
  derived and/or modified sequence
atcggcagagagctgaaccccagaatcggcaccttcgacctgaagtacttctgcgagctgagacccggcctgatcggctgggtggtgatcaacctggtgatgctgctggccgagatgaagatccaggacagagccgtgcccagcctggccatgatcctggtgaacagcttccagctgctgtacgtggtggacgccctgtggaacgaggaggccctgctgaccaccatggacatcatccacgacggcttcggcttcatgctggccttcggcgacctggtgtgggtgcccttcatctacagcttccaggccttctacctggtgagccaccccaacgaggtgagctggcccatggccagcctgatcatcgtgctgaagagagagtactag

SEQ ID NO: 341000 - protein, 51 aa, Artificial Sequence
  derived and/or modified sequence
MPSRKFADGEVVRGRWPGSSLYYEVEILSHDSTSQLYTVKYKDGTELELKE

SEQ ID NO: 341001 - DNA, 156 bp, Artificial Sequence
  derived and/or modified sequence
atgccttcgagaaaatttgcagatggcgaagtagtcagaggaaggtggcctggaagtagtctatactacgaggtggaaattctctcccacgattccacttcacaactgtatactgtgaagtacaaggacggcacagaattagaactgaaggagtag

SEQ ID NO: 341002 - DNA, 642 bp, Artificial Sequence
  derived and/or modified sequence
atgccgtccagaaaattcgccgacggagaagtggtccggggccgctggcctggctctagtctatattatgaagttgaaatcctttcccacgattctacatcccagctttacacagtcaagtacaaagacgggacggagcttgagttgaaggaaaacgacatcaagcctttgacttcattcaggcagcggaagggaggcagcaccagctcctcaccaagtagacgccgaggaagcagaagccgctccagatcccggagtcctggacgacccccaaaaagcgcgcggaggtcagctagtgctagtcatcaggccgacatcaaggaggcgaggcgggaggtcgaagtgaaactcacccccctgatcctgaaacctttcgggaactccatcagcagatataacggggagccggaacatatagagcgaaacgatgctccccataaaaacacacaggagaaattcagcctatctcaggagtcttcttacattgccactcagtacagcctcagaccacgccgcgaagaggtgaagctgaaggagatcgattctaaggaggagaaatacgtagcaaaagagctagccgtgagaacatttgaggtgactccgatcagagcaaaagatctcgaattcgggggcgtgccgtag

SEQ ID NO: 341003 - DNA, 736 bp, Artificial Sequence
  derived and/or modified sequence
gccgctgggggaggaagcccgaggccggcgcagcggccgggccggggaccctgggcgcggggcctggcgcggcggccttcccctcctctcctcgcctcctcgtctcctcccctcctcgccttttctggcccagtcgggtggtcggggcggcggcgggcgaggctggagctcgcccgagccgggcccgctgcggaaatggagctgggggttttaaactgcggacgtttccctccatgttggcggcgcggcgcggctgtggagcggcggcggcagggagggttcgtgggcgcctttgtcctgccccaccgcagcctggctcccggcccctccgagcgcccgtctgacagatgagcaggcggccccgcggtcctgcagtaggaggctgacagggcgcggcggcctggcgggacggggaagggtctgcggccgaggtgggcttagattcgcgctgcttgtcactggctttgagggtcgtggtcgtcgcggtttggtgattctccaggcacactgcatggctgctcgctcctatgcgttgaattccttcgcccggacagtctcaaaaatcgggttaattatagaaaatgccaagtaggaaatttgccgatggtgaagtggtaagaggtcgatggcctgggagttcactttattatgaagtagaaattctgagccacgacagcacctcccagctttacactgtgaagtataaagatggaacagagcttgaattgaaagagaa

SEQ ID NO: 341004 - DNA, 874 bp, Artificial Sequence
  derived and/or modified sequence
agcagaaaaaaaaaagcttaggatccgtaacagattcggagtcaacaatgacatgactcagcattttggggttcaattaaaaccaggcttgtaggttgcaggtcaagttgtgtttcggtgtgtaacgcataaaacttcttgttccacgctccgcggtgttggggattttctactgcatctcgacagcatctcgggtaacaaccgagcccctcctcgcagcgttaattatagaaaatgccaagtaggaaatttgccgatggtgaagtggtaagaggtcgatggcctgggagttcactttattatgaagtagaaattctgagccacgacagcacctcccagctttacactgtgaagtataaagatggaacagagcttgaattgaaagagaatgatattaagcctttaacttcctttaggcaaaggaaaggtggctcaacttccagttccccttccagacgccgagggagtcgatcaaggtcacgctcccgatcccctggtcgaccacctaaaagtgcccgccgatctgcttctgcttcccaccaggccgacattaaggaagcaaggagggaagtggaagttaaattgactccgctgattctgaagccatttggaaatagcatcagcagatataatggggagcctgagcatattgagagaaatgacgcacctcataaaaatacacaggaaaaattcagtttgtcacaagaaagcagttacatagcaacacagtatagccttcgtccaagaagagaagaagtcaaattaaaagaaatagattctaaggaagaaaaatacgttgcaaaagaactggcagtgagaacctttgaagtgacccccatccgggcaaaggacttggagtttggaggagtacctg

SEQ ID NO: 341005 - DNA, 156 bp, Artificial Sequence
  derived and/or modified sequence
atgcccagcaggaagtttgctgatggagaggtggtgcggggccgctggccaggcagcagcctgtactatgaggtggagatcctgagccatgacagcaccagccagctgtacacagtgaagtacaaggatggaacagagctggagctgaaggagtag

SEQ ID NO: 341006 - DNA, 642 bp, Artificial Sequence
  derived and/or modified sequence
atgcccagcaggaagtttgctgatggagaggtggtgcggggccgctggccaggcagcagcctgtactatgaggtggagatcctgagccatgacagcaccagccagctgtacacagtgaagtacaaggatggaacagagctggagctgaaggaaaatgacatcaagcccctgaccagcttccggcagaggaagggcggcagcaccagcagcagccccagcagaagaagaggcagccgcagccgcagccgcagccgcagccctggccggccccccaagagcgccaggagaagtgccagcgccagccaccaggccgacatcaaggaggcccggcgggaggtggaggtgaagctgacccccctcatcctgaagccctttggaaacagcatcagccgctacaatggagagcctgagcacattgaaagaaatgatgccccccacaagaacacccaggagaagttcagcctgagccaggagagcagctacatcgccacccagtacagcctgcggccccggcgggaggaggtgaagctgaaggagattgacagcaaggaggagaagtatgtggccaaggagctggccgtgaggacctttgaggtgacccccatccgggccaaggacctggagtttggaggagtgccctag

SEQ ID NO: 341007 - DNA, 156 bp, Artificial Sequence
  derived and/or modified sequence
atgcccagccggaagttcgccgacggcgaggtggtgcggggccggtggcctggcagctccctttattatgaggtggagatcctgagccatgactccaccagccaactgtacacggttaaatacaaagacgggaccgagctggaattaaaggagtag

SEQ ID NO: 341008 - DNA, 642 bp, Artificial Sequence
  derived and/or modified sequence
atgcccagccggaagttcgccgacggcgaggtggtgcggggccggtggcccggaagttcattatattatgaagtggaaatactatcccacgattcaacaagtcagctgtatacggtcaaatacaaagacggtaccgagctggagttaaaagagaacgatattaagcctttgacttcattccggcagcgcaaggggggctcaacatcaagtagtccctctcggcggcgaggctctaggtcgagatcacgctcacgcagcccaggacggccccctaagagtgccaggaggagcgcgtccgctagccaccaagctgacattaaggaagccaggcgtgaagtggaagtgaagcttacaccactcatcctgaagcccttcgggaacagcatctctagatacaacggagaaccagagcacatagagcggaatgatgctccacataaaaatacacaagaaaagtttagtttgagtcaggagagcagctacatagcaactcaatactcactgcgacccagaagagaggaagtgaagttgaaggagatcgattccaaagaggagaagtacgtcgctaaggagttagccgtccgcacctttgaggtgactcctatcagggcaaaagatttagagtttggtggcgtgccttag

SEQ ID NO: 341009 - DNA, 156 bp, Artificial Sequence
  derived and/or modified sequence
atgcctagtcggaagttcgccgatggtgaggtggtgagaggccgatggccaggttcaagtctgtactacgaggtcgagatcctcagtcatgactcaacctctcaactgtatactgtaaagtacaaggacggcacggaactggagcttaaggaatag

SEQ ID NO: 341010 - DNA, 642 bp, Artificial Sequence
  derived and/or modified sequence
atgccatcaaggaaattcgccgacggtgaagtcgtgcggggtcgctggcccggaagtagtctgtattatgaagttgagattctgtcccacgacagtacatcacagctgtataccgttaaatacaaggatggcactgagctcgaactcaaggaaaatgacatcaagccgctcacttcttttcgccagcgcaaaggaggttccacctcctcctccccttcccggaggaggggctctaggagcaggtccaggagccggtctccaggacgaccccctaaatctgcaagacgatcagcctctgcctctcatcaggccgatattaaggaagctcgtagggaggttgaagtgaaactgacacccctgatcctcaaaccctttggaaactccattagccggtacaacggggaacccgagcacatcgaacgcaatgacgctcctcataaaaatacacaggaaaagtttagtctatctcaggagtccagctacattgccacgcagtactccctgagacctcgcagagaggaggtcaagcttaaggagattgacagtaaagaagagaagtatgtggcaaaagagctggccgtgagaacttttgaagttacaccgatacgtgccaaggacctggagtttggcggagtgccatag

SEQ ID NO: 341011 - DNA, 156 bp, Artificial Sequence
  derived and/or modified sequence
atgcccagcagaaagttcgccgacggcgaggtggtgagaggcagatggcccggcagcagcctgtactacgaggtggagatcctgagccacgacagcaccagccagctgtacaccgtgaagtacaaggacggcaccgagctggagctgaaggagtag

SEQ ID NO: 341012 - DNA, 642 bp, Artificial Sequence
  derived and/or modified sequence
atgcccagcagaaagttcgccgacggcgaggtggtgagaggcagatggcccggcagcagcctgtactacgaggtggagatcctgagccacgacagcaccagccagctgtacaccgtgaagtacaaggacggcaccgagctggagctgaaggagaacgacatcaagcccctgaccagcttcagacagagaaagggcggcagcaccagcagcagccccagcagaagaagaggcagcagaagcagaagcagaagcagaagccccggcagaccccccaagagcgccagaagaagcgccagcgccagccaccaggccgacatcaaggaggccagaagagaggtggaggtgaagctgacccccctgatcctgaagcccttcggcaacagcatcagcagatacaacggcgagcccgagcacatcgagagaaacgacgccccccacaagaacacccaggagaagttcagcctgagccaggagagcagctacatcgccacccagtacagcctgagacccagaagagaggaggtgaagctgaaggagatcgacagcaaggaggagaagtacgtggccaaggagctggccgtgagaaccttcgaggtgacccccatcagagccaaggacctggagttcggcggcgtgccctag

SEQ ID NO: 341013 - protein, 168 aa, Artificial Sequence
  derived and/or modified sequence
MMLSLNNLQNIIYNPVIPFVGTIPDQLDPGTLIVIRGHVPSDADRFQVDLQNGSSMKPRADVAFHFNPRFKRAGCIVCNTLINEKWGREEITYDTPFKREKSFEIVIMVLKDKFQVAVNGKHTLLYGHRIGPEKIDTLGIYGKVNIHSIGFSFSSDLQSTQASSLELT

SEQ ID NO: 341014 - protein, 106 aa, Artificial Sequence
  derived and/or modified sequence
MMLSLNNLQNIIYNPVIPFVGTIPDQLDPGTLIVIRGHVPSDADRFQVDLQNGSSMKPRADVAFHFNPRFKRAGCIVCNTLINEKWGREEITYDTPFKREKSFEIV

SEQ ID NO: 341015 - DNA, 627 bp, Artificial Sequence
  derived and/or modified sequence
atgatgttgtcgttaaacaatctgcagaatattatctataaccccgtgataccattcgtcggaactatcccggaccagctagatccgggaacactgatagtgattagaggacatgtaccgtctgacgcggaccgatttcaagtagacttgcagaacggaagcagcatgaagccgcgggccgacgtggcgtttcactttaatccacggtttaaaagggcggggtgcattgtttgcaacacactcattaacgaaaagtggggaagggaagagattacttacgacacaccctttaagcgcgaaaaaagctttgaaatcgtgataatggtacttaaagataaatttcaggtggctgtcaatggaaagcatacactactgtacggacaccgaatcggacctgaaaaaatcgatactctagggatatatggtaaggtcaatattcatagcatcggctttagtttttcaagtgatctgcagtcgacgcaggcaagctctttagagcttacagagattagcagagagaacgttcctaagagcgggaccccgcagctacccagcaaccgcggaggtgacatttctaaaatcgccccaaggacagtgtataccaaaagtaaagactcaacggtctag

SEQ ID NO: 341016 - DNA, 627 bp, Artificial Sequence
  derived and/or modified sequence
atgatgctgagcctgaacaacctgcagaacatcatctacaaccctgtgatcccctttgtgggcaccatcccagaccagctggaccccggcaccctgattgtcatccggggccacgtgcccagtgatgctgaccgcttccaggtggacctgcagaatggcagctccatgaagcccagggcagatgtggccttccacttcaacccccgcttcaagagagctggctgcatcgtgtgcaacaccctcatcaatgagaagtggggccgggaggagatcacctatgacacccccttcaagcgggagaagagctttgaaattgtcatcatggtgctgaaggacaagttccaggtggccgtgaatggcaagcacaccctgctgtatggccaccgcatcggccctgagaagattgacaccctgggcatctacggcaaggtgaacatccacagcatcggcttctccttcagcagtgacctgcagagcacccaggccagcagcctggagctgacagagatcagcagagaaaatgtgcccaagagcggcaccccccagctgcccagcaacagaggaggagacatcagcaagatcgcccccaggacagtgtacaccaagagcaaggacagcacagtgtag

SEQ ID NO: 341017 - DNA, 1035 bp, Artificial Sequence
  derived and/or modified sequence
ctgtagaacttcggagattggggaagataatcggaagaggtagaagacaccgtccatgacacttcctggggaagcagatgtatgtataaggatccgcccacggacgccagagccgggaaccctgacggcacttagctgctgacaaacaacctgctccgtggagcgcctgaaacaccagtctttggatggagtctcgttctgttgcccaggctggagtgcagtggcacaatctcggctcacttcaacctccgtctcccaggttcaagcaattctcctgtctcagcctcctgagtagctgggactacagggccagtgcctcagtttcaatccaggtaacctttaaatgaaacttgcctaaaatcttaggtcatacacagaagagactccaatcgacaagaagctggaaaagaatgatgttgtccttaaacaacctacagaatatcatctataacccggtaatcccgtttgttggcaccattcctgatcagctggatcctggaactttgattgtgatacgtgggcatgttcctagtgacgcagacagattccaggtggatctgcagaatggcagcagcatgaaacctcgagccgatgtggcctttcatttcaatcctcgtttcaaaagggccggctgcattgtttgcaatactttgataaatgaaaaatggggacgggaagagatcacctatgacacgcctttcaaaagagaaaagtcttttgagatcgtgattatggtgctgaaggacaaattccaggtggctgtaaatggaaaacatactctgctctatggccacaggatcggcccagagaaaatagacactctgggcatttatggcaaagtgaatattcactcaattggttttagcttcagctcggacttacaaagtacccaagcatctagtctggaactgacagagataagtagagaaaatgttccaaagtctggcacgccccagcttcctagtaatagaggaggagacatttctaaaatcgcacccagaactgtctacaccaagagcaaagattcgactgtca

SEQ ID NO: 341018 - DNA, 627 bp, Artificial Sequence
  derived and/or modified sequence
atgatgctgagcctgaacaacctgcagaacatcatctacaaccccgtgattccattcgtcggcactatacctgatcagctcgaccctgggacgctgattgtgataagagggcatgtgccgagcgatgccgacagatttcaagtggacctccagaacggttcttcaatgaagccccgagcagatgtggccttccactttaatccacgctttaaacgggccggatgcatagtctgtaacacactcatcaatgagaaatggggcagggaggagattacatatgacacacccttcaagagggaaaagagcttcgagatcgtcattatggtactcaaggataaatttcaggttgccgtcaatgggaaacataccctgttgtatggccacagaatcggtcctgagaaaattgataccctgggcatttacgggaaggtgaatatccacagtatcggttttagttttagctctgacttgcagtcgacccaggcctcttccctcgagctgacagagatctctcgggagaacgtgcccaaatctggtaccccacagcttccctccaacaggggcggcgacatcagcaaaattgctccccggactgtatacacaaaatctaaagacagtaccgtatag

SEQ ID NO: 341019 - DNA, 627 bp, Artificial Sequence
  derived and/or modified sequence
atgatgctatccctgaacaatctacagaacattatctataaccccgtgatcccttttgtcggtacgatcccagaccagctggaccctggaactctgattgtgatacgcggacacgtgccatcagacgccgatagatttcaggtcgacctgcagaacgggagttcgatgaagccacgggcagacgtggcttttcatttcaacccacgctttaagcgggctggatgtatcgtgtgtaacactctaatcaacgagaagtggggcagggaggaaatcacctatgataccccgttcaaacgtgagaaatcgtttgaaattgtcatcatggttttgaaggataagttccaggtagctgttaacggcaagcacacattattgtacggacacagaattggtcccgagaagatcgacactctgggtatctacggcaaggtgaatattcattctatcggattcagcttttccagcgatctgcagtctacacaagcaagtagtctcgagctgaccgaaatcagtcgggaaaatgtacccaagtctggcacccctcaactccctagtaacagagggggagacatctcaaagatcgccccacgcacggtttatactaaatccaaagatagcaccgtgtag

SEQ ID NO: 341020 - DNA, 627 bp, Artificial Sequence
  derived and/or modified sequence
atgatgctgagcctgaacaacctgcagaacatcatctacaaccccgtgatccccttcgtgggcaccatccccgaccagctggaccccggcaccctgatcgtgatcagaggccacgtgcccagcgacgccgacagattccaggtggacctgcagaacggcagcagcatgaagcccagagccgacgtggccttccacttcaaccccagattcaagagagccggctgcatcgtgtgcaacaccctgatcaacgagaagtggggcagagaggagatcacctacgacacccccttcaagagagagaagagcttcgagatcgtgatcatggtgctgaaggacaagttccaggtggccgtgaacggcaagcacaccctgctgtacggccacagaatcggccccgagaagatcgacaccctgggcatctacggcaaggtgaacatccacagcatcggcttcagcttcagcagcgacctgcagagcacccaggccagcagcctggagctgaccgagatcagcagagagaacgtgcccaagagcggcaccccccagctgcccagcaacagaggcggcgacatcagcaagatcgcccccagaaccgtgtacaccaagagcaaggacagcaccgtgtag

SEQ ID NO: 341021 - protein, 229 aa, Artificial Sequence
  derived and/or modified sequence
MSAGLRAGCHVVLLCRFSLGSFSVPSRDSASGRACLAARPTPRTGRVPGKKARAPAVAAPSPERGPRALRAFGVRSPPATRANGRRQKTRALCGRLAWRWLAWPLAVVTCGEHVFSAAPSAQGGDSTTCHPRSKTCRNPEYLLAGADIIETNTFSSTSIAQADYGLEHLAYRMNMCSAGVARKAAEEVTLQTGIKRFVAGALGPTNKTLSVSPSVERPDYRNINLPVGS

SEQ ID NO: 341022 - DNA, 2460 bp, Artificial Sequence
  derived and/or modified sequence
ggcatgctggatggcccttcagctatgactcggttctgtaatcttatcgcctccgaaccggacatcgccaaagtacctttgtgtatcgacagctctaactttgctgtcatcgaagcaggactgaagtgttgccaaggaaaatgtattgtgaactccataagtctcaaggagggcgaagccactgaaactgataccaagattcgcgtgtgcacgcgggcctaccacctgctggtgaagaagctcggatttaacccaaacgatattatcttcgaccccaacatactcaccattgggaccggaatggaggaacataacttgtacgctatcaactttattcacgccactaaggtcattaaggaaaccctgcctggcgcacgtatctccggtggactgtccaatctgagcttctcttttcggggcatggaggctatccgcgaagctatgcacggtgtgtttctttatcatgctattaaaagcgggatggatatgggcatcgtgaacgctggcaatttgccagtctacgacgatatccacaaagaacttctgcaactgtgtgaggatctgatctggaataaagatcccgaagcgacagagaagcttctgaggtatgcccagacacaggggacgggaggaaagaaggttatacagacagacgaatggagaaacggacccgttgaggagagattagagtacgcgctggtcaagggtatagagaagcatattatcgaggatacagaagaggctcgactcaaccaaaagaagtatccccgacctttaaacatcatagaaggcccgctgatgaacggcatgaagatcgtgggcgatttatttggggctggcaaaatgttcctgccgcaggtgattaagtctgcacgagtgatgaagaaggccgtgggacacctgataccattcatggagaaggagcgggaagagaccagggtgctgaatggaaccgttgaagaggaggatccttatcaaggtaccattgtcttagctactgtgaagggggacgtgcacgatattggcaaaaacatcgtgggagtcgtgctgggctgtaacaatttcagggtgattgacctgggagtgatgaccccctgcgataagattttgaaggctgcactagaccataaggctgatattattgggctgagcggcctgatcacgccctcgttggatgaaatgattttcgtggccaaagagatggagaggctggcaatccggatacctctactaatcggaggcgctaccacgagtaagacacatacagcagtgaaaattgccccaagatattcggcacccgtgatccatgtgttggatgcttctaaaagtgtggtcgtatgttctcaactgctggacgagaacttgaaggacgagtacttcgaggaaatcatggaggagtatgaagacataaggcaggaccactacgagtctctcaaagagcggcgctatctgccgctgtctcaagcccgcaagtctgggttccagatggactggttgagcgaaccacacccagtgaagcctacctttatcggtactcaagtgtttgaggactatgacctccaaaaattggtggattatatcgattggaagccctttttcgacgtgtggcagctcagaggtaaatatcccaaccggggctttcccaaaattttcaacgataaaactgtaggcggagaagcacgcaaggtgtatgatgatgctcataacatgctgaacacattgatctcccagaagaaattgagagcacggggggtggtaggtttttggccagctcaaagtatccaggatgatattcatttgtacgccgaggctgctgttccacaagccgccgaacccatcgccactttctacggattgaggcaacaagctgagaaagactctgcctctaccgagccatactactgcctgtcagacttcattgcacctttgcacagtggcatcagagactatttggggctgttcgccgtagcatgtttcggcgtggaagaactgtccaaagcttatgaggacgatggggacgactatagctccataatggtgaaggctcttggcgaccgcctcgctgaggcatttgccgaggaactccacgagagagtgcggagagagctgtgggcctattgcggttctgagcagctggatgtggccgatttgaggagactgcggtacaaggggatccgacccgctccgggatatccttcccagccagaccacactgagaaactaacgatgtggcgcttggccgatattgagcagagtacagggatccgtctgacggaatctctggctatggcgccggcttctgccgtctcaggtctgtatttcagcaatctcaaatccaagtatttcgccgtaggcaagatttccaaggaccaagtggaggactatgccctacgcaaaaacatcagcgtagcggaagtagagaagtggctcggcccgattctgggctacgatacggattag

SEQ ID NO: 341023 - DNA, 3357 bp, Artificial Sequence
  derived and/or modified sequence
atgtcaccagcactgcaggatctgagccagcccgagggcctgaaaaagaccctgcgggacgagattaacgccatcctgcagaagaggattatggtcttagatggtggaatgggaactatgatacagcgggaaaagctcaacgaggaacacttccgcggacaagaattcaaagaccacgcgaggcctctgaaaggaaacaatgacatccttagtattacgcagcccgacgtgatctaccaaatccataaggaatatctcttagctggagccgacataattgaaaccaatacattctccagcacatcaatagctcaggcggactacgggctggagcatctggcctatcgcatgaatatgtgcagcgcaggggtggcacgcaaagcagccgaggaagtcacccttcaaacagggatcaaaaggtttgtggcaggtgcactgggcccaacaaacaaaaccctttcagtctcgccgtccgtcgaaagacctgactatcgaaatatcacttttgacgaactggtggaggcgtaccaggagcaggccaaaggtctactggacggcggtgtggatattctgctgattgaaacaatttttgacactgccaacgccaaggctgccctgtttgccctccaaaatctcttcgaggagaagtatgctcctagacccatcttcattagcgggaccattgtggacaaatcaggtaggactctaagtgggcagaccggagaaggctttgttatctcagtcagtcatggggagccattgtgcatcggccttaactgtgcactgggcgccgccgagatgcgtccatttattgaaatcatcgggaagtgcactaccgcatacgtgctgtgttatcctaatgccggtttacccaacacctttggcgactatgacgagacaccttcaatgatggcaaaacacctcaaagacttcgcgatggatgggctggtgaacatcgtgggcggatgctgcggatcaacccctgaccatattcgagaaattgcagaggccgttaagaactgcaagccacgggttccgccagccaccgcctttgaggggcacatgctgctcagtggcttggagccgttccgcataggcccatacactaactttgttaatatcggcgagaggtgtaatgtcgcaggatcgcgcaaattcgctaaactcatcatggctgggaactacgaagaggcactatgtgtagccaaggtgcaggtagaaatgggcgcccaggtcctggatgttaatatggatgacgggatgcttgatggcccaagtgccatgacccgtttctgtaatttgatcgcctcggagcccgatatcgcaaaggtgccactttgcattgatagcagcaatttcgcggttatagaagctggcctgaaatgttgccaggggaaatgtatcgtgaatagtatcagtctcaaagaaggcgaggacgatttcttggaaaaagcacggaaaattaaaaaatacggcgccgctatggtggttatggcgttcgacgaggagggccagacacaaggaacaggcggtaaaaaggtcattcagaccgacgaatggcgaaacggacccgttgaagagcgcctagagtatgcccttgtcaagggcatcgaaaagcacatcatagaggatactgaggaggcccggctgaatcaaaaaaagtaccctagacccctaaacatcatcgagggcccacttatgaacggtatgaaaattgtgggagatttatttggcgctggcaaaatgttcttaccccaggtgatcaagtccgctcgtgtgatgaaaaaggccgttggccacctgatacctttcatggagaaggaaagggaggaaactagagtcctgaacgggacggtggaggaagaagacccttatcagggcacaattgtgctagccacagtgaagggagacgtgcatgatattgggaaaaatattgtgggcgtggtgctaggctgcaacaatttcagggtgatagatctgggagtgatgacaccatgcgacaagatcctcaaagccgctttggatcacaaggcggatattattggcctgagcgggctgatcacaccaagccttgacgagatgatctttgtggccaaggagatggaaaggctggcaatccgcatcccacttcttatcggcggagccactacctcaaagacccatacggcggtcaagatcgcacccagatacagcgcccccgttattcacgtgctggatgcgtccaagtccgttgtcgtgtgcagccagttgctcgacgagaacttgaaagacgagtatttcgaagagattatggaagagtatgaagatatcaggcaagaccattacgaatctttaaaagagcggcggtatctgcctctgtctcaagcaagaaaatcaggctttcaaatggattggctctcagagccacacccagtcaagcccacatttataggcacccaagtgttcgaggactacgatttgcaaaaactggttgactacatcgactggaagccatttttcgacgtgtggcaactgcggggaaagtaccctaaccgggggttcccaaagatttttaatgacaagactgtcggaggggaggcaaggaaggtctacgatgatgcccataacatgctgaataccctgatttctcagaaaaagctgcgggcaaggggcgttgtgggattctggcccgctcagtctattcaggacgacatccatctctacgccgaagctgcagtccctcaggccgcagagcccatcgcaaccttttacggcctgcggcagcaggcagagaaggactcggcgtctacagaaccatactattgtctgtctgactttattgctccgttacactctggtatccgggattacctcggattatttgcggtagcatgcttcggcgtggaggagctgagcaaagcatacgaagacgacggggacgattatagctccattatggtcaaggctctgggtgatcgattggctgaggcttttgctgaggaactgcacgaaagagtgcgccgggaattatgggcctattgtggaagtgagcaactggacgtagccgatcttagaaggttgaggtataagggcattcgtcctgcacccgggtatccctcacagcccgaccacactgaaaaactgaccatgtggcgcctcgcggatatcgaacagagcacaggcattaggctgaccgaatcactggcaatggctccagcctctgctgtttctggcttgtacttcagcaatcttaaatctaagtatttcgccgtgggaaaaatttcgaaagatcaagtggaagactatgcactgcgcaagaatataagcgtggccgaggtggagaagtgtatgtctgtgtatcgaaaaatcggtgaatag

SEQ ID NO: 341024 - DNA, 690 bp, Artificial Sequence
  derived and/or modified sequence
atgagcgcaggcctgagggcaggctgtcacgtagtcctactttgtcggttttcgctggggtctttctccgttccatctagggattccgcgtcaggccgggcttgcttggcggcacgtccaactcctaggacaggacgagtacccggaaaaaaggcacgtgcccccgcagttgcggccccgagcccagaaaggggccctcgcgccctacgcgcgtttggcgtacggagccctcctgctaccagagctaacgggagaagacagaagacaagagctctctgcggacggttggcatggcggtggcttgcatggcctctggctgtggtcacatgcggggaacacgtgttctccgctgctccttccgctcagggaggcgattccactacctgtcacccccgtagcaaaacatgccggaatcccgagtacttactggcgggagctgacattatagagacgaatactttctcttcaacttccatcgcccaggctgattacggcttagagcacttggcctatagaatgaatatgtgctccgccggggtagctcggaaagcggcagaggaagtgacattgcagacaggtattaagaggttcgtcgccggcgccctgggtccgacaaataaaaccctatccgtgtcacctagtgtggagagaccagattatcggaatatcaatttaccggttggtagctag

SEQ ID NO: 341025 - DNA, 2460 bp, Artificial Sequence
  derived and/or modified sequence
ggcatgctggatggccccagcgccatgacccgcttctgcaacctgattgccagcgagccagacatcgccaaggtgcccctgtgcatcgacagcagcaactttgctgtgattgaagctggcctgaagtgctgccagggcaaatgtattgtgaacagcatcagcctgaaggagggggaggccacagaaacagacaccaagatccgggtgtgcacccgggcctaccacctgctggtgaagaagctgggcttcaaccccaatgacatcatctttgaccccaacatcctgaccatcggcaccggcatggaggagcacaacctgtatgccatcaacttcatccacgccaccaaggtgatcaaggagaccctgcccggggcccgcatcagcggcggcctgagcaacctgtccttctccttccggggcatggaggccatccgggaggccatgcatggagtcttcctgtaccacgccatcaagagcggcatggacatgggcatcgtgaatgccggcaacctgcctgtgtatgatgacatccacaaggagctgctgcagctgtgtgaggacctgatctggaacaaggaccctgaggccacagagaagctgctgcgctatgcccagacccagggcactggaggcaagaaggtgatccagacagatgagtggagaaatggacctgtggaggagcggctggagtatgccctggtgaagggcatcgagaagcacatcatcgaggacacagaggaggcccggctgaaccagaagaagtacccccggcccctgaacatcatcgagggccccctgatgaatggcatgaagatcgtgggggacctgtttggagctgggaagatgttcctgccccaggtgatcaagagcgcccgggtgatgaagaaggctgtgggccacctgatccccttcatggagaaggagcgggaggagaccagggtgctgaatggcaccgtggaggaggaggacccctaccagggcaccatcgtgctggccaccgtgaagggagatgtgcatgacatcggcaagaacatcgtgggcgtggtgctgggctgcaacaacttccgggtcatcgacctgggcgtgatgaccccctgtgacaagatcctgaaggccgccctggaccacaaggctgacatcatcggcctgagcggcctcatcacccccagcctggatgagatgatctttgtggccaaggagatggagcggctggccatccgcatccccctgctgattggaggagccaccaccagcaagacccacacagctgtgaagatcgccccccgctacagcgcccctgtgatccacgtgctggatgccagcaagtctgtggtggtgtgcagccagctgctggatgagaacctgaaggatgagtactttgaggagatcatggaggagtatgaggacatccggcaggaccactatgagagcctgaaggagcggcgctacctgcccctgagccaggccaggaagagcggcttccagatggactggctgtctgagccccaccctgtgaagcccaccttcatcggcacccaggtgtttgaggactatgacctgcagaagctggtggactacatcgactggaagcccttctttgatgtgtggcagctgcggggcaagtaccccaacagaggcttccccaagatcttcaatgacaagacagtgggcggggaggccaggaaggtgtatgatgatgcccacaacatgctgaacaccctcatcagccagaagaagctgcgggcccggggcgtggtgggcttctggccagcccagagcatccaggatgacatccacctgtatgcagaggccgctgtgccccaggccgctgagcccatcgccaccttctacggcctgcggcagcaggccgagaaggacagcgccagcacagagccctactactgcctgagtgacttcatcgcccccctgcacagcggcatccgggactacctgggcctgtttgctgtggcctgctttggagtggaggagctgagcaaggcctatgaagatgatggagatgactacagcagcatcatggtgaaggccctgggggaccggctggccgaggcctttgctgaggagctgcacgagcgggtgcggcgggagctgtgggcctactgcggcagcgagcagctggatgtggccgacctgcggcggctgcgctacaagggcatccggcctgcccctggctaccccagccagcctgaccacacagagaagctgaccatgtggaggctggccgacatcgagcagagcacaggcatccggctgacagagagcctggccatggccccagccagcgctgtgtctggcctgtacttcagcaacctgaagagcaagtactttgctgtgggcaagatcagcaaggaccaggtggaggactatgccctgaggaagaacatctctgtggccgaggtggagaagtggctgggccccatcctgggctatgacacagactag

SEQ ID NO: 341026 - DNA, 3357 bp, Artificial Sequence
  derived and/or modified sequence
atgagccctgccctgcaggacctgagccagcctgagggcctgaagaagaccctgagagatgagatcaatgccatcctgcagaagaggatcatggtgctggatggcggcatgggcaccatgatccagcgggagaagctgaatgaggagcacttccggggccaggagttcaaggaccacgcccggcccctgaagggcaacaatgacatcctgagcatcacccagccagatgtgatctaccagatccacaaggagtacctgctggccggggctgacatcatcgagaccaacaccttcagcagcaccagcatcgcccaggccgactatggcctggagcacctggcctacaggatgaacatgtgcagcgctggggtggccaggaaggctgctgaggaggtgaccctgcagacaggcatcaagagatttgtggccggggccctgggccccaccaacaagaccctgtctgtgagccccagcgtggagaggccagactacagaaacatcacctttgatgagctggtggaggcctaccaggagcaggccaagggcctgctggatggaggagtggacatcctgctgattgagaccatctttgacacagccaatgccaaggccgccctgtttgccctgcagaacctgtttgaggagaagtatgccccccggcccatcttcatcagcggcaccatcgtggacaagagcggccgcaccctgagcggccagacaggagagggcttcgtcatctctgtgagccacggggagcccctgtgcatcggcctgaactgtgccctgggcgctgctgagatgaggcccttcatcgagatcatcggcaagtgcaccacagcctacgtgctgtgctacccaaatgccggcctgcccaacaccttcggggactatgatgagacccccagcatgatggccaagcacctgaaggactttgccatggatggcctggtgaacatcgtgggcggctgctgcggcagcaccccagaccacatccgggagattgctgaggccgtgaagaactgcaagccccgggtgcccccagccacagcctttgagggccacatgctgctgagcggcctggagcccttcagaattggcccctacaccaactttgtgaacatcggggagcgctgcaatgtggccggcagcaggaagtttgccaagctgatcatggccggcaactatgaggaggccctgtgtgtggccaaggtgcaggtggagatgggcgcccaggtgctggatgtgaacatggatgatggcatgctggatggccccagcgccatgacccgcttctgcaacctgattgccagcgagccagacatcgccaaggtgcccctgtgcatcgacagcagcaactttgctgtgattgaggccggcctgaagtgctgccagggcaagtgcatcgtgaacagcatcagcctgaaggagggggaggatgacttcctggagaaggccaggaagatcaagaagtatggagctgccatggtggtgatggcctttgatgaggagggccagacccagggcactggaggcaagaaggtgatccagacagatgagtggagaaatggacctgtggaggagcggctggagtatgccctggtgaagggcatcgagaagcacatcatcgaggacacagaggaggcccggctgaaccagaagaagtacccccggcccctgaacatcatcgagggccccctgatgaatggcatgaagatcgtgggggacctgtttggagctgggaagatgttcctgccccaggtgatcaagagcgcccgggtgatgaagaaggctgtgggccacctgatccccttcatggagaaggagcgggaggagaccagggtgctgaatggcaccgtggaggaggaggacccctaccagggcaccatcgtgctggccaccgtgaagggagatgtgcatgacatcggcaagaacatcgtgggcgtggtgctgggctgcaacaacttccgggtcatcgacctgggcgtgatgaccccctgtgacaagatcctgaaggccgccctggaccacaaggctgacatcatcggcctgagcggcctcatcacccccagcctggatgagatgatctttgtggccaaggagatggagcggctggccatccgcatccccctgctgattggaggagccaccaccagcaagacccacacagctgtgaagatcgccccccgctacagcgcccctgtgatccacgtgctggatgccagcaagtctgtggtggtgtgcagccagctgctggatgagaacctgaaggatgagtactttgaggagatcatggaggagtatgaggacatccggcaggaccactatgagagcctgaaggagcggcgctacctgcccctgagccaggccaggaagagcggcttccagatggactggctgtctgagccccaccctgtgaagcccaccttcatcggcacccaggtgtttgaggactatgacctgcagaagctggtggactacatcgactggaagcccttctttgatgtgtggcagctgcggggcaagtaccccaacagaggcttccccaagatcttcaatgacaagacagtgggcggggaggccaggaaggtgtatgatgatgcccacaacatgctgaacaccctcatcagccagaagaagctgcgggcccggggcgtggtgggcttctggccagcccagagcatccaggatgacatccacctgtatgcagaggccgctgtgccccaggccgctgagcccatcgccaccttctacggcctgcggcagcaggccgagaaggacagcgccagcacagagccctactactgcctgagtgacttcatcgcccccctgcacagcggcatccgggactacctgggcctgtttgctgtggcctgctttggagtggaggagctgagcaaggcctatgaagatgatggagatgactacagcagcatcatggtgaaggccctgggggaccggctggccgaggcctttgctgaggagctgcacgagcgggtgcggcgggagctgtgggcctactgcggcagcgagcagctggatgtggccgacctgcggcggctgcgctacaagggcatccggcctgcccctggctaccccagccagcctgaccacacagagaagctgaccatgtggaggctggccgacatcgagcagagcacaggcatccggctgacagagagcctggccatggccccagccagcgctgtgtctggcctgtacttcagcaacctgaagagcaagtactttgctgtgggcaagatcagcaaggaccaggtggaggactatgccctgaggaagaacatctctgtggccgaggtggagaagtgcatgtctgtgtacaggaagatcggggagtag

SEQ ID NO: 341027 - DNA, 690 bp, Artificial Sequence
  derived and/or modified sequence
atgtctgctggcctgcgggccggctgccacgtggtgctgctgtgccgcttcagcctgggcagcttctctgtgcccagccgggacagcgccagcggccgggcctgcctggccgcccggcccacccccaggacaggccgggtgcctgggaagaaggcccgggccccagctgtggccgcccccagccctgagcggggcccccgggccctgcgggccttcggcgtgcgcagccccccagccacccgggccaatggaagacggcagaagacccgggccctgtgtggccgcctggcctggcgctggctggcctggcccctggccgtggtgacctgtggggagcacgtgttttctgctgcccccagcgcccagggcggggacagcaccacctgccaccccaggagcaagacctgcagaaatcctgagtacctgctggccggggctgacatcatcgagaccaacaccttcagcagcaccagcatcgcccaggccgactatggcctggagcacctggcctacaggatgaacatgtgcagcgctggggtggccaggaaggctgctgaggaggtgaccctgcagacaggcatcaagagatttgtggccggggccctgggccccaccaacaagaccctgtctgtgagccccagcgtggagaggccagactacagaaacatcaacctgcctgtgggcagctag

SEQ ID NO: 341028 - DNA, 2460 bp, Artificial Sequence
  derived and/or modified sequence
ggcatgctggacggccccagcgccatgacccggttctgcaacctgatcgctagtgagccagatattgccaaagttcccctgtgcatcgattctagcaatttcgccgttattgaggcggggctaaagtgctgccagggtaagtgcatcgtgaactccattagccttaaagagggtgaggcgactgagactgatactaaaataagagtctgcacaagagcctatcatttattggtaaagaaattggggtttaacccaaacgacatcatattcgacccaaacatactcaccatcggcaccgggatggaggaacacaacctgtatgccattaactttattcacgccaccaaagtgatcaaggagactttgcctggagctcggatctccggcgggttgtctaacctgtcctttagttttaggggcatggaggcaattcgggaagccatgcacggcgtttttttgtatcacgctatcaaaagtgggatggatatggggattgtcaatgcaggcaacctgccagtgtacgacgatattcacaaggagctactacagttatgcgaggatctgatctggaataaggatcccgaggcgacagagaagcttctgaggtacgctcagacccagggaacgggtgggaaaaaggtaatccagactgacgaatggcgcaatggcccagttgaggaacggttagagtacgccctggtgaaaggcatcgaaaaacacataatcgaggataccgaggaagcacgactgaatcagaaaaagtacccaaggcccctgaacatcattgagggtccgcttatgaacggtatgaagattgtcggtgacctctttggggctgggaagatgttcctgccccaggtaatcaaatcagccagagtcatgaagaaggccgtagggcatctgataccttttatggagaaagagcgagaggaaacgcgggtgctaaacgggaccgtggaggaggaagacccatatcaggggacaattgttttggccaccgtaaagggcgatgttcacgatatcggtaaaaatatcgttggcgtggtacttgggtgcaataactttcgagtcattgacctcggagtcatgacaccatgtgacaagattctgaaggctgccttagatcacaaggctgatattatcggcttatcagggctcatcaccccttccctcgatgaaatgatattcgtggccaaagagatggagcgccttgctattagaatcccactgctcattggcggggcaactacttccaagactcacactgccgtgaagattgctccccgctactcagcacctgtgattcatgtcctagacgccagcaaatctgtggtggtgtgtagccagctcctggacgaaaatctcaaggatgagtattttgaggagattatggaggagtatgaggacatccgccaggaccactatgagtcattgaaggagcgaaggtacttgcccctgtctcaagcacgcaagtcaggcttccaaatggactggttgagcgagccccatccggtgaagcccaccttcatcggaacgcaagtattcgaggattatgacctccaaaaacttgtcgactacatcgactggaagccattcttcgacgtgtggcagctgcgcgggaagtatcctaaccgggggttcccaaagatctttaacgacaaaacggtcggcggggaagctcggaaggtgtacgatgatgcacataacatgttgaataccctgattagtcaaaaaaagctgagagcccgtggggtcgtggggttttggcccgctcagtctattcaggacgacattcatctctatgcagaggccgcagttccccaggccgcagagcctattgctactttctacggcctgagacagcaagccgagaaagactccgctagtacagagccctattactgcttaagcgattttatagcacctcttcactctggcatccgagactatctcggactctttgccgtggcctgcttcggcgtcgaggagttgagcaaagcctacgaggacgacggcgacgactacagctctatcatggttaaagccctaggcgatagactagccgaggcattcgcagaagagcttcatgaacgtgtccggcgcgaattatgggcctattgtggaagtgaacagcttgacgtggcagacctccgcaggctcagatacaaagggatcagaccagctcctggatacccatcacaacccgatcatacagaaaaattaactatgtggcggttggccgatatcgaacagagcaccggaatccggcttaccgaaagtctcgcgatggcccctgctagcgctgtaagcggtctgtacttctccaatctcaagtcgaaatactttgccgttgggaagatttctaaagaccaggttgaagactatgccctacgaaaaaatatctcggtcgctgaggtggagaagtggcttgggccgattcttggttacgataccgattag

SEQ ID NO: 341029 - DNA, 3357 bp, Artificial Sequence
  derived and/or modified sequence
atgagccccgccctgcaggacctgagccagcccgagggcctgaagaagacgctccgtgatgaaattaacgcgatcctccagaagcggataatggtgctggacggcgggatggggactatgatccagcgcgaaaaactcaacgaggagcacttccgggggcaggagttcaaggatcacgcacgccctctcaagggcaacaatgacatcctcagtattacccagcccgacgtgatctatcagattcataaagagtatctgctcgctggggcagacattatcgaaaccaacaccttctcaagcacttctatcgctcaggcagactacgggcttgaacatctggcgtatcgcatgaatatgtgcagtgctggcgttgctcgaaaagcggctgaagaggttacactccagactggcattaaaaggttcgttgctggtgcccttggtcccacaaacaaaacactgagtgtgtctccctcggtcgagcggccagattaccgaaatattacttttgacgagcttgtggaagcttatcaggaacaagcgaagggcttgttggacggcggagtcgacatcttactgattgagaccattttcgacactgccaacgccaaggccgcactgtttgcgctgcagaacttattcgaagagaaatacgccccccgcccaattttcataagcgggaccatcgtagacaaatcgggaaggaccctgtctggccagaccggggaaggattcgtgatctccgtaagccacggagagccactctgcatcgggctgaactgcgctctgggtgcggccgagatgagaccattcatcgaaatcatcggaaaatgtaccacggcatacgtgttgtgctaccccaacgcgggcctgcctaataccttcggcgactacgacgaaactccttccatgatggcaaagcacctgaaggacttcgcaatggacgggttggtgaacatcgtcggcggatgctgcggatccactcccgatcacatacgcgagatagcagaagctgtgaagaactgcaagccccgtgtgcctcctgccacagctttcgagggtcatatgcttctatcaggattggagcccttcaggataggcccatacaccaatttcgtgaatattggagagaggtgcaatgtggccgggagcaggaaattcgccaagctgatcatggccggaaactacgaggaagcactttgcgtggccaaggtgcaggttgagatgggcgcccaggtactggatgtgaatatggacgatggcatgctggatggcccctccgccatgacccgattttgtaacttaattgcttcggaacctgacatcgctaaagtgccactttgcattgactcctccaatttcgcagtgattgaggctggcctcaaatgttgtcagggtaagtgcatcgtcaactcaattagtctgaaagaaggggaagatgatttcctggagaaagctcgcaaaataaaaaaatacggagctgccatggttgtaatggccttcgatgaggagggtcagacccaggggacaggcggcaaaaaggttatccagacagacgagtggaggaacggcccggtggaagaaagacttgagtatgccctggtaaagggcattgagaagcacataatcgaggacaccgaggaagcccggctgaatcagaagaaatatcctcgacctctgaatatcattgaaggacccttgatgaatggaatgaagatcgttggggatttattcggagcagggaaaatgttcttgccccaggtaataaaaagcgcaagggttatgaagaaggcagtaggtcatttaattccatttatggagaaagagagagaggagacaagggtgttgaacggtaccgtcgaggaagaggatccataccaggggacaatcgtgctggcaacagtgaaaggagacgtccatgatataggcaaaaatatagtcggggtagtgctgggctgcaacaattttcgagtgatcgatctgggtgttatgacaccatgcgataagatcctgaaggcagctctggatcataaggccgacatcattgggctgtcaggcctgataactccaagcctcgatgagatgatcttcgtcgccaaggaaatggagcggctggcaatccgtatccctctgcttataggaggggcaaccacctctaagacccacacagccgtgaaaatcgcaccgcgatatagcgcccccgtgatccatgttttggatgcttcaaaaagcgtcgtggtgtgttcgcagttgttagacgagaatctgaaggacgagtatttcgaagagattatggaagagtatgaggatatcaggcaggatcactatgagagtctgaaggagaggcggtatctacctctttctcaggcacgaaagagtgggttccaaatggactggctctctgagccccaccctgtgaaaccaaccttcattgggacccaggtgtttgaagattacgatctgcaaaagctggtggactatatcgattggaagcctttcttcgacgtgtggcaactgagagggaaatatcccaatcgtggctttccaaaaatctttaacgacaagacagtgggcggcgaggctaggaaagtgtacgatgatgctcataacatgctaaacaccttaattagccaaaagaaattgcgcgctagaggcgtggttgggttttggcccgcacagagtatacaggatgacattcacctatacgctgaggctgctgtgccacaggccgccgagccaatcgccacgttttacgggttgcggcagcaggccgaaaaagatagcgccagcactgagccttactactgcctgagcgacttcattgcacctttgcattctgggatccgagactacctgggcctgttcgccgtggcttgttttggtgtcgaagagctgtctaaggcctatgaagacgacggcgatgactactcctctatcatggtcaaggccctgggagacagactcgccgaagccttcgctgaagagctgcatgagagagttcgaagagagctgtgggcctactgcggcagtgaacagctggacgttgcagacctgcggcgtctccggtacaagggcatacgccctgcacctggctacccaagccaacccgatcacacggagaagttaactatgtggcgtctcgccgatattgaacagtcaaccgggatcaggttaactgaatcactcgcaatggctccagcttccgcagttagcggattatattttagcaacctcaaaagtaagtactttgcagtggggaagattagcaaagaccaggttgaggactatgccctgagaaaaaacatttctgtggcagaggtagaaaagtgtatgtctgtttaccgaaagatcggcgagtag

SEQ ID NO: 341030 - DNA, 690 bp, Artificial Sequence
  derived and/or modified sequence
atgagcgccggcctgcgggccggctgccacgtggtgctgctgtgccggttttccttggggagcttctcagtacccagccgcgactccgcgagcgggcgtgcctgtctcgccgctcgacccaccccaaggactggaagggtacccgggaaaaaggctagggccccagcagttgctgccccttctcctgaacggggaccacgtgcccttcgagcattcggggtgagaagtccccctgccacacgggccaacggcagaaggcagaaaacgagagctctgtgcggcagactggcgtggagatggctagcctggcccctggccgtcgtcacatgcggagagcacgtattctcagctgcacctagcgcccagggaggtgattctactacctgtcatccccgttcgaaaacctgtcggaaccccgagtatcttcttgcaggcgcagatattattgaaactaatacttttagttcgacctcaattgcccaggccgactatggtctggaacacctcgcttacagaatgaatatgtgctctgcaggcgtggcacgcaaggccgcggaggaggtgaccctacagactgggattaagcgattcgtagcaggtgccctgggcccaaccaataagaccctaagtgtgagtccttccgtggagagacccgattatcgcaacattaatctaccggtcgggtcgtag

SEQ ID NO: 341031 - DNA, 2460 bp, Artificial Sequence
  derived and/or modified sequence
gggatgctggatgggccaagcgccatgacccggttttgcaatttaattgcaagcgagcccgatatcgctaaggtcccactgtgcattgattcgtccaacttcgctgtgatagaggctgggctcaagtgctgccagggcaagtgcatcgtcaactctattagtcttaaggagggagaagctaccgagactgacaccaagattagagtctgcacacgcgcttatcaccttttagtgaaaaaactgggattcaaccccaacgatattatatttgatccaaacatactgacaatcgggactgggatggaggagcataatttatatgctataaattttatacatgcgacaaaagtgatcaaggagactctccccggtgctcgcatttcgggcggtctgtccaatttgtccttcagcttcagggggatggaggccatcagagaagccatgcacggcgtctttctctaccatgccattaaatctggcatggatatgggcatcgttaacgccggtaacctgccagtttatgacgatatccacaaagagctgctgcaactgtgcgaagatctgatctggaataaggatccggaggccacggagaagctcctccgatatgcccagactcagggaacagggggaaagaaggtgatccagacagatgaatggaggaacgggccagtagaggaacggctcgaatatgccctggtgaagggcattgagaagcatatcatcgaggacactgaggaagcacggctgaaccagaaaaaatatcctagacctctgaatatcatagagggacccctgatgaacggcatgaaaatcgtgggagacctgttcggcgctggcaagatgttcctcccccaggtcattaagtccgccagggtaatgaagaaagcagtaggtcacctgattccgttcatggagaaggagagagaagagaccagagtactcaatggcacggttgaagaggaagatccgtaccagggaacgattgtgctggctaccgttaaaggggatgttcatgatatcggtaaaaatattgtgggtgtcgtgctgggctgtaacaacttccgggtcattgacctgggagtgatgaccccttgtgacaagattctgaaagcagctctggaccacaaagctgatattataggtttgagtggcctgattacgccctccttggacgagatgattttcgtggctaaagaaatggagcgtttggccatccgcatccctttactgatagggggagcaactacctccaagacccacaccgccgtaaaaattgcgccacgatacagcgcgccagtgatccatgtgttggatgcatccaagagcgtggtggtttgttctcaactgctcgatgagaacttaaaagatgagtacttcgaggaaataatggaggagtatgaagatattcggcaagaccactatgagagtctgaaagaaaggcgatacctgccattgtctcaagcacgcaagtcaggcttccaaatggactggctctccgagccccaccccgtgaagcccacgtttatcggcacccaggtgtttgaagactatgacttgcaaaagctcgtagactatatcgactggaagcctttttttgacgtgtggcaactgagaggaaagtaccccaaccggggattcccgaagatttttaatgacaaaacagttggcggtgaggcccgaaaggtctatgacgacgcccacaatatgttgaacacactgatcagccagaaaaaacttagagcgaggggagttgtcggcttttggcctgcccagtcaatccaagatgacatacatctttacgccgaagccgctgttccgcaggccgcagagcctattgccactttctatggccttagacagcaagctgagaaagacagcgcaagtactgaaccttactattgccttagcgacttcatcgcccctctgcatagtggcattcgggattatctcgggctcttcgctgtggcttgcttcggggttgaggagctgtccaaggcttacgaagatgacggagatgactatagtagtatcatggtgaaagcactgggcgaccgactggcggaggctttcgccgaagagttgcatgaacgggtgcggcgtgaactgtgggcatactgcgggtccgaacagcttgacgttgcggatttgcgacgcctgcgctataaaggcataagaccagcgccagggtacccaagccaacctgaccataccgaaaagctgacaatgtggagacttgccgatatagagcagtcgaccggtatacggctgaccgagtccctagccatggcccctgcatctgccgtttccggtctatacttctccaacctgaagagtaaatattttgccgtaggcaagatcagcaaagatcaggtcgaggactacgcactgaggaaaaatatctccgttgccgaagtggagaagtggctggggcctattctaggctacgatacggattag

SEQ ID NO: 341032 - DNA, 3357 bp, Artificial Sequence
  derived and/or modified sequence
atgtcaccagctctgcaggatctgtcacaacccgagggcctgaaaaagacactgagagatgagattaatgctatacttcagaagaggatcatggtgctcgacgggggaatggggacgatgattcagcgagagaagctaaatgaagaacacttccggggacaggagtttaaggaccacgcaagacctttaaagggaaataacgacatcttgtcaatcacacaacctgacgtcatctaccagatccacaaagagtatttgctagctggggcagatattattgagaccaacactttttcttcaactagcatagcccaggccgattacggacttgagcatttggcctacagaatgaatatgtgctctgcaggagtggccagaaaggccgcagaagaggtaacactgcagacaggaatcaaacgattcgtggccggagcccttggccctacaaataaaacgttgtctgtcagcccatcagtagagcggccagattaccggaacattactttcgatgagctagtcgaggcttatcaggagcaggccaaggggctgctagacggtggggtcgatatactacttatagaaactatttttgatacagcaaacgcaaaggccgcactcttcgcgctgcaaaacctctttgaagagaagtatgcacccagacctatcttcatcagcggcaccatcgtggacaaatcaggacggacactgagtggacagacaggagaaggctttgtgatttcagtgagtcacggcgaaccactttgtataggcctgaattgtgctctcggtgcagccgagatgcgccctttcatcgagattatcgggaagtgcacaaccgcatatgtcctatgctaccccaatgcgggattgcccaacacattcggcgactatgatgagacccctagcatgatggccaagcatttgaaagatttcgctatggatggtttggtgaacattgtcggtgggtgctgcggcagcacgcccgaccacatcagagagattgccgaggctgtaaaaaattgcaagccgcgagtaccacctgctaccgcctttgaaggacacatgttgctcagcggattagaaccgtttcgtatcggtccttacactaacttcgtgaatataggagagcggtgtaacgtcgccggatctcggaagtttgcaaagctcattatggctggcaactacgaggaggccctctgcgttgctaaggttcaggtggagatgggggcacaggttctagatgtcaacatggacgacggcatgttagatggcccatctgccatgactaggttttgcaatcttatcgcttctgagccggacatcgcaaaggtaccactatgcatcgactccagtaacttcgcagtgattgaagcagggctcaagtgttgtcaagggaagtgtatcgtcaactctatttccctcaaagaaggtgaggacgactttctggaaaaggctagaaagatcaaaaaatacggtgctgcaatggtggttatggcgttcgatgaggaaggacagacacagggtacaggagggaagaaggtgattcaaactgacgaatggcgaaatggacccgttgaggagcggttagagtacgccttggtgaagggcattgagaaacacattatcgaggacaccgaagaagccaggttgaatcagaagaaatatccgagaccactgaatattatcgaaggccctctaatgaacggaatgaaaattgtgggtgatctcttcggagctggtaaaatgtttctgccccaggtgattaagtccgcgagagtgatgaagaaagcagttgggcacctaatcccattcatggagaaggagagggaagagacaagggtgctcaatgggacagtcgaggaggaagatccctatcaggggaccatagtactcgccacagtaaaaggggatgtgcacgatattggaaagaacatcgttggcgtggtgctggggtgcaacaattttcgcgtgatagacctgggcgtgatgacaccttgtgataagatcctgaaggccgcattggatcataaggccgacataattggcctctctgggcttatcactccatccctggatgaaatgatctttgtggctaaggagatggaacggctggctatccgaatccccctactaattgggggagccacgacctctaagactcatacagccgtgaagattgcaccaagatattcagcccctgttatccatgttcttgacgccagcaagtctgtcgtggtgtgttctcagctacttgacgagaacctgaaagatgagtattttgaggagatcatggaggaatacgaggatattagacaggatcactacgagtcgctgaaggaaagaaggtatttaccactaagccaggccaggaaatcagggttccaaatggactggctgtctgaacctcatcctgtaaagccgacttttattggcacccaagtcttcgaggattacgatctacaaaagcttgttgactacatcgactggaagcctttctttgatgtctggcaactgagaggcaagtatccaaaccgcggttttcctaagatcttcaatgacaagacggtcggcggagaagctaggaaagtttacgatgatgcgcacaacatgctaaataccctaatctcccaaaagaagcttagggcacggggtgtcgtgggattttggcccgctcagagcatccaggacgatattcacctctacgccgaggccgctgtgccgcaggccgcagagcctatcgctacattctacggcctgagacagcaggccgaaaaggacagtgcaagcacagagccatactactgtctttcagatttcattgcgccactccacagcggaatccgcgattatctgggtctttttgctgtcgcctgtttcggagtggaggagctgagtaaagcctatgaagacgatggggatgattactcatcaatcatggtaaaggcactgggggatagactcgcggaagccttcgctgaggaactgcacgaacgagtgcggcgagagctctgggcgtactgcggctcagaacagctggatgtagccgatcttcgccgtctccgatataagggaattaggccagcaccaggttatcccagccagccggaccataccgagaaactgaccatgtggagattagccgatattgagcagtctactgggatcaggctcacggaatcactggccatggcccctgcctcggctgtgagcggcctgtactttagtaatcttaaatctaagtacttcgctgtgggtaaaatctctaaggatcaggtggaggattatgctctgcgtaagaatatctccgtggccgaggtcgagaaatgcatgagcgtgtaccgtaaaataggggagtag

SEQ ID NO: 341033 - DNA, 690 bp, Artificial Sequence
  derived and/or modified sequence
atgtcagccggtttgcgagctgggtgtcacgtggttctgttatgccgcttctccctcggctcattctcggttccaagtcgcgatagtgcttccggacgtgcttgtcttgcggcacgccctacccccagaactggaagggtacccggaaaaaaggccagggcccctgctgtggcggctccctcccccgagcggggtccacgcgcactgagagcattcggggtgcgctcccccccagcaacccgagctaacggcagaaggcagaaaaccagggccctgtgcggcaggttggcctggcgctggttggcctggcctttggcggtggtaacctgtggtgaacatgtgttcagcgcggctccttcagcccagggcggagactcgacaacatgtcatcctagaagtaaaacttgtagaaatccagagtatcttcttgcaggcgcagacatcatcgagaccaacaccttcagctccaccagcatagcccaagccgactacgggctggagcacctggcttacaggatgaacatgtgttccgctggggtagccagaaaagcagccgaggaggttacccttcaaacaggcatcaaacggtttgttgcaggcgctcttggcccaactaataagactttgtctgtgtccccatccgtggagagaccagattacaggaatatcaatctacccgtcggtagctag

SEQ ID NO: 341034 - DNA, 5234 bp, Artificial Sequence
  derived and/or modified sequence
ggcatgctagatggtccaagtgcaatgaccagattttgcaacttaattgcttccgagccagacatcgcaaaggtacctttgtgcatcgactcctccaattttgctgtgattgaagctgggttaaagtgctgccaagggaagtgcattgtcaatagcattagtctgaaggaaggagaggcaacagaaacagacacaaaaatcagagtgtgcacccgggcctaccatctgcttgtgaaaaaactgggctttaatccaaatgacattatttttgaccctaatatcctaaccattgggactggaatggaggaacacaacttgtatgccattaattttatccatgcaacaaaagtcattaaagaaacattacctggagccagaataagtggaggtctttccaacttgtccttctccttccgaggaatggaagccattcgagaagcaatgcatggggttttcctttaccatgcaatcaagtctggcatggacatggggatagtgaatgctggaaacctccctgtgtatgatgatatccataaggaacttctgcagctctgtgaagatctcatctggaataaagaccctgaggccactgagaagctcttacgttatgcccagactcaaggcacaggagggaagaaagtcattcagactgatgagtggagaaatggccctgtcgaagaacgccttgagtatgcccttgtgaagggcattgaaaaacatattattgaggatactgaggaagccaggttaaaccaaaaaaaatatccccgacctctcaatataattgaaggacccctgatgaatggaatgaaaattgttggtgatctttttggagctggaaaaatgtttctacctcaggttataaagtcagcccgggttatgaagaaggctgttggccaccttatccctttcatggaaaaagaaagagaagaaaccagagtgcttaacggcacagtagaagaagaggacccttaccagggcaccatcgtgctggccactgttaaaggcgacgtgcacgacataggcaagaacatagttggagtagtccttggctgcaataatttccgagttattgatttaggagtcatgactccatgtgataagatactgaaagctgctcttgaccacaaagcagatataattggcctgtcaggactcatcactccttccctggatgaaatgatttttgttgccaaggaaatggagagattagctataaggattccattgttgattggaggagcaaccacttcaaaaacccacacagcagttaaaatagctccgagatacagtgcacctgtaatccatgtcctggacgcgtccaagagtgtggtggtgtgttcccagctgttagatgaaaatctaaaggatgaatactttgaggaaatcatggaagaatatgaagatattagacaggaccattatgagtctctcaaggagaggagatacttacccttaagtcaagccagaaaaagtggtttccaaatggattggctgtctgaacctcacccagtgaagcccacgtttattgggacccaggtctttgaagactatgacctgcagaagctggtggactacattgactggaagcctttctttgatgtctggcagctccggggcaagtacccgaatcgaggctttcccaagatatttaacgacaaaacagtaggtggagaggccaggaaggtctacgatgatgcccacaatatgctgaacacactgattagtcaaaagaaactccgggcccggggtgtggttgggttctggccagcacagagtatccaagacgacattcacctgtacgcagaggctgctgtgccccaggctgcagagcccatagccaccttctatgggttaaggcaacaggctgagaaggactctgccagcacggagccatactactgcctctcagacttcatcgctcccttgcattctggcatccgtgactacctgggcctgtttgccgttgcctgctttggggtagaagagctgagcaaggcctatgaggatgatggtgacgactacagcagcatcatggtcaaggcgctgggggaccggctggcagaggcctttgcagaagagctccatgaaagagttcgccgagaactgtgggcctactgtggcagtgagcagctggacgtcgcagacctgcgcaggctgcggtacaagggcatccgcccggctcctggctaccccagccagcccgaccacaccgagaagctcaccatgtggagactcgcagacatcgagcagtctacaggcattaggttaacagaatcattagcaatggcacctgcttcagcagtctcaggcctctacttctccaatttgaagtccaaatattttgctgtggggaagatttccaaggatcaggttgaggattatgcattgaggaagaacatatctgtggctgaggttgagaaatggcttggacccattttgggatatgatacagactaactttttttttttttttgccttttttattcttgatgatcctcaaggaaatacaacctagggtgccttaaaaataacaacaacaaaaaacctgtgtgcatctggctgacacttacctgcttctggttttcgaagactatttagtggaaccttgtagaggagcagggtcttcctgcagtgcctggaaaacaggcgctgtttttttgggaccttgcgtgaagagcagtgagcagggttcctgtggtttccctggtccctctgagatggggacagactgaagacagaggtcgtttgatttcaaagcaagtcaacctgcttttttctgtttttacagtggaatctaggaggccacttagtcgtctttttttcctcttagaagaaaagcctgaaactgagttgaatagagaagtgtgaccctgtgacaaaatgatactgtgagaaatggggcattttaatctaagtggttataacagtggattctgacggggaaggtgtagctctgttctcttcggaagacctcgttttctaaaggctggactaaatggctgcagaactccctttggcaaaaggcatgcgctcactgcttgcttgtcagaaacactgaagccatttgccccagtgtggtcaagcagccatgctttctgggcattttcgtcctcccataatttcatatttccgtacccctgaggaaacaaaaaggaaatgaggagagaaagttactgttaagggtggttaacattttttttgttttgttttgttttggtttttttttttttgagacagagtctggctctgtcgcccaggctggagtgcaggggcgcaatctcggctcatagcaagctccgcctcctgggttcatgccattctcctgcctcagcctccagagtagctgggactacaggtgcccgccaccacacccggctaattttttgtgtttttacaaaatacaaaaaagtagagacaggatttcactgtgttagccaggatggtcttgatctcccgacctcgtgatctgcccacctcagcctcccaaaatgctgggattacaggcgtgagccaccgagcctggccggttaacatcttttaattgtttccaggattgagcaggttctcagctgggctctgatatcccgtgcggagttggacaagtgggcagcataaagtcactcatttcttaccattttattcccctcaattctcaatatattcagtaatgaagaatggtgccaccactcaagcaacaagcctcaaactcaaccatgtcatctttttcttggatgattgcagttatttcaaaaatttgcatgcaaaatatacactcatcctacttcaagatggtggtggcaatagtcaggagaaggtaacattggagtcctggtttgattcgaaggatgaagacgaagaagcaagggaggaacaaatgaagaaccatctttgttcatgaataggaatattcaagattataaaggtatcaggtctcctaaaattgatctatggatttaataccattttcaatggaaattccaacagattttattgaatgaaacaagcaggtgtttatatggagtagcaaaggacttaaaattaccaaatgcttctaaatatgaaggagaggttggggacacgcaccctatgtgataccaagttttattgtcaagacagtgtcatggtgcagaggtaggcattctgagcaggggaacaaaataagggcctagaaactcacccgtgcatatgttgacctttgcaaaatgacctggtgacatggcaagtcagtggggacaggaaggaccactccctaagtaatcccagaacaatggctattcatgtgggaaaaaaagaaattttactttctctcaccttacctggtgataagttccaaatatgttaagggctttaatacaaaaagcaaaaattgtcagtgtttggatgaaaaaagccttagggcaggaaagaatctcttgagacataaagtagtaatcataaaggacaagatggttaagtcaattctgttaaaactcaaggcttatattaagcaaacacttgaagtgagaagatgatccacaacttgagaagacatttataatacaaataactgatgaaggattcataatcacaaatatagagaattcctatttaaaaaaatagaaaaatagtgaagactacacaagaggaaatagggcttttaaataaatagatgttctgtagcattggtcagggaaatatgaattaggaccacaatgagattccattttatatccataagatttgcaaaggttgggtctgacagtaccagttgttagatctgtagggacttgtacaacattgtggatgtgtaaacaggcaccactgctttaaaaaacaattatcccttacagacttgaacatttgcagacgttatgatcttgcttccaactcccacctgtatgtccagcaaactcttgcatgtggccactaggaggaatgtgtaagaatgttcatagttacatatttataatagttaataactggaaaaagtgaaatgtatgtctgtctacaggaaaataggtgaataattagatatatatattcattctacgggatattattcagtagtggaaatgagtgaactacagctatacctcacaataagaatgaatctcagaaaatattaaggaaaaaagcaagtttgaagagaccacatggggcgtactatttttattgagcccaaaaacaagcaaaaccaaagaatatgtagtctaagcatacgtatacaataaaactatgctattaaaaaaaaa

SEQ ID NO: 341035 - DNA, 3780 bp, Artificial Sequence
  derived and/or modified sequence
agattgagcgcagaactaaccgcgctctgaaaggttctaaatgtctgcggggctcagagccggatgtcacgtcgtcctcctctgccggttttctcttgggtccttttccgtgccgtcccgcgactccgcctctggccgcgcgtgtctggctgctaggccgacaccaaggactggccgggtacccgggaagaaagcacgtgctccagcagttgccgcgcccagccccgagagaggccctagggcgctgcgggctttcggggtccgcagtccccccgcgacgcgagccaacgggaggcgtcaaaagacccgggccttgtgtggcaggctcgcctggcgctggctggcgtggcccttggccgtcgtcacctgtggagagcacgtcttctctgccgcgccctctgcgcaaggaggagactcgacaacatgtcacccgcgctccaagacctgtcgcaacccgaaggtctgaagaaaaccctgcgggatgagatcaatgccattctgcagaagaggattatggtgctggatggagggatggggaccatgatccagcgggagaagctaaacgaagaacacttccgaggtcaggaatttaaagatcatgccaggccgctgaaaggcaacaatgacattttaagtataactcagcctgatgtcatttaccaaatccataaggaatacttgctggctggggcagatatcattgaaacaaatacttttagcagcactagtattgcccaagctgactatggccttgaacacttggcctaccggatgaacatgtgctctgcaggagtggccagaaaagctgccgaggaggtaactctccagacaggaattaagaggtttgtggcaggggctctgggtccgactaataagacactctctgtgtccccatctgtggaaaggccggattataggaacatcacatttgatgagcttgttgaagcataccaagagcaggccaaaggacttctggatggcggggttgatatcttactcattgaaactatttttgatactgccaatgccaaggcagccttgtttgcactccaaaatctttttgaggagaaatatgctccccggcctatctttatttcagggacgatcgttgataaaagtgggcggactctttccggacagacaggagagggatttgtcatcagcgtgtctcatggagaaccactctgcattggattaaattgtgctttgggtgcagctgaaatgagaccttttattgaaataattggaaaatgtacaacagcctatgtcctctgttatcccaatgcaggtcttcccaacacctttggtgactatgatgaaacgccttctatgatggccaagcacctaaaggattttgctatggatggcttggtcaatatagttggaggatgctgtgggtcaacaccagatcatatcagggaaattgctgaagctgtgaaaaattgtaagcctagagttccacctgccactgcttttgaaggacatatgttactgtctggtctagagcccttcaggattggaccgtacaccaactttgttaacattggagagcgctgtaatgttgcaggatcaaggaagtttgctaaactcatcatggcaggaaactatgaagaagccttgtgtgttgccaaagtgcaggtggaaatgggagcccaggtgttggatgtcaacatggatgatggcatgctagatggtccaagtgcaatgaccagattttgcaacttaattgcttccgagccagacatcgcaaaggtacctttgtgcatcgactcctccaattttgctgtgattgaagctgggttaaagtgctgccaagggaagtgcattgtcaatagcattagtctgaaggaaggagaggacgacttcttggagaaggccaggaagattaaaaagtatggagctgctatggtggtcatggcttttgatgaagaaggacagactcaaggcacaggagggaagaaagtcattcagactgatgagtggagaaatggccctgtcgaagaacgccttgagtatgcccttgtgaagggcattgaaaaacatattattgaggatactgaggaagccaggttaaaccaaaaaaaatatccccgacctctcaatataattgaaggacccctgatgaatggaatgaaaattgttggtgatctttttggagctggaaaaatgtttctacctcaggttataaagtcagcccgggttatgaagaaggctgttggccaccttatccctttcatggaaaaagaaagagaagaaaccagagtgcttaacggcacagtagaagaagaggacccttaccagggcaccatcgtgctggccactgttaaaggcgacgtgcacgacataggcaagaacatagttggagtagtccttggctgcaataatttccgagttattgatttaggagtcatgactccatgtgataagatactgaaagctgctcttgaccacaaagcagatataattggcctgtcaggactcatcactccttccctggatgaaatgatttttgttgccaaggaaatggagagattagctataaggattccattgttgattggaggagcaaccacttcaaaaacccacacagcagttaaaatagctccgagatacagtgcacctgtaatccatgtcctggacgcgtccaagagtgtggtggtgtgttcccagctgttagatgaaaatctaaaggatgaatactttgaggaaatcatggaagaatatgaagatattagacaggaccattatgagtctctcaaggagaggagatacttacccttaagtcaagccagaaaaagtggtttccaaatggattggctgtctgaacctcacccagtgaagcccacgtttattgggacccaggtctttgaagactatgacctgcagaagctggtggactacattgactggaagcctttctttgatgtctggcagctccggggcaagtacccgaatcgaggctttcccaagatatttaacgacaaaacagtaggtggagaggccaggaaggtctacgatgatgcccacaatatgctgaacacactgattagtcaaaagaaactccgggcccggggtgtggttgggttctggccagcacagagtatccaagacgacattcacctgtacgcagaggctgctgtgccccaggctgcagagcccatagccaccttctatgggttaaggcaacaggctgagaaggactctgccagcacggagccatactactgcctctcagacttcatcgctcccttgcattctggcatccgtgactacctgggcctgtttgccgttgcctgctttggggtagaagagctgagcaaggcctatgaggatgatggtgacgactacagcagcatcatggtcaaggcgctgggggaccggctggcagaggcctttgcagaagagctccatgaaagagttcgccgagaactgtgggcctactgtggcagtgagcagctggacgtcgcagacctgcgcaggctgcggtacaagggcatccgcccggctcctggctaccccagccagcccgaccacaccgagaagctcaccatgtggagactcgcagacatcgagcagtctacaggcattaggttaacagaatcattagcaatggcacctgcttcagcagtctcaggcctctacttctccaatttgaagtccaaatattttgctgtggggaagatttccaaggatcaggttgaggattatgcattgaggaagaacatatctgtggctgaggttgagaaatgtatgtctgtctacaggaaaataggtgaataa

SEQ ID NO: 341036 - DNA, 998 bp, Artificial Sequence
  derived and/or modified sequence
aggttctaaatgtctgcggggctcagagccggatgtcacgtcgtcctcctctgccggttttctcttgggtccttttccgtgccgtcccgcgactccgcctctggccgcgcgtgtctggctgctaggccgacaccaaggactggccgggtacccgggaagaaagcacgtgctccagcagttgccgcgcccagccccgagagaggccctagggcgctgcgggctttcggggtccgcagtccccccgcgacgcgagccaacgggaggcgtcaaaagacccgggccttgtgtggcaggctcgcctggcgctggctggcgtggcccttggccgtcgtcacctgtggagagcacgtcttctctgccgcgccctctgcgcaaggaggagactcgacaacatgtcacccgcgctccaagacctgtcgcaacccggaatacttgctggctggggcagatatcattgaaacaaatacttttagcagcactagtattgcccaagctgactatggccttgaacacttggcctaccggatgaacatgtgctctgcaggagtggccagaaaagctgccgaggaggtaactctccagacaggaattaagaggtttgtggcaggggctctgggtccgactaataagacactctctgtgtccccatctgtggaaaggccggattataggaacatcaacctgccagtggggagctaacttacccttgctcttgggctgtacaaggtgaagtacgcatttgatgagcttgttgaagcataccaagagcaggccaaaggacttctggatggcggggttgatatcttactcattgaaactatttttgatactgccaatgccaaggcagccttgtttgcactccaaaatctttttgaggagaaatatgctccccggcctatctttatttcagggacgatcgttgataaaagtgggcggactctttccggacagacaggagagggatttgtcatcagcgtgtctcatggagaaccactctg

SEQ ID NO: 341037 - DNA, 2460 bp, Artificial Sequence
  derived and/or modified sequence
ggcatgctggacggccccagcgccatgaccagattctgcaacctgatcgccagcgagcccgacatcgccaaggtgcccctgtgcatcgacagcagcaacttcgccgtgatcgaggccggcctgaagtgctgccagggcaagtgcatcgtgaacagcatcagcctgaaggagggcgaggccaccgagaccgacaccaagatcagagtgtgcaccagagcctaccacctgctggtgaagaagctgggcttcaaccccaacgacatcatcttcgaccccaacatcctgaccatcggcaccggcatggaggagcacaacctgtacgccatcaacttcatccacgccaccaaggtgatcaaggagaccctgcccggcgccagaatcagcggcggcctgagcaacctgagcttcagcttcagaggcatggaggccatcagagaggccatgcacggcgtgttcctgtaccacgccatcaagagcggcatggacatgggcatcgtgaacgccggcaacctgcccgtgtacgacgacatccacaaggagctgctgcagctgtgcgaggacctgatctggaacaaggaccccgaggccaccgagaagctgctgagatacgcccagacccagggcaccggcggcaagaaggtgatccagaccgacgagtggagaaacggccccgtggaggagagactggagtacgccctggtgaagggcatcgagaagcacatcatcgaggacaccgaggaggccagactgaaccagaagaagtaccccagacccctgaacatcatcgagggccccctgatgaacggcatgaagatcgtgggcgacctgttcggcgccggcaagatgttcctgccccaggtgatcaagagcgccagagtgatgaagaaggccgtgggccacctgatccccttcatggagaaggagagagaggagaccagagtgctgaacggcaccgtggaggaggaggacccctaccagggcaccatcgtgctggccaccgtgaagggcgacgtgcacgacatcggcaagaacatcgtgggcgtggtgctgggctgcaacaacttcagagtgatcgacctgggcgtgatgaccccctgcgacaagatcctgaaggccgccctggaccacaaggccgacatcatcggcctgagcggcctgatcacccccagcctggacgagatgatcttcgtggccaaggagatggagagactggccatcagaatccccctgctgatcggcggcgccaccaccagcaagacccacaccgccgtgaagatcgcccccagatacagcgcccccgtgatccacgtgctggacgccagcaagagcgtggtggtgtgcagccagctgctggacgagaacctgaaggacgagtacttcgaggagatcatggaggagtacgaggacatcagacaggaccactacgagagcctgaaggagagaagatacctgcccctgagccaggccagaaagagcggcttccagatggactggctgagcgagccccaccccgtgaagcccaccttcatcggcacccaggtgttcgaggactacgacctgcagaagctggtggactacatcgactggaagcccttcttcgacgtgtggcagctgagaggcaagtaccccaacagaggcttccccaagatcttcaacgacaagaccgtgggcggcgaggccagaaaggtgtacgacgacgcccacaacatgctgaacaccctgatcagccagaagaagctgagagccagaggcgtggtgggcttctggcccgcccagagcatccaggacgacatccacctgtacgccgaggccgccgtgccccaggccgccgagcccatcgccaccttctacggcctgagacagcaggccgagaaggacagcgccagcaccgagccctactactgcctgagcgacttcatcgcccccctgcacagcggcatcagagactacctgggcctgttcgccgtggcctgcttcggcgtggaggagctgagcaaggcctacgaggacgacggcgacgactacagcagcatcatggtgaaggccctgggcgacagactggccgaggccttcgccgaggagctgcacgagagagtgagaagagagctgtgggcctactgcggcagcgagcagctggacgtggccgacctgagaagactgagatacaagggcatcagacccgcccccggctaccccagccagcccgaccacaccgagaagctgaccatgtggagactggccgacatcgagcagagcaccggcatcagactgaccgagagcctggccatggcccccgccagcgccgtgagcggcctgtacttcagcaacctgaagagcaagtacttcgccgtgggcaagatcagcaaggaccaggtggaggactacgccctgagaaagaacatcagcgtggccgaggtggagaagtggctgggccccatcctgggctacgacaccgactag

SEQ ID NO: 341038 - DNA, 3357 bp, Artificial Sequence
  derived and/or modified sequence
atgagccccgccctgcaggacctgagccagcccgagggcctgaagaagaccctgagagacgagatcaacgccatcctgcagaagagaatcatggtgctggacggcggcatgggcaccatgatccagagagagaagctgaacgaggagcacttcagaggccaggagttcaaggaccacgccagacccctgaagggcaacaacgacatcctgagcatcacccagcccgacgtgatctaccagatccacaaggagtacctgctggccggcgccgacatcatcgagaccaacaccttcagcagcaccagcatcgcccaggccgactacggcctggagcacctggcctacagaatgaacatgtgcagcgccggcgtggccagaaaggccgccgaggaggtgaccctgcagaccggcatcaagagattcgtggccggcgccctgggccccaccaacaagaccctgagcgtgagccccagcgtggagagacccgactacagaaacatcaccttcgacgagctggtggaggcctaccaggagcaggccaagggcctgctggacggcggcgtggacatcctgctgatcgagaccatcttcgacaccgccaacgccaaggccgccctgttcgccctgcagaacctgttcgaggagaagtacgcccccagacccatcttcatcagcggcaccatcgtggacaagagcggcagaaccctgagcggccagaccggcgagggcttcgtgatcagcgtgagccacggcgagcccctgtgcatcggcctgaactgcgccctgggcgccgccgagatgagacccttcatcgagatcatcggcaagtgcaccaccgcctacgtgctgtgctaccccaacgccggcctgcccaacaccttcggcgactacgacgagacccccagcatgatggccaagcacctgaaggacttcgccatggacggcctggtgaacatcgtgggcggctgctgcggcagcacccccgaccacatcagagagatcgccgaggccgtgaagaactgcaagcccagagtgccccccgccaccgccttcgagggccacatgctgctgagcggcctggagcccttcagaatcggcccctacaccaacttcgtgaacatcggcgagagatgcaacgtggccggcagcagaaagttcgccaagctgatcatggccggcaactacgaggaggccctgtgcgtggccaaggtgcaggtggagatgggcgcccaggtgctggacgtgaacatggacgacggcatgctggacggccccagcgccatgaccagattctgcaacctgatcgccagcgagcccgacatcgccaaggtgcccctgtgcatcgacagcagcaacttcgccgtgatcgaggccggcctgaagtgctgccagggcaagtgcatcgtgaacagcatcagcctgaaggagggcgaggacgacttcctggagaaggccagaaagatcaagaagtacggcgccgccatggtggtgatggccttcgacgaggagggccagacccagggcaccggcggcaagaaggtgatccagaccgacgagtggagaaacggccccgtggaggagagactggagtacgccctggtgaagggcatcgagaagcacatcatcgaggacaccgaggaggccagactgaaccagaagaagtaccccagacccctgaacatcatcgagggccccctgatgaacggcatgaagatcgtgggcgacctgttcggcgccggcaagatgttcctgccccaggtgatcaagagcgccagagtgatgaagaaggccgtgggccacctgatccccttcatggagaaggagagagaggagaccagagtgctgaacggcaccgtggaggaggaggacccctaccagggcaccatcgtgctggccaccgtgaagggcgacgtgcacgacatcggcaagaacatcgtgggcgtggtgctgggctgcaacaacttcagagtgatcgacctgggcgtgatgaccccctgcgacaagatcctgaaggccgccctggaccacaaggccgacatcatcggcctgagcggcctgatcacccccagcctggacgagatgatcttcgtggccaaggagatggagagactggccatcagaatccccctgctgatcggcggcgccaccaccagcaagacccacaccgccgtgaagatcgcccccagatacagcgcccccgtgatccacgtgctggacgccagcaagagcgtggtggtgtgcagccagctgctggacgagaacctgaaggacgagtacttcgaggagatcatggaggagtacgaggacatcagacaggaccactacgagagcctgaaggagagaagatacctgcccctgagccaggccagaaagagcggcttccagatggactggctgagcgagccccaccccgtgaagcccaccttcatcggcacccaggtgttcgaggactacgacctgcagaagctggtggactacatcgactggaagcccttcttcgacgtgtggcagctgagaggcaagtaccccaacagaggcttccccaagatcttcaacgacaagaccgtgggcggcgaggccagaaaggtgtacgacgacgcccacaacatgctgaacaccctgatcagccagaagaagctgagagccagaggcgtggtgggcttctggcccgcccagagcatccaggacgacatccacctgtacgccgaggccgccgtgccccaggccgccgagcccatcgccaccttctacggcctgagacagcaggccgagaaggacagcgccagcaccgagccctactactgcctgagcgacttcatcgcccccctgcacagcggcatcagagactacctgggcctgttcgccgtggcctgcttcggcgtggaggagctgagcaaggcctacgaggacgacggcgacgactacagcagcatcatggtgaaggccctgggcgacagactggccgaggccttcgccgaggagctgcacgagagagtgagaagagagctgtgggcctactgcggcagcgagcagctggacgtggccgacctgagaagactgagatacaagggcatcagacccgcccccggctaccccagccagcccgaccacaccgagaagctgaccatgtggagactggccgacatcgagcagagcaccggcatcagactgaccgagagcctggccatggcccccgccagcgccgtgagcggcctgtacttcagcaacctgaagagcaagtacttcgccgtgggcaagatcagcaaggaccaggtggaggactacgccctgagaaagaacatcagcgtggccgaggtggagaagtgcatgagcgtgtacagaaagatcggcgagtag

SEQ ID NO: 341039 - DNA, 690 bp, Artificial Sequence
  derived and/or modified sequence
atgagcgccggcctgagagccggctgccacgtggtgctgctgtgcagattcagcctgggcagcttcagcgtgcccagcagagacagcgccagcggcagagcctgcctggccgccagacccacccccagaaccggcagagtgcccggcaagaaggccagagcccccgccgtggccgcccccagccccgagagaggccccagagccctgagagccttcggcgtgagaagcccccccgccaccagagccaacggcagaagacagaagaccagagccctgtgcggcagactggcctggagatggctggcctggcccctggccgtggtgacctgcggcgagcacgtgttcagcgccgcccccagcgcccagggcggcgacagcaccacctgccaccccagaagcaagacctgcagaaaccccgagtacctgctggccggcgccgacatcatcgagaccaacaccttcagcagcaccagcatcgcccaggccgactacggcctggagcacctggcctacagaatgaacatgtgcagcgccggcgtggccagaaaggccgccgaggaggtgaccctgcagaccggcatcaagagattcgtggccggcgccctgggccccaccaacaagaccctgagcgtgagccccagcgtggagagacccgactacagaaacatcaacctgcccgtgggcagctag

SEQ ID NO: 341040 - protein, 1114 aa, Artificial Sequence
  derived and/or modified sequence
MLASSSRIRAAWTRALLLPLLLAGPVGCLSRQELFPFGPGQGDLELEDGDDFVSPALELSGALRFYDRSDIDAVYVTTNGIIATSEPPAKESHPGLFPPTFGAVAPFLADLDTTDGLGKVYYREDLSPSITQRAAECVHRGFPEISFQPSSAVVVTWESVAPYQGPSRDPDQKGKRNTFQAVLASSDSSSYAIFLYPEDGLQFHTTFSKKENNQVPAVVAFSQGSVGFLWKSNGAYNIFANDRESVENLAKSSNSGQQGVWVFEIGSPATTNGVVPADVILGTEDGAEYDDEDEDYDLATTRLGLEDVGTTPFSYKALRRGGADTYSVPSVLSPRRAATERPLGPPTERTRSFQLAVETFHQQHPQVIDVDEVEETGVVFSYNTDSRQTCANNRHQCSVHAECRDYATGFCCSCVAGYTGNGRQCVAEGSPQRVNGKVKGRIFVGSSQVPIVFENTDLHSYVVMNHGRSYTAISTIPETVGYSLLPLAPVGGIIGWMFAVEQDGFKNGFSITGGEFTRQAEVTFVGHPGNLVIKQRFSGIDEHGHLTIDTELEGRVPQIPFGSSVHIEPYTELYHYSTSVITSSSTREYTVTEPERDGASPSRIYTYQWRQTITFQECVHDDSRPALPSTQQLSVDSVFVLYNQEEKILRYALSNSIGPVREGSPDALQNPCYIGTHGCDTNAACRPGPRTQFTCECSIGFRGDGRTCYEVEKTRCQHEREHILGAAGATDPQRPIPPGLFVPECDAHGHYAPTQCHGSTGYCWCVDRDGREVEGTRTRPGMTPPCLSTVAPPIHQGPAVPTAVIPLPPGTHLLFAQTGKIERLPLEGNTMRKTEAKAFLHVPAKVIIGLAFDCVDKMVYWTDITEPSIGRASLHGGEPTTIIRQDLGSPEGIAVDHLGRNIFWTDSNLDRIEVAKLDGTQRRVLFETDLVNPRGIVTDSVRGNLYWTDWNRDNPKIETSYMDGTNRRILVQDDLGLPNGLTFDAFSSQLCWVDAGTNRAECLNPSQPSRRKALEGLQYPFAVTSYGKNLYFTDWKMNSVVALDLAISKETDAFQPHKQTRLYGITTALSQCPQGHNYCSVNNGGCTHLCLATPGSRTCRCPDNTLGVDCIEQK

SEQ ID NO: 341041 - DNA, 3345 bp, Artificial Sequence
  derived and/or modified sequence
atgctcgccagctcttctcggatcagggctgcctggacccgcgctcttttgctgccattgctcctagcgggaccagtcgggtgcctgtctagacaggagctctttccattcgggcctggccagggagatctggagctggaagatggtgatgattttgtcagcccagcactggagctttctggagccctgagattctatgacagatccgatattgacgctgtgtatgtcacaactaacggaataatagcaacgtccgaaccccctgcaaaagaaagccacccaggcctcttcccacccacttttggcgcagtggcaccattcttagctgatttagacacaacggacggactgggcaaggtgtattatagggaagatctttctccttccataacccaacgggctgccgagtgtgtgcacagaggattccccgaaatttccttccagccttcctctgccgtggttgtgacatgggaatccgtcgccccataccaggggcctagtagggacccggaccaaaaggggaagagaaacacgtttcaggcagttctggcttctagcgatagctcctcctatgctatcttcttataccctgaggatgggttgcagttccataccactttctccaagaaagagaataaccaagtcccggcagtggtggcattcagccagggatcagtgggcttcttgtggaagtctaatggtgcttacaacatctttgccaatgatagagagtctgtggagaatctggccaagtcttccaactccgggcagcagggcgtttgggtctttgagatcgggtcccccgctaccactaatggcgtagtacccgctgacgttatcctgggaacagaggacggagcagagtatgatgatgaggatgaggactacgaccttgcaacaaccagactgggcctcgaagatgtgggcaccacccccttctcctacaaagcgctccgcaggggaggtgccgacacctattctgtaccatccgtgctgtctccgcgacgcgctgcaaccgagagaccactcgggccacctaccgagcggacgaggagtttccagctcgccgttgagacctttcaccagcagcacccacaagttatcgatgttgatgaggtggaggagactggcgtggtattcagttataacacagactccaggcagacctgtgctaataatcgccatcagtgctcagtacacgcagagtgcagggattatgctacgggattctgctgcagttgtgtggctgggtatacaggaaacggcagacaatgtgtggctgaaggcagcccacaacgcgtcaatggaaaggtcaaaggtcggatattcgtggggtcttcacaggtcccaatcgtgtttgagaataccgatctgcactcttacgtagtgatgaatcatggtcgaagctatactgccattagcacaattcctgagaccgtcggctacagcctgctgcctttagcgcctgttggagggatcattggctggatgttcgctgtggagcaggatgggtttaaaaacggcttcagcattaccgggggagagtttactcgccaagcagaggtgaccttcgtgggccacccaggaaacctggtgataaagcagagattcagcggtattgatgaacacggccacctgactattgacacggaattagaggggagagtacctcagattccctttggaagttcggtgcatattgagccatatactgaactctaccactactccaccagcgtcattacatcctcctctactagggagtatacagtgacggaacccgagcgggacggcgcatcaccgtcccgtatatacacatatcaatggagacagactatcacattccaggaatgcgttcacgacgattcccggcctgcactgccttctacacaacaactcagtgtcgatagtgtgttcgttctatataaccaggaagagaagattctgcgatatgccttaagcaatagcatcggccctgttagagagggaagtcccgacgctctgcaaaacccttgctatatcgggacccacggctgtgataccaacgctgcctgtaggcccggacccagaacacaatttacttgtgagtgttcaattggatttcgtggtgatggcaggacttgttacgaggtagaaaaaacgcggtgccagcatgagcgagaacacattttgggagcagctggagccaccgacccccagcgcccaatcccaccagggttgtttgtgccagagtgcgacgcccacgggcactatgcccctactcagtgccatggttctacaggctactgttggtgcgtagacagagacggcagggaggttgagggcaccaggacaagaccaggaatgaccccaccctgtctgtccaccgtggcccctcctattcatcaggggccagctgtgccaaccgctgttatacctcttcctccaggcacgcacctcctgtttgcccaaaccggtaagatcgaacgcctcccattggaaggtaatacaatgagaaaaaccgaagctaaagctttcttacatgtacccgctaaggtcatcattggcctagccttcgactgcgtcgataagatggtgtattggacagatatcaccgagccctctattggcagagcctcattacacggcggagaacccacaacaatcatacggcaagacctgggcagtccagagggcattgcggttgatcacctcggcaggaacatattctggactgactcaaaccttgatcgcatagaggtagctaagcttgatggtacacagagacgtgtgctatttgaaaccgatcttgttaacccgaggggaatagtgactgactcagttagggggaacctgtattggaccgactggaatagagacaaccccaagatcgagaccagctacatggatgggaccaatcgacgcatcctggtccaggacgacctgggactaccaaacggacttacctttgatgccttctccagccagctttgttgggtcgacgctggcacaaacagagctgagtgccttaatccgtctcagccaagtaggcgaaaagccctggagggattgcaatatccttttgcagtgaccagctacggcaaaaatctgtattttaccgactggaaaatgaattccgttgtcgccctcgacctggcaatatctaaagagaccgacgccttccagccccacaaacagacgagactgtacgggattactactgccctgtctcagtgtccacaagggcataactactgtagtgtgaacaacggcggatgtacccatctgtgtctcgccacaccagggtcccgaacgtgtaggtgcccggataatactctgggcgtggattgcatagaacaaaaatag

SEQ ID NO: 341042 - DNA, 3345 bp, Artificial Sequence
  derived and/or modified sequence
atgctcgcctcctcctctcggatacgtgccgcttggactcgagctctgctgctccctctcttactggctggacctgtggggtgcctctctagacaggagctgtttccctttgggcccggtcagggcgatttggaacttgaagatggggacgattttgtttcacccgccctcgagctcagcggagccctgcgcttttatgatcggagcgatatagatgctgtctatgtgaccaccaacggcatcatagcgacctctgaaccgcccgcaaaagaaagccatcccggcctctttcctccaacatttggtgccgtagccccattcttggcagacctcgatactacagacggcctggggaaggtttattaccgtgaagatctctcaccgagtatcacgcagagagctgctgaatgcgttcatcggggcttcccagaaattagtttccagccatcctcggccgtcgtggtgacatgggaaagtgtggcaccatatcagggccctagccgtgaccccgatcagaagggaaaacgcaacacttttcaagccgtacttgcctccagcgattcaagctcttacgctattttcctctatccagaagatggactgcagtttcatacaactttcagcaaaaaagagaacaatcaggtccctgcagtggtggccttctcacaaggatccgtcgggtttctctggaagagtaatggggcctacaatattttcgctaatgaccgcgagagcgttgagaatctagccaagtcatcaaacagcggacagcagggagtgtgggtttttgagattggaagcccagcaacaactaacggggtcgtaccagcagacgtgatcctgggaaccgaagatggcgccgagtacgacgacgaagacgaagactatgatctggccaccacccggcttgggcttgaggacgttggaacgaccccttttagctacaaggcccttcgacgtggtggcgccgatacgtactctgttccaagtgtcctctctccacggagggccgccaccgaaaggcccctcggcccgcctacagaacggacgcgaagtttccaactcgccgtcgaaacgttccaccaacagcacccccaggtgattgatgtagatgaagtggaggaaactggagtcgtcttttcttataacaccgatagcagacaaacctgcgcgaacaacaggcaccagtgtagtgtgcacgctgagtgtcgggattacgcaacagggttttgctgctcctgtgtcgccggttacaccggcaatggccgccaatgtgtggctgaagggagcccacagagagtcaacggtaaggtgaaaggccggatatttgtgggatcgtctcaggtgcccatcgtgtttgaaaatactgatctgcacagctacgttgtcatgaatcacggccggagctacaccgcgatttcaactatacccgagaccgttggctattctctgctacctctggctcctgtaggtggaatcataggctggatgttcgcagtcgagcaagatgggtttaagaacggcttttccatcacgggtggcgagttcacacgacaggccgaggtgactttcgtcggacaccctggaaatctggttattaagcaacggtttagtggcattgacgagcacggtcatttaaccattgacaccgagttagagggacgcgtgccacagattccttttggtagctcagttcatatcgaaccctataccgagctttaccactatagcacctcagtgattaccagctcctctactagggagtacaccgtgacggaacctgagcgggacggcgcctctccatcccgtatttatacctatcagtggcgtcagaccataacattccaagagtgcgtgcacgacgacagcaggcccgctttgccttccacacagcagctatccgtcgattctgtctttgtgctgtacaaccaggaagaaaaaatccttaggtatgccttgagtaattctattggaccggtgagggaagggagtccagatgccctgcagaatccctgctacatcggtacacatgggtgtgacacaaacgcagcttgtcgtccagggccgagaacgcaatttacatgcgagtgttctatcggctttaggggagacggacgcacatgctacgaggttgaaaagactagatgccagcatgagagggaacatatactgggcgccgccggagcgactgacccccagagacctatcccacccggactttttgtacccgaatgtgatgcgcatggacactacgccccgacacagtgtcatggttctaccgggtattgctggtgtgtcgaccgggacggccgggaagtggaaggtaccaggactcggccaggtatgactcctccctgtctgagcacagtggcaccccccatccatcaaggccctgcagtcccaacagctgtgattccccttccccctggcacccacttactttttgcccagaccgggaagattgaacggttacctcttgaggggaacacaatgagaaaaaccgaagccaaggccttcctacacgtgcctgcgaaagtaataattggcttggcatttgactgtgtggacaaaatggtgtattggaccgatattaccgagccaagcattggaagagcctcattacacggcggtgaacccaccactattattcggcaggatctcggaagtccggagggcatcgccgtggaccacctgggccggaacattttctggaccgactccaatttggatcgtattgaggttgccaaactggacggcacccaacgacgggtgctattcgaaaccgacttagtcaacccgagagggatagtgacagactccgtgcggggcaacttatactggacggattggaacagagataatcccaaaatcgagacttcctatatggatggtaccaatcggagaatcctcgttcaagacgatctgggccttcccaatggtctgacattcgatgccttctcatcacagctttgttgggtcgacgccggtaccaatcgcgccgagtgtctaaatccttcccagccctcccgtaggaaggcgctggagggactccagtatcccttcgcagttacaagttatggaaagaacctgtacttcacggattggaaaatgaattccgtagtggcactagatctagcgatatccaaagaaaccgacgcatttcagccacacaaacagacccggctgtatggcatcacaacagctctatctcaatgtcctcagggacataattattgctcagtcaacaacggaggctgtacccacctgtgtcttgcgacccccggatcccgtacttgtaggtgtcccgacaatactcttggagtggactgcatcgagcaaaagtag

SEQ ID NO: 341043 - DNA, 3345 bp, Artificial Sequence
  derived and/or modified sequence
atgcttgcctcatctagccgtattagggccgcctggacccgcgcactgctgctgccactcctccttgccggacccgtgggatgcctcagccgccaagagctttttcccttcggcccaggacagggcgatcttgaacttgaggatggggatgattttgtgtcccccgcccttgaactcagcggcgcattgcgtttctatgaccggagtgatatcgatgcagtttacgttacaactaacggaattatagctacttctgaaccacccgcgaaggagtctcatcccggccttttcccccctactttcggggctgtggcaccattccttgcggatttagataccaccgatggacttgggaaagtttattaccgtgaagacctgtcaccttcaataactcaacgggccgctgagtgtgtgcatcgtggttttcctgaaatttctttccagcctagctccgcagtggtcgtgacatgggagtccgtcgcaccctaccagggacccagccgcgatccagaccagaagggtaagagaaacacttttcaagcagtgctcgctagttcagattcatcttcttatgccatatttctttatcctgaggacggtctccagtttcacacaacctttagcaaaaaagaaaacaatcaggtccccgccgtggtggcatttagccaaggatctgtgggatttttatggaaaagcaatggcgcttacaacatctttgctaatgatcgggaatccgtcgagaatttggcaaaaagtagcaattcgggtcaacagggcgtgtgggtgtttgagatcggatcccctgccacaactaatggggtagtacccgccgacgtaatattggggacagaggatggtgccgaatatgacgacgaagacgaagactatgacctggcaacaacccgtctcggcctcgaggatgtgggaactacccccttcagttataaggcgcttagaaggggcggagccgatacttacagcgtgccctctgtgctgtctcctagacgagcggccaccgaacgacccctgggcccccccaccgagcgcaccaggagctttcagttggcagtagagacattccaccagcaacatcctcaggtgattgacgtggacgaagtagaagagaccggcgtcgtgttctcatataacactgactctagacagacatgtgctaacaatcgtcatcagtgcagcgttcacgctgagtgccgcgactatgccactggattctgttgttcatgtgtcgccggctacaccgggaatggtagacaatgcgttgctgaaggaagtcctcagcgagtgaatggaaaggttaagggacgcatcttcgttggatcttcccaagtgccaatcgtatttgagaatacggacctccactcttacgtagtaatgaaccatggccgtagctatactgcaatctccactatccccgaaactgtgggctattcacttctacccctcgcacctgtgggcggtatcataggatggatgttcgccgtcgaacaggacggatttaagaacgggttctctattactggcggcgagtttactagacaagctgaagtcacatttgtgggacatcctggcaacctggtgataaagcaacgattcagcggcattgacgaacatggacacttgaccatagatacagaattggaaggcagggtaccccagatccccttcggctcgtcagtgcatattgagccctacaccgagttataccactactcaacatcagtcataacctcatcatcaaccagagaatacacagttacagaaccagagagagatggcgcctctccatctcgaatttacacctatcagtggagacagaccatcacttttcaagagtgtgtgcatgacgattctagacctgctctaccaagcactcaacagttgtccgtcgattctgtgttcgttctgtataaccaggaggagaagatcctgcgctacgcactgagcaatagtatcggacccgtgcgtgaaggcagcccagatgcactgcagaacccatgctacataggaacccatggctgcgataccaacgccgcgtgcaggccaggtccaagaactcagtttacttgcgagtgttcaatcggctttcgaggggacggtagaacttgttacgaggtggaaaagaccagatgccaacacgaacgggagcacatcctgggagccgctggagccacagacccacagagaccaatccccccaggccttttcgttcctgagtgtgatgcccacggtcactacgcacctacccaatgccacggatccaccggatactgctggtgtgtagaccgtgatgggagagaggttgaaggtacacggactagaccgggaatgacccccccttgccttagcactgtggccccacccattcatcagggccccgccgtaccgaccgccgtgattcccctaccacccggcacccatctcctgttcgcacagactggcaagattgaacggctcccactggagggaaatactatgagaaagacagaagccaaggcgtttctccacgtgcccgccaaagtgatcatcggtctggcattcgactgcgtagataaaatggtgtactggactgatataacagaaccgtccatcggacgagcttcactgcacgggggagagcccaccaccattatccgccaggatctcgggtctccagaaggcatcgctgtggaccaccttggcagaaatattttttggactgatagcaatctggatcgcattgaagtggcaaaactcgacggtacccaaagaagggtcctcttcgagacggacctcgtgaatcccaggggcatcgtgacggattctgtccgcggtaatctgtactggactgactggaaccgcgataatccaaaaattgagacttcctacatggacggtacaaatcggagaatcctagttcaggacgatctaggactgccaaacggactaacctttgacgcattctcgagccaactctgctgggtggacgcaggaaccaatagggcggaatgcctaaacccttctcagcccagccggagaaaggccctcgaaggcctgcaatacccttttgccgtcacctcatacgggaagaacctctattttacagactggaagatgaattccgtggttgcactcgaccttgccatctctaaagagacagacgcctttcagcctcataaacagaccagactgtatggtattactacggctctctcgcagtgcccccaaggacacaattattgttctgtcaataacggtggatgtactcatctctgccttgccacacctggaagccgaacgtgtcggtgtcctgataatacactcggcgttgattgcatcgaacaaaaatag

SEQ ID NO: 341044 - DNA, 3345 bp, Artificial Sequence
  derived and/or modified sequence
atgctggccagcagcagcagaatcagagccgcctggaccagagccctgctgctgcccctgctgctggccggccccgtgggctgcctgagcagacaggagctgttccccttcggccccggccagggcgacctggagctggaggacggcgacgacttcgtgagccccgccctggagctgagcggcgccctgagattctacgacagaagcgacatcgacgccgtgtacgtgaccaccaacggcatcatcgccaccagcgagccccccgccaaggagagccaccccggcctgttcccccccaccttcggcgccgtggcccccttcctggccgacctggacaccaccgacggcctgggcaaggtgtactacagagaggacctgagccccagcatcacccagagagccgccgagtgcgtgcacagaggcttccccgagatcagcttccagcccagcagcgccgtggtggtgacctgggagagcgtggccccctaccagggccccagcagagaccccgaccagaagggcaagagaaacaccttccaggccgtgctggccagcagcgacagcagcagctacgccatcttcctgtaccccgaggacggcctgcagttccacaccaccttcagcaagaaggagaacaaccaggtgcccgccgtggtggccttcagccagggcagcgtgggcttcctgtggaagagcaacggcgcctacaacatcttcgccaacgacagagagagcgtggagaacctggccaagagcagcaacagcggccagcagggcgtgtgggtgttcgagatcggcagccccgccaccaccaacggcgtggtgcccgccgacgtgatcctgggcaccgaggacggcgccgagtacgacgacgaggacgaggactacgacctggccaccaccagactgggcctggaggacgtgggcaccacccccttcagctacaaggccctgagaagaggcggcgccgacacctacagcgtgcccagcgtgctgagccccagaagagccgccaccgagagacccctgggcccccccaccgagagaaccagaagcttccagctggccgtggagaccttccaccagcagcacccccaggtgatcgacgtggacgaggtggaggagaccggcgtggtgttcagctacaacaccgacagcagacagacctgcgccaacaacagacaccagtgcagcgtgcacgccgagtgcagagactacgccaccggcttctgctgcagctgcgtggccggctacaccggcaacggcagacagtgcgtggccgagggcagcccccagagagtgaacggcaaggtgaagggcagaatcttcgtgggcagcagccaggtgcccatcgtgttcgagaacaccgacctgcacagctacgtggtgatgaaccacggcagaagctacaccgccatcagcaccatccccgagaccgtgggctacagcctgctgcccctggcccccgtgggcggcatcatcggctggatgttcgccgtggagcaggacggcttcaagaacggcttcagcatcaccggcggcgagttcaccagacaggccgaggtgaccttcgtgggccaccccggcaacctggtgatcaagcagagattcagcggcatcgacgagcacggccacctgaccatcgacaccgagctggagggcagagtgccccagatccccttcggcagcagcgtgcacatcgagccctacaccgagctgtaccactacagcaccagcgtgatcaccagcagcagcaccagagagtacaccgtgaccgagcccgagagagacggcgccagccccagcagaatctacacctaccagtggagacagaccatcaccttccaggagtgcgtgcacgacgacagcagacccgccctgcccagcacccagcagctgagcgtggacagcgtgttcgtgctgtacaaccaggaggagaagatcctgagatacgccctgagcaacagcatcggccccgtgagagagggcagccccgacgccctgcagaacccctgctacatcggcacccacggctgcgacaccaacgccgcctgcagacccggccccagaacccagttcacctgcgagtgcagcatcggcttcagaggcgacggcagaacctgctacgaggtggagaagaccagatgccagcacgagagagagcacatcctgggcgccgccggcgccaccgacccccagagacccatcccccccggcctgttcgtgcccgagtgcgacgcccacggccactacgcccccacccagtgccacggcagcaccggctactgctggtgcgtggacagagacggcagagaggtggagggcaccagaaccagacccggcatgacccccccctgcctgagcaccgtggccccccccatccaccagggccccgccgtgcccaccgccgtgatccccctgccccccggcacccacctgctgttcgcccagaccggcaagatcgagagactgcccctggagggcaacaccatgagaaagaccgaggccaaggccttcctgcacgtgcccgccaaggtgatcatcggcctggccttcgactgcgtggacaagatggtgtactggaccgacatcaccgagcccagcatcggcagagccagcctgcacggcggcgagcccaccaccatcatcagacaggacctgggcagccccgagggcatcgccgtggaccacctgggcagaaacatcttctggaccgacagcaacctggacagaatcgaggtggccaagctggacggcacccagagaagagtgctgttcgagaccgacctggtgaaccccagaggcatcgtgaccgacagcgtgagaggcaacctgtactggaccgactggaacagagacaaccccaagatcgagaccagctacatggacggcaccaacagaagaatcctggtgcaggacgacctgggcctgcccaacggcctgaccttcgacgccttcagcagccagctgtgctgggtggacgccggcaccaacagagccgagtgcctgaaccccagccagcccagcagaagaaaggccctggagggcctgcagtaccccttcgccgtgaccagctacggcaagaacctgtacttcaccgactggaagatgaacagcgtggtggccctggacctggccatcagcaaggagaccgacgccttccagccccacaagcagaccagactgtacggcatcaccaccgccctgagccagtgcccccagggccacaactactgcagcgtgaacaacggcggctgcacccacctgtgcctggccacccccggcagcagaacctgcagatgccccgacaacaccctgggcgtggactgcatcgagcagaagtag

SEQ ID NO: 341045 - DNA, 3345 bp, Artificial Sequence
  derived and/or modified sequence
atgctagctagctctagtcggatccgtgccgcatggacgcgggccctgttgttaccgctactcttggcgggtcccgtgggttgtctgagtagacaggaactgtttcccttcggtcccggccagggggatctggagctggaggatggggacgactttgtgtcgccagccctggagctgtccggggcactgcggttctatgacagatctgatatcgacgcagtttatgtgacaactaacggcattatcgccacaagtgagccccctgctaaagaatctcatcccggtttattcccccccacttttggagcagtggcgccctttcttgctgacctggacactacggatgggctggggaaggtgtattacagagaagatctctctccatccattactcaaagggcggcagagtgtgtccatcgaggcttccccgaaatcagtttccagccaagctcagcagtggtcgtcacctgggaatcagtggctccctaccaaggcccatctcgggatcccgatcagaaggggaaaagaaacacctttcaggcagtgttggcatcctctgattcaagttcctacgcgatctttctctatcctgaggacggactgcagttccacacgaccttttcaaaaaaagagaacaatcaggtgccagcagtagtggcattctctcagggtagtgtagggtttctctggaagtccaacggtgcttacaatatcttcgctaatgatcgggagagcgtcgaaaatctggctaagagcagcaattctggccagcagggtgtctgggtgttcgaaatcggatcccctgcaaccacaaacggcgtggtgccagcagacgtgatcctgggcaccgaggacggcgcagagtacgacgatgaggatgaagattatgatttggcaactaccaggctcggcctggaagatgttgggacaacccctttcagttacaaagcgttacgacgggggggggccgatacttactctgttccttctgtgcttagcccgcgccgtgccgccaccgaacgtcctctcggcccgcccacggagaggactagatcttttcagctcgctgtggaaaccttccatcagcaacatcctcaggtcattgatgtggacgaagtagaggaaactggagtcgtttttagttataacactgattcccggcagacttgcgctaataaccgtcatcagtgcagtgtccatgcagagtgcagagattacgctaccgggttctgctgctcatgcgtggctggctatacaggtaacggtcgccaatgcgtggcagagggctccccccagcgcgtgaacggaaaagttaagggtaggatattcgtgggtagcagtcaagtgcccatcgttttcgagaacactgatctgcacagctacgtggtcatgaatcacggccggagctacactgccatctccactatccctgaaaccgtggggtactctctgctgccgctggcccccgtaggagggatcattggctggatgtttgcagtggagcaggacggcttcaaaaatgggttcagtatcacggggggagagttcactcgacaggccgaggtaaccttcgtgggacatccgggtaacctggtgatcaagcaaagattcagtggaatcgatgaacacgggcacctgaccattgacactgaattggaggggcgcgttccgcagattccttttggaagctcagtccacatcgagccctacactgagctgtaccattactcaacgtctgtcattacatcaagctctacccgggagtacacagtgactgagcctgagcgtgatggtgcgagtccaagtagaatctatacatatcaatggaggcagacgatcacatttcaagaatgcgtgcatgacgattcccggcccgctctgccgtcgactcagcagctctctgtggacagcgtatttgtcctatataatcaggaggagaagatcctcaggtatgccctgagtaatagcataggaccagtgcgggaaggatctcccgacgcgctccaaaacccttgctatatcgggactcatgggtgcgataccaacgccgcgtgcagaccgggcccccgcactcagtttacgtgtgaatgttccattggcttccgtggtgacggcaggacctgttatgaagtggagaagacgcggtgccagcatgagagggagcatatcttgggtgccgcaggagctacagatccccaaagacctattcccccaggactctttgtccctgaatgtgacgcacatgggcactacgcacctacacaatgtcatggctcaaccggatactgttggtgtgtagacagagacggcagggaagtagaagggacaagaacccgtccggggatgacaccaccctgcctctccacggtggccccccctatccaccaagggcccgctgttccaacagcagtgatccccctgccacctggtacgcacctgctattcgcccagacagggaagattgaacggttgccactcgaggggaacacgatgcggaaaactgaggctaaggcatttttgcacgtgcctgcaaaggttatcattggactggcttttgactgtgtggacaaaatggtctattggaccgacatcacggaaccatctatcgggcgcgcttcattgcacggtggcgagcctaccaccattatccgacaggacctgggcagtcccgagggtatagccgtggaccatctgggtcgcaatattttctggaccgattccaatttggaccgcattgaggtggctaagctggacggcacccagcggcgagtgttgtttgagaccgatctagttaatcccaggggcattgttactgactcagtaagagggaacctgtactggaccgactggaaccgcgacaaccctaaaatcgagacttcctacatggacggcaccaaccgtagaatcttggtgcaagacgacttaggactccccaatggactgactttcgacgcattctctagtcaactgtgttgggtggatgccggcactaatcgagcagagtgtctgaacccctcccagccatcccggagaaaggcgttggagggcttacagtatccattcgcagtcaccagctacgggaagaatttatatttcactgattggaagatgaatagcgtggtggcactggatctggccatttccaaggagaccgacgccttccaaccccacaagcagacacggctctatggcataactaccgcccttagccagtgccctcaaggtcacaactactgctccgttaacaacggtggctgcacccacctgtgtcttgcgactcccgggagcagaacctgccggtgtcctgataacacattgggagtggattgcattgagcagaagtag

SEQ ID NO: 341046 - DNA, 5412 bp, Artificial Sequence
  derived and/or modified sequence
accgggtttgcgggaccgcagttcgggaacatgttggcctcgagcagccggatccgggctgcgtggacgcgggcgctgctgctgccgctgctgctggcggggcctgtgggctgcctgagccgccaggagctctttcccttcggccccggacagggggacctggagctggaggacggggatgacttcgtctctcctgccctggagctgagtggggcgctccgcttctacgacagatccgacatcgacgcagtctacgtcaccacaaatggcatcattgctacgagtgaacccccggccaaagaatcccatcccgggctcttcccaccaacattcggtgcagtcgcccctttcctggcggacttggacacgaccgatggcctggggaaggtttattatcgagaagacttatccccctccatcactcagcgagcagcagagtgtgtccacagagggttcccggagatctctttccagcctagtagcgcggtggttgtcacttgggaatccgtggccccctaccaagggcccagcagggacccagaccagaaaggcaagagaaacacgttccaggctgttctagcctcctctgattccagctcctatgccattttcctttatcctgaggatggtctgcagttccatacgacattctcaaagaaggaaaacaaccaagttcctgccgtggttgcattcagtcaaggttcagtgggattcttatggaagagcaacggagcttataacatatttgctaatgacagggaatcagttgaaaatttggccaagagtagtaactctgggcagcagggtgtctgggtgtttgagattgggagtccagccaccaccaatggcgtggtgcctgcagacgtgatcctcggaactgaagatggggcagagtatgatgatgaggatgaagattatgacctggcgaccactcgtctgggcctggaggatgtgggcaccacgcccttctcctacaaggctctgagaaggggaggtgctgacacatacagtgtgcccagcgtcctctccccgcgccgggcagctaccgaaaggccccttggacctcccacagagagaaccaggtctttccagttggcagtggagacttttcaccagcagcaccctcaggtcatagatgtggatgaagttgaggaaacaggagttgttttcagctataacacggattcccgccagacgtgtgctaacaacagacaccagtgctcggtgcacgcagagtgcagggactacgccacgggcttctgctgcagctgtgtcgctggctatacgggcaatggcaggcaatgtgttgcagaaggttccccccagcgagtcaatggcaaggtgaaaggaaggatctttgtggggagcagccaggtccccattgtctttgagaacactgacctccactcttacgtagtaatgaaccacgggcgctcctacacagccatcagcaccattcccgagaccgttggatattctctgcttccactggccccagttggaggcatcattggatggatgtttgcagtggagcaggacggattcaagaatgggttcagcatcaccgggggtgagttcactcgccaggctgaggtgaccttcgtggggcacccgggcaatctggtcattaagcagcggttcagcggcatcgatgagcatgggcacctgaccatcgacacggagctggagggccgcgtgccgcagattccgttcggctcctccgtgcacattgagccctacacggagctgtaccactactccacctcagtgatcacttcctcctccacccgggagtacacggtgactgagcccgagcgagatggggcatctccttcacgcatctacacttaccagtggcgccagaccatcaccttccaggaatgcgtccacgatgactcccggccagccctgcccagcacccagcagctctcggtggacagcgtgttcgtcctgtacaaccaggaggagaagatcttgcgctatgctctcagcaactccattgggcctgtgagggaaggctcccctgatgctcttcagaatccctgctacatcggcactcatgggtgtgacaccaacgcggcctgtcgccctggtcccaggacacagttcacctgcgagtgctccatcggcttccgaggagacgggcgaacctgctatgaggtggagaaaacccggtgccagcacgagcgagaacacattctcggggcagcgggggcgacagacccacagcgacccattcctccggggctgttcgttcctgagtgcgatgcgcacgggcactacgcgcccacccagtgccacggcagcaccggctactgctggtgcgtggatcgcgacggccgcgaggtggagggcaccaggaccaggcccgggatgacgcccccgtgtctgagtacagtggctcccccgattcaccaaggacctgcggtgcctaccgccgtgatccccttgcctcctgggacccatttactctttgcccagactgggaagattgagcgcctgcccctggagggaaataccatgaggaagacagaagcaaaggcgttccttcatgtcccggctaaagtcatcattggactggcctttgactgcgtggacaagatggtttactggacggacatcactgagccttccattgggagagctagtctacatggtggagagccaaccaccatcattagacaagatcttggaagtccagaaggtatcgctgttgatcaccttggccgcaacatcttctggacagactctaacctggatcgaatagaagtggcgaagctggacggcacgcagcgccgggtgctctttgagactgacttggtgaatcccagaggcattgtaacggattccgtgagagggaacctttactggacagactggaacagagataaccccaagattgaaacttcctacatggacggcacgaaccggaggatccttgtgcaggatgacctgggcttgcccaatggactgaccttcgatgcgttctcatctcagctctgctgggtggatgcaggcaccaatcgggcggaatgcctgaaccccagtcagcccagcagacgcaaggctctcgaagggctccagtatccttttgctgtgacgagctacgggaagaatctgtatttcacagactggaagatgaattccgtggttgctctcgatcttgcaatttccaaggagacggatgctttccaaccccacaagcagacccggctgtatggcatcaccacggccctgtctcagtgtccgcaaggccataactactgctcagtgaacaatggcggctgcacccacctatgcttggccaccccagggagcaggacctgccgttgccctgacaacaccttgggagttgactgtatcgaacagaaatgaagacaagagtgccttatttcctttccaagtatttcacagcaacactctacttgaagcaacttggtccagattgaaaagtgtcctctggctgagtggccactaggcccagacccagcccagcctgagccccaacaacttttccctcactgttccccaaaacatgcaccctggacttctctaatagaaaagtctccacccctacacaaggacagaaccctccacccctacccccaaccctcagacagacttatacacccctgagtgaggattacatgcccatcccagtgtcctaggaccttttcccaatactagccccccagtggtgaacagaacctcccaaatttgagttgcacccttccctgtggccttatgagctcagcctcgctttgaggtacccaccgtcctgtcagctccttgacctatgagccggggcctgactaggaaaagttgggagttaaggaggaaattagcattccttaatgttttgttttggtgctctgaatttcttctttattatagtcctatagttttactcctcagttcctcaccatcatcatcttgtctaagacccccattataatattcatgcgctgctttttcatcaaaacctaccctgtcctagagatctatgggcatttggtggatgataatgagcagcccctcccagatagaatgtcaatatttgagcagtaggatattggcatttgttagttaaaggcttaaatcaaaagaatgtccaatggtaggaatttcaaggtgtaggtcagatatttgagaataggggatttttttgatgtgccttaaattataccaaagattactaattattcctctttgcccaaaatacttgcatccaaggttctagtctctgttgctgtgctggtctttagccccactgcttgcactgatgtccctccttttcacggagacctatctgaggtacaggatggggctggcaccagatgatgtcccaccacagtccctcacctccggcctccacatgacagaaccaatttacactcaaccatgacctcacccctccttggtttctccctcgatctgtggccctttttggatgtattcttatctaacaacacaatccggaaagactgaattgaatatttatactaatggttcatatcctttattgctcaatgatctaattaaagggatcattgccacatttcatgtttatatttctacaatttgtttagaaaacatctcctgaccatatcagtagctcgtgttatctttttatcaactgcttcccagagtcctaaaacaatagaaattttggattgaaaagttcagcataaggagtttgagtcagtaaaggatgggataaaggagtcgagatgattcaatgaaaagtatcacaaaaaagagattgatcaacaagagaaataaaaaagcccaagaggaagtggtaggggaaggaatttaagaacagcaataagtaaaactcttaagtaactccaaaaagaaaatggtacattttgccaaagaccacttatacttgagaacatggaagaatttgcctgatactctctttggggaaaagagtctctcctcttttcctcaaaccccagtacactcagcctctctgccccaccttctcctgactttgtcctcacttgcttctgcagtacattggaacctgaattgaaagaaagtcttccttgaataattggagtttgtcttgagaggcaaatatagccccaagaatcacaagattcgaggaccatgtaggtcttttacgtagcccaaatccataaattagtctcactttttgtatttatcgtttcatattaaaccctctatatcaaatgttcatcatgattttgtatgatttttataactattttattcattttattagatttattctaaaattttttaatggtaaattcttaaactgtggaaaccactgaaggtgcttattaactgttctcccagatttgtacaagtattggatgattccttgagtttacagctgtacaaatagtgtggaaaataaactttttttaaaaaagaaaa

SEQ ID NO: 341047 - DNA, 3345 bp, Artificial Sequence
  derived and/or modified sequence
atgctggccagcagcagccgcatccgggccgcctggacccgggccctgctgctgcccctgctgctggccggccctgtgggctgcctgagccggcaggagctgttcccctttggacctggccagggcgacctggagctggaggatggagatgactttgtgtccccagccctggagctgagcggggccctgcgcttctatgacagaagtgacattgatgctgtgtatgtgaccaccaacggcatcatcgccaccagcgagcccccagccaaggagagccaccctggcctcttcccccccacctttggagctgtggcccccttcctggccgacctggacaccacagatggcctgggcaaggtgtactaccgggaggacctgagccccagcatcacccagagagctgctgaatgtgtgcaccggggcttccctgagatctccttccagcccagcagcgctgtggtggtgacctgggagagcgtggccccctaccagggccccagccgggaccctgaccagaagggcaagaggaacaccttccaggccgtgctggccagcagtgacagcagcagctatgccatcttcctgtacccagaagatggcctgcagttccacaccaccttcagcaagaaggagaacaaccaggtgcctgctgtggtggccttcagccagggctctgtgggcttcctgtggaagagcaatggagcctacaacatctttgccaatgaccgggagagcgtggagaacctggccaagagcagcaacagcggccagcagggcgtgtgggtgtttgaaattggcagccctgccaccaccaacggggtggtgcctgcagatgtgatcctgggcacagaagatggagcagaatatgatgatgaagatgaggactatgacctggccaccacccggctgggcctggaggatgtgggcaccacccccttctcctacaaggccctgcggcggggcggcgctgacacctacagcgtgcccagcgtgctgagccccaggagagctgccacagagcggcccctgggccccccaacagagaggaccaggagcttccagctggccgtggagaccttccaccagcagcacccccaggtgattgatgtggatgaggtggaggagaccggggtggtgttctcctacaacacagacagccggcagacctgtgccaacaacagacaccagtgcagcgtgcatgctgagtgccgggactatgccaccggcttctgctgcagctgtgtggccggctacacaggaaatggccggcagtgtgtggccgagggcagcccccagagggtgaatggcaaggtgaagggccgcatctttgtgggcagcagccaggtgcccatcgtgtttgagaacacagacctgcacagctatgtggtgatgaaccacggccgcagctacacagccatcagcaccatccctgagaccgtgggctacagcctgctgcccctggcccctgtgggcggcatcatcggctggatgtttgctgtggagcaggacggcttcaagaatggcttcagcatcaccggcggggagttcacccggcaggccgaggtgacctttgtgggccaccctggcaacctggtgatcaagcagcgcttcagcggcattgatgaacatggccacctgaccatcgacacagagctggagggccgggtgccccagatccccttcggcagctctgtgcacatcgagccctacacagagctgtaccactacagcaccagcgtcatcaccagcagcagcacccgggagtacacagtgacagagcctgagagagatggagccagccccagccgcatctacacctaccagtggaggcagaccatcaccttccaggagtgtgtgcatgatgacagcaggcctgccctgcccagcacccagcagctgtctgtggacagcgtgtttgtgctgtacaaccaggaggagaagatcctgcgctatgccctgagcaacagcatcggccctgtgcgggagggcagcccagatgccctgcagaacccctgctacatcggcacccacggctgtgacaccaatgctgcctgcaggcctggccccaggacccagttcacctgtgagtgcagcatcggcttcagaggagatggccgcacctgctatgaggtggagaagacccgctgccagcacgagcgggagcacatcctgggcgctgctggggccacagacccccagaggcccatccccccaggcctgtttgtgcctgaatgtgatgcccacggccactacgcccccacccagtgccacggcagcacaggctactgctggtgtgtggacagagatggccgggaggtggagggcaccaggacccggcccggcatgaccccaccctgcctgagcacagtggccccacccatccaccagggccctgctgtgcccacagctgtgatccccctgcccccaggcacccacctgctgtttgcccagacaggcaagattgagcggctgcccctggagggcaacaccatgaggaagacagaggccaaggccttcctgcacgtgcctgccaaggtgatcatcggcctggcctttgactgtgtggacaagatggtgtactggacagacatcacagagcccagcatcggccgggccagcctgcatggaggagagcccaccaccatcatccggcaggacctgggcagccctgagggcattgctgtggaccacctgggcaggaacatcttctggacagacagcaacctggaccgcatcgaggtggccaagctggatggcacccagaggagagtgctgtttgaaacagacctggtgaacccccggggcatcgtgacagacagcgtgcggggcaacctgtactggacagactggaacagagacaaccccaagattgagaccagctacatggatggcaccaacagacgcatcctggtgcaggatgacctgggcctgcccaacggcctgacctttgatgccttcagcagccagctgtgctgggtggatgctggcaccaacagagcagaatgtctgaaccccagccagcccagcaggaggaaggccctggagggcctgcagtacccctttgctgtgaccagctatggcaagaacctgtacttcacagactggaagatgaacagcgtggtggccctggacctggccatcagcaaggagacagatgccttccagccccacaagcagacccggctgtatggcatcaccacagccctgagccagtgcccccagggccacaactactgcagcgtgaacaatggaggctgcacccacctgtgcctggccaccccaggcagcaggacctgccgctgcccagacaacaccctgggcgtggactgcatcgagcagaagtag

SEQ ID NO: 341048 - DNA, 3345 bp, Artificial Sequence
  derived and/or modified sequence
atgctggccagcagcagccggatccgggccgcctggacccgggccttactgctccctctcttattggccggtcctgtggggtgtctcagtagacaggagctgttccccttcggcccaggccaaggggacctggagctcgaggacggagatgatttcgtgagtccagccctcgaactatcgggagcgttacgcttctatgatcgctctgatattgacgccgtgtacgtgacaaccaacggcatcatcgcgacatcggaaccccccgcaaaagagagtcacccggggttgtttccccccacttttggggctgtagcaccgtttctggcagatctcgatacgacagatggacttggaaaagtgtactaccgcgaggacctgagtccgtccatcactcagagggccgccgagtgtgtacatcgcggctttccggaaatctctttccagcccagttcagccgtggtggtgacctgggaatctgtggccccctaccaggggcccagtcgggatcccgaccagaaaggcaagcggaatactttccaagctgttcttgcgtccagcgacagttcttcatatgctatattcctctatccagaagatggcctccagtttcacaccactttctcaaagaaggaaaacaaccaggttcctgcagtagtcgccttctctcagggaagtgtaggattcctctggaaaagcaacggggcgtacaacattttcgcaaatgaccgcgaatcagttgagaatctggccaaaagctcaaactccggtcagcagggcgtctgggtcttcgagatcggatctccagcaacaaccaatggtgtcgtgcctgccgacgtcatccttggaaccgaagacggggccgagtacgacgacgaggacgaagactacgacctcgccaccacaaggctcggtctggaggacgtgggcacaaccccattttcatacaaggcattgcggagaggtggggctgatacctattcagtccccagcgtgctcagcccccggagagctgcgaccgaacgccctttgggtcctcccaccgagcgcacaagatcctttcagcttgcagtagaaacgttccaccagcagcatccccaagttattgatgtagacgaagtcgaggagacaggagtcgtcttcagttataacaccgacagccgccagacgtgtgccaacaaccgccaccagtgtagcgttcatgcagaatgtcgagattacgccactggtttttgctgcagctgcgtcgccggctacactgggaacggccgccagtgtgtggccgagggttcccctcagcgagtcaacggtaaggtgaaaggccgcatcttcgtcgggtccagccaggtccccatcgtattcgagaataccgatctccattcatacgtagttatgaatcacggccgatcctacacagccatctcaactatcccagaaaccgttggatacagcctgctgccccttgcccccgttggaggtattattggctggatgtttgccgtggaacaagacggtttcaagaatggctttagcattactggcggagagtttacgagacaagctgaagtgacatttgtgggtcatccaggcaatctggtaattaagcagcgcttctccgggattgatgaacacggtcacctcactatcgatacagagcttgaggggcgggtgccccaaattcccttcggtagctcagtccatatagagccttataccgagctctatcattattcaacatcagtgattacatcttccagcactcgagagtacaccgtgaccgaacctgagcgagatggagcttcaccgtcaaggatttacacataccagtggagacaaaccatcaccttccaggaatgtgtccacgatgactccagaccagccctgccaagtacacagcaactgagcgtggattctgtgttcgtcctgtataatcaggaagaaaagatcctgagatacgctctatcgaattcgatcggccccgtccgggaggggtcgcccgatgcgctgcaaaacccctgctatatcggaacccacggctgcgacacaaacgctgcatgccgaccaggtccccgaacccaattcacttgtgagtgctctattggattcagaggggacggccggacttgttatgaggttgagaaaacccgatgtcagcatgagagggaacacatcctgggagcggcaggggcgaccgaccctcagaggcctatcccacccggactctttgtgcctgagtgtgacgctcacggccactatgcgcctacccaatgccacggaagtacaggctactgttggtgcgtggatagagacggtagggaagtagaaggcacccgtacacgccccggaatgacacccccatgtttatcaacagtggctccacccattcaccagggccctgcggtccccacagcagtaattccccttccacccggcacacatctcctattcgcgcagacaggcaagatcgagcggctgccacttgagggaaatacgatgagaaaaaccgaggctaaggcgttcttacatgtgccagccaaagtcatcattggtctcgcattcgactgcgtggacaagatggtctattggacagatatcacagaacctagcattggtagggcctccttacatggcggcgaaccaacaacgatcatccgtcaggatctgggttcacctgaagggattgctgtggatcacctgggccgaaacatattctggacagattctaacctcgatcgaatcgaggtggctaaactagacggcactcaaaggcgcgtgctcttcgaaaccgacttggtgaatccaaggggaattgtgacagatagcgtgcgcggcaacttatactggacagattggaatcgggataaccccaagattgagacctcatatatggacggcacgaatcggcgaatcctggtgcaagatgacttggggcttccaaatggcttgacatttgacgcattttcatctcagctgtgctgggtggacgctggcactaatcgcgcggaatgtctgaatccatcacagccaagtagacggaaggcactggagggattgcagtacccatttgcagtcacctcttacggaaagaacctatatttcactgactggaaaatgaattccgtcgttgcattagacttggctatttcaaaagaaaccgacgccttccagccccataagcagacacgcctttacggaattaccactgcattatcccagtgccctcagggacataactattgtagcgtcaataacggaggctgtacacacctgtgtctagcaactcctggatcccggacctgccgctgtcccgacaataccctgggtgttgactgcatagaacagaaatag

SEQ ID NO: 341049 - RNA, 3345 nt, Artificial Sequence
  derived and/or modified sequence
augcucgccuccuccucucggauacgugccgcuuggacucgagcucugcugcucccucucuuacuggcuggaccuguggggugccucucuagacaggagcuguuucccuuugggcccggucagggcgauuuggaacuugaagauggggacgauuuuguuucacccgcccucgagcucagcggagcccugcgcuuuuaugaucggagcgauauagaugcugucuaugugaccaccaacggcaucauagcgaccucugaaccgcccgcaaaagaaagccaucccggccucuuuccuccaacauuuggugccguagccccauucuuggcagaccucgauacuacagacggccuggggaagguuuauuaccgugaagaucucucaccgaguaucacgcagagagcugcugaaugcguucaucggggcuucccagaaauuaguuuccagccauccucggccgucguggugacaugggaaaguguggcaccauaucagggcccuagccgugaccccgaucagaagggaaaacgcaacacuuuucaagccguacuugccuccagcgauucaagcucuuacgcuauuuuccucuauccagaagauggacugcaguuucauacaacuuucagcaaaaaagagaacaaucaggucccugcagugguggccuucucacaaggauccgucggguuucucuggaagaguaauggggccuacaauauuuucgcuaaugaccgcgagagcguugagaaucuagccaagucaucaaacagcggacagcagggaguguggguuuuugagauuggaagcccagcaacaacuaacggggucguaccagcagacgugauccugggaaccgaagauggcgccgaguacgacgacgaagacgaagacuaugaucuggccaccacccggcuugggcuugaggacguuggaacgaccccuuuuagcuacaaggcccuucgacgugguggcgccgauacguacucuguuccaaguguccucucuccacggagggccgccaccgaaaggccccucggcccgccuacagaacggacgcgaaguuuccaacucgccgucgaaacguuccaccaacagcacccccaggugauugauguagaugaaguggaggaaacuggagucgucuuuucuuauaacaccgauagcagacaaaccugcgcgaacaacaggcaccaguguagugugcacgcugagugucgggauuacgcaacaggguuuugcugcuccugugucgccgguuacaccggcaauggccgccaauguguggcugaagggagcccacagagagucaacgguaaggugaaaggccggauauuugugggaucgucucaggugcccaucguguuugaaaauacugaucugcacagcuacguugucaugaaucacggccggagcuacaccgcgauuucaacuauacccgagaccguuggcuauucucugcuaccucuggcuccuguagguggaaucauaggcuggauguucgcagucgagcaagauggguuuaagaacggcuuuuccaucacggguggcgaguucacacgacaggccgaggugacuuucgucggacacccuggaaaucugguuauuaagcaacgguuuaguggcauugacgagcacggucauuuaaccauugacaccgaguuagagggacgcgugccacagauuccuuuugguagcucaguucauaucgaacccuauaccgagcuuuaccacuauagcaccucagugauuaccagcuccucuacuagggaguacaccgugacggaaccugagcgggacggcgccucuccaucccguauuuauaccuaucaguggcgucagaccauaacauuccaagagugcgugcacgacgacagcaggcccgcuuugccuuccacacagcagcuauccgucgauucugucuuugugcuguacaaccaggaagaaaaaauccuuagguaugccuugaguaauucuauuggaccggugagggaagggaguccagaugcccugcagaaucccugcuacaucgguacacaugggugugacacaaacgcagcuugucguccagggccgagaacgcaauuuacaugcgaguguucuaucggcuuuaggggagacggacgcacaugcuacgagguugaaaagacuagaugccagcaugagagggaacauauacugggcgccgccggagcgacugacccccagagaccuaucccacccggacuuuuuguacccgaaugugaugcgcauggacacuacgccccgacacagugucaugguucuaccggguauugcuggugugucgaccgggacggccgggaaguggaagguaccaggacucggccagguaugacuccucccugucugagcacaguggcaccccccauccaucaaggcccugcagucccaacagcugugauuccccuucccccuggcacccacuuacuuuuugcccagaccgggaagauugaacgguuaccucuugaggggaacacaaugagaaaaaccgaagccaaggccuuccuacacgugccugcgaaaguaauaauuggcuuggcauuugacuguguggacaaaaugguguauuggaccgauauuaccgagccaagcauuggaagagccucauuacacggcggugaacccaccacuauuauucggcaggaucucggaaguccggagggcaucgccguggaccaccugggccggaacauuuucuggaccgacuccaauuuggaucguauugagguugccaaacuggacggcacccaacgacgggugcuauucgaaaccgacuuagucaacccgagagggauagugacagacuccgugcggggcaacuuauacuggacggauuggaacagagauaaucccaaaaucgagacuuccuauauggaugguaccaaucggagaauccucguucaagacgaucugggccuucccaauggucugacauucgaugccuucucaucacagcuuuguugggucgacgccgguaccaaucgcgccgagugucuaaauccuucccagcccucccguaggaaggcgcuggagggacuccaguaucccuucgcaguuacaaguuauggaaagaaccuguacuucacggauuggaaaaugaauuccguaguggcacuagaucuagcgauauccaaagaaaccgacgcauuucagccacacaaacagacccggcuguauggcaucacaacagcucuaucucaauguccucagggacauaauuauugcucagucaacaacggaggcuguacccaccugugucuugcgacccccggaucccguacuuguaggugucccgacaauacucuuggaguggacugcaucgagcaaaaguag

SEQ ID NO: 341050 - RNA, 3345 nt, Artificial Sequence
  derived and/or modified sequence
augcuugccucaucuagccguauuagggccgccuggacccgcgcacugcugcugccacuccuccuugccggacccgugggaugccucagccgccaagagcuuuuucccuucggcccaggacagggcgaucuugaacuugaggauggggaugauuuugugucccccgcccuugaacucagcggcgcauugcguuucuaugaccggagugauaucgaugcaguuuacguuacaacuaacggaauuauagcuacuucugaaccacccgcgaaggagucucaucccggccuuuuccccccuacuuucggggcuguggcaccauuccuugcggauuuagauaccaccgauggacuugggaaaguuuauuaccgugaagaccugucaccuucaauaacucaacgggccgcugagugugugcaucgugguuuuccugaaauuucuuuccagccuagcuccgcaguggucgugacaugggaguccgucgcacccuaccagggacccagccgcgauccagaccagaaggguaagagaaacacuuuucaagcagugcucgcuaguucagauucaucuucuuaugccauauuucuuuauccugaggacggucuccaguuucacacaaccuuuagcaaaaaagaaaacaaucagguccccgccgugguggcauuuagccaaggaucugugggauuuuuauggaaaagcaauggcgcuuacaacaucuuugcuaaugaucgggaauccgucgagaauuuggcaaaaaguagcaauucgggucaacagggcguguggguguuugagaucggauccccugccacaacuaaugggguaguacccgccgacguaauauuggggacagaggauggugccgaauaugacgacgaagacgaagacuaugaccuggcaacaacccgucucggccucgaggaugugggaacuacccccuucaguuauaaggcgcuuagaaggggcggagccgauacuuacagcgugcccucugugcugucuccuagacgagcggccaccgaacgaccccugggcccccccaccgagcgcaccaggagcuuucaguuggcaguagagacauuccaccagcaacauccucaggugauugacguggacgaaguagaagagaccggcgucguguucucauauaacacugacucuagacagacaugugcuaacaaucgucaucagugcagcguucacgcugagugccgcgacuaugccacuggauucuguuguucaugugucgccggcuacaccgggaaugguagacaaugcguugcugaaggaaguccucagcgagugaauggaaagguuaagggacgcaucuucguuggaucuucccaagugccaaucguauuugagaauacggaccuccacucuuacguaguaaugaaccauggccguagcuauacugcaaucuccacuauccccgaaacugugggcuauucacuucuaccccucgcaccugugggcgguaucauaggauggauguucgccgucgaacaggacggauuuaagaacggguucucuauuacuggcggcgaguuuacuagacaagcugaagucacauuugugggacauccuggcaaccuggugauaaagcaacgauucagcggcauugacgaacauggacacuugaccauagauacagaauuggaaggcaggguaccccagauccccuucggcucgucagugcauauugagcccuacaccgaguuauaccacuacucaacaucagucauaaccucaucaucaaccagagaauacacaguuacagaaccagagagagauggcgccucuccaucucgaauuuacaccuaucaguggagacagaccaucacuuuucaagagugugugcaugacgauucuagaccugcucuaccaagcacucaacaguuguccgucgauucuguguucguucuguauaaccaggaggagaagauccugcgcuacgcacugagcaauaguaucggacccgugcgugaaggcagcccagaugcacugcagaacccaugcuacauaggaacccauggcugcgauaccaacgccgcgugcaggccagguccaagaacucaguuuacuugcgaguguucaaucggcuuucgaggggacgguagaacuuguuacgagguggaaaagaccagaugccaacacgaacgggagcacauccugggagccgcuggagccacagacccacagagaccaauccccccaggccuuuucguuccugagugugaugcccacggucacuacgcaccuacccaaugccacggauccaccggauacugcugguguguagaccgugaugggagagagguugaagguacacggacuagaccgggaaugacccccccuugccuuagcacuguggccccacccauucaucagggccccgccguaccgaccgccgugauuccccuaccacccggcacccaucuccuguucgcacagacuggcaagauugaacggcucccacuggagggaaauacuaugagaaagacagaagccaaggcguuucuccacgugcccgccaaagugaucaucggucuggcauucgacugcguagauaaaaugguguacuggacugauauaacagaaccguccaucggacgagcuucacugcacgggggagagcccaccaccauuauccgccaggaucucgggucuccagaaggcaucgcuguggaccaccuuggcagaaauauuuuuuggacugauagcaaucuggaucgcauugaaguggcaaaacucgacgguacccaaagaaggguccucuucgagacggaccucgugaaucccaggggcaucgugacggauucuguccgcgguaaucuguacuggacugacuggaaccgcgauaauccaaaaauugagacuuccuacauggacgguacaaaucggagaauccuaguucaggacgaucuaggacugccaaacggacuaaccuuugacgcauucucgagccaacucugcuggguggacgcaggaaccaauagggcggaaugccuaaacccuucucagcccagccggagaaaggcccucgaaggccugcaauacccuuuugccgucaccucauacgggaagaaccucuauuuuacagacuggaagaugaauuccgugguugcacucgaccuugccaucucuaaagagacagacgccuuucagccucauaaacagaccagacuguaugguauuacuacggcucucucgcagugcccccaaggacacaauuauuguucugucaauaacgguggauguacucaucucugccuugccacaccuggaagccgaacgugucgguguccugauaauacacucggcguugauugcaucgaacaaaaauag

SEQ ID NO: 341051 - protein, 667 aa, Artificial Sequence
  derived and/or modified sequence
MKRKGKLKNKGSKRKKEDLQEVDGEIEAVLQKKAKARGLEFQISNVKFEDVGGNDMTLKEVCKMLIHMRHPEVYHHLGVVPPRGVLLHGPPGCGKTLLAHAIAGAECSGMITAHCSFDFSGSNDPPASASQELDLPILKVAAPEIVSGVSGESEQKLRELFEQAVSNAPCIIFIDEIDAITPKREVASKDMERRIVAQLLTCMDDLNNVAATARVLVIGATNRPDSLDPALRRAGRFDREICLGIPDEASRERILQTLCRKLRLPQAFDFCHLAHLTPGFVGADLMALCREAAMCAVNRVLMKLQEQQKKNPEMEDLPSKGVQEERLGTEPTSETQDELQRLLGLLRDQDPLSEEQMQGLCIELNDFIVALSSVQPSAKREGFVTVPNVTWADIGALEDIREELTMAILAPVRNPDQFKALGLVTPAGVLLAGPPGCGKTLLAKAVANESGLNFISVKGPELLNMYVGESERAVRQVFQRAKNSAPCVIFFDEVDALCPRRSDRETGASVRVVNQLLTEMDGLEARQQVFIMAATNRPDIIDPAILRPGRLDKTLFVGLPPPADRLAILKTITKNGTKPPLDADVNLEAIAGDLRCDCYTGADLSALVREASICALRQEMARQKSGNEKGELKVSHKHFEEAFKKVRSSISKKDQIMYERLQESLSR

SEQ ID NO: 341052 - protein, 101 aa, Artificial Sequence
  derived and/or modified sequence
MRLTFLKKIAQLNYLEILVVLLSYTLKTTFQYWMNEYTSSIGIGVFHSGIEVYGREFAYGGHPYPFSGIFEISPGNASELGETFKFKEAVVLGSTDFLEDD

SEQ ID NO: 341053 - DNA, 306 bp, Artificial Sequence
  derived and/or modified sequence
atgagactgaccttcctgaagaagatcgcccagctgaactacctggagatcctggtggtgctgctgagctacaccctgaagaccaccttccagtactggatgaacgagtacaccagcagcatcggcatcggcgtgttccacagcggcatcgaggtgtacggcagagagttcgcctacggcggccacccctaccccttcagcggcatcttcgagatcagccccggcaacgccagcgagctgggcgagaccttcaagttcaaggaggccgtggtgctgggcagcaccgacttcctggaggacgactag

SEQ ID NO: 341054 - DNA, 306 bp, Artificial Sequence
  derived and/or modified sequence
atgagactaacgtttctgaaaaagatcgcgcagctcaactacttggaaatcctggtggtcttactgtcctacactttgaagacaacatttcaatactggatgaacgaatacacctcgtccatcggcataggcgtatttcattccggcatcgaggtctacggccgtgaattcgcctacggcgggcatccctatcccttctccggtatcttcgaaatcagcccaggaaatgcttctgagcttggagagacctttaaattcaaggaggctgtcgtccttgggtcaaccgactttctcgaagatgactag

SEQ ID NO: 341055 - DNA, 306 bp, Artificial Sequence
  derived and/or modified sequence
atgaggctgaccttcctgaagaagatcgcccagctgaactacctggagatcctggtggtgctgctgagctacaccctgaagaccaccttccagtactggatgaatgagtacaccagcagcattggaattggagtcttccacagcggcatcgaggtgtatggccgggagtttgcctatggaggccacccctaccccttcagcggcatctttgagatcagccctggaaatgccagcgagctgggggagaccttcaagttcaaggaggccgtggtgctgggcagcacagacttcctggaggatgactag

SEQ ID NO: 341056 - DNA, 306 bp, Artificial Sequence
  derived and/or modified sequence
atgcggctgaccttcctgaagaagatcgcccagctgaactacctggagatcctggtggtcctcctctcctatacacttaagaccacattccaatactggatgaatgaatataccagtagcatcggaatcggcgtgtttcattctgggattgaggtctatgggagagaattcgcctatggcggccatccatacccattcagcggaatattcgagataagtccagggaacgctagtgagttgggggagactttcaaatttaaggaggcagtggttctgggttcaacagactttctggaggacgattag

SEQ ID NO: 341057 - DNA, 306 bp, Artificial Sequence
  derived and/or modified sequence
atgcgactaaccttcttaaagaaaatcgcccaactgaattacctggagattctggtggtgttactgtcctacactctgaaaaccaccttccagtattggatgaacgagtacaccagctccattggcataggggtgttccattctggcattgaggtgtacggcagagagtttgcttacgggggtcatccttatccatttagcgggatttttgaaatttccccgggaaacgccagcgagctaggcgaaacctttaagttcaaagaggctgtggtgctcggcagcaccgacttcttggaggacgattag

SEQ ID NO: 341058 - DNA, 486 bp, Artificial Sequence
  derived and/or modified sequence
agctcctctgcttctgccgaactgtccgtctctctccatggctacgtcttcagaaactcccaagcccctctaagtccagaaggtcacagctttcgggtgcctgtgctagaatctcttcaaaggtgaacaggagccaacacaccctttccttgtgtgttaaaggcaacctcgttaaaatatgaatgaggctaacatttctcaagaaaatagcccagctgaattatttagagatcctggtggtgctcctttcctacactctgaagaccactttccagtattggatgaacgaatatacctcatccattggaattggagtttttcattcaggaattgaagtctatggcagagaatttgcttatggtggccatccttaccccttttctggaatatttgaaatttccccaggaaatgcttctgaactaggagaaacatttaaatttaaagaagctgttgttttagggagcacggacttcctagaagatgata

SEQ ID NO: 341059 - DNA, 237 bp, Artificial Sequence
  derived and/or modified sequence
ggagaaggcaccgctgctgcctcagcaggaggctttggcttcggatcgagttccaatacaactagctttgggacactggcatcgcagaacgccccgacatttggttcactatcgcagcaaactagcggcttcggaacccagtcatccggattctccggctttgggagtggcacagggggatttagttttggctcaaataactctagcgttcagggatttggaggttggaggtcttag

SEQ ID NO: 341060 - protein, 1727 aa, Artificial Sequence
  derived and/or modified sequence
MMMDWKAVAAQKLNLSSKKKKHRPSTSSAAEPPLFATSFSGILQTSPPPAPPCLLRAVNKVKDTPGLGKVKVMLRICSTLARDTSESSSFLKVDPRKKQITLYDPLTCGGQNAFQKRGNQVPPKMFAFDAVFPQDASQAEVCAGTVAEVIQSVVNGADGCVFCFGHAKLGKSYTMIGKDDSMQNLGIIPCAISWLFKLINERKEKTGARFSVRVSAVEVWGKEENLRDLLSEVATGSLQDGQSPGVYLCEDPICGTQLQNQSELRAPTAEKAAFFLDAAIASRRSHQQDCDEDDHRNSHVFFTLHIYQYRMEKSGKGGMSGGRSRLHLIDLGSCVKALSKNREGGSGLCLSLSALGNVILALVNGSKHIPYKESKLAMLLRESLGNMNCRTTMIAHISAAVGSYAETLSTIQIASRVLRMKKKKTKYTSSSSGGESSCEEGRMRRPTQLRPFHTRATVDPDFPIAHLSSDPDYSSSSEQSCDTVIYIGPNGTALSDKELTDNEGPPDFVPIVPALQKTRGDSRPAEAGEAAAGKSERDCLKCNTFAELQERLDCIDGSEEPSSFPFEELPAQFGPEQASRGPRLSQAAGASPLSESDKEDNGSEGQLTNREGPELPASKMQRSHSPVPAAAPAHSPSPASPRSVPGSSSQHSASPLVQSPSLQSSRESLNSCGFVEGKPRPMGSPRLGIASLSKTSEYKPPSSPSQRCKVYTQKGVLPSPAPLPPSSKDSGVASRESLLQPEVRTPPVGMSPQVLKKSMSAGSEGFPETPVDDEQQAATPSESKKEILSTTMVTVQQPLELNGEDELVFTLVEELTISGVLDSGRPTSIISFNSDCSARALASGSRPVSIISSISEDLECYSSTAPVSEVSITQFLPLPKMSLDEKAQDAGSRRSSISSWLSEMSAGSEGEQSCHSFIAQTCFGHGEAMAEPVASEFVSSLQNTAVVCREKPKASPDNLLILSEMGDDSFNKAAPIKGCKISTVSKAMVTISNTANLSSCEGYIPMKTNITVYPCIAMSPRNIQEPEAPTATPKAGPTLAQSRESKENSAKKEMKFEDPWLKREEEVKKETAHPNEEGMMRCETATGPSNAETRAEQEQDGKPSPGDRLSSSSGEVSASPVTDNFRRVVDGCEMALPGLATQSPVHPNKSVKSSSLPRAFQKASRQEEPDSLSYYCAAETNGVGAASGTPPSKATLEGKVASPKHCVLARPKGTPPLPPVRKSSLDQKNRASPQHSASGSGTSSPLNQPAAFPAGLPDEPSGKTKDASSSSKLFSAKLEQLASRSNSLGRATVSHYECLSLERAESLSSVSSRLHAGKDGTMPRAGRSLGRSAGTSPPSSGASPKAGQSKISAVSRLLLASPRARGPSASTTKTLSFSTKSLPQAVGQGSSSPPGGKHTPWSTQSLSRNRSSGLASKLPLRAVSGRISELLQGGAGARGLQLRAGPEAEARGGALAEDEPAAAHLLPSPYSKITPPRRPHRCSSGHGSDNSSVLSGELPPAMGKTALFYHSGGSSGYESVMRDSEATGSASSAQDSTSENSSSVGGRCRSLKTPKKRSNPGSQRRRLIPALSLDTSSPVRKPPNSTGVRWVDGPLRSSPRGLGEPFEIKVYEIDDVERLQRRRGGASKEAMCFNAKLKILEHRQQRIAEVRAKYEWLMKELEATKQYLMLDPNKWLSEFDLEQVWELDSLEYLEALECVTERLESRVNFCKAHLMMITCFDITSRRR

SEQ ID NO: 341061 - protein, 1724 aa, Artificial Sequence
  derived and/or modified sequence
DWKTKAAQKLNLSSKKKKHRPSTSSAAEPPLFATSFSGILQTSPPPAPPCLLRAVNKVKDTPGLGKVKVMLRICSTLARDTSESSSFLKVDPRKKQITLYDPLTCGGQNAFQKRGNQVPPKMFAFDAVFPQDASQAEVCAGTVAEVIQSVVNGADGCVFCFGHAKLGKSYTMIGKDDSMQNLGIIPCAISWLFKLINERKEKTGARFSVRVSAVEVWGKEENLRDLLSEVATGSLQDGQSPGVYLCEDPICGTQLQNQSELRAPTAEKAAFFLDAAIASRRSHQQDCDEDDHRNSHVFFTLHIYQYRMEKSGKGGMSGGRSRLHLIDLGSCVKALSKNREGGSGLCLSLSALGNVILALVNGSKHIPYKESKLAMLLRESLGNMNCRTTMIAHISAAVGSYAETLSTIQIASRVLRMKKKKTKYTSSSSGGESSCEEGRMRRPTQLRPFHTRATVDPDFPIAHLSSDPDYSSSSEQSCDTVIYIGPNGTALSDKELTDNEGPPDFVPIVPALQKTRGDSRPAEAGEAAAGKSERDCLKCNTFAELQERLDCIDGSEEPSSFPFEELPAQFGPEQASRGPRLSQAAGASPLSESDKEDNGSEGQLTNREGPELPASKMQRSHSPVPAAAPAHSPSPASPRSVPGSSSQHSASPLVQSPSLQSSRESLNSCGFVEGKPRPMGSPRLGIASLSKTSEYKPPSSPSQRCKVYTQKGVLPSPAPLPPSSKDSGVASRESLLQPEVRTPPVGMSPQVLKKSMSAGSEGFPETPVDDEQQAATPSESKKEILSTTMVTVQQPLELNGEDELVFTLVEELTISGVLDSGRPTSIISFNSDCSARALASGSRPVSIISSISEDLECYSSTAPVSEVSITQFLPLPKMSLDEKAQDAGSRRSSISSWLSEMSAGSEGEQSCHSFIAQTCFGHGEAMAEPVASEFVSSLQNTAVVCREKPKASPDNLLILSEMGDDSFNKAAPIKGCKISTVSKAMVTISNTANLSSCEGYIPMKTNITVYPCIAMSPRNIQEPEAPTATPKAGPTLAQSRESKENSAKKEMKFEDPWLKREEEVKKETAHPNEEGMMRCETATGPSNAETRAEQEQDGKPSPGDRLSSSSGEVSASPVTDNFRRVVDGCEMALPGLATQSPVHPNKSVKSSSLPRAFQKASRQEEPDSLSYYCAAETNGVGAASGTPPSKATLEGKVASPKHCVLARPKGTPPLPPVRKSSLDQKNRASPQHSASGSGTSSPLNQPAAFPAGLPDEPSGKTKDASSSSKLFSAKLEQLASRSNSLGRATVSHYECLSLERAESLSSVSSRLHAGKDGTMPRAGRSLGRSAGTSPPSSGASPKAGQSKISAVSRLLLASPRARGPSASTTKTLSFSTKSLPQAVGQGSSSPPGGKHTPWSTQSLSRNRSSGLASKLPLRAVSGRISELLQGGAGARGLQLRAGPEAEARGGALAEDEPAAAHLLPSPYSKITPPRRPHRCSSGHGSDNSSVLSGELPPAMGKTALFYHSGGSSGYESVMRDSEATGSASSAQDSTSENSSSVGGRCRSLKTPKKRSNPGSQRRRLIPALSLDTSSPVRKPPNSTGVRWVDGPLRSSPRGLGEPFEIKVYEIDDVERLQRRRGGASKEAMCFNAKLKILEHRQQRIAEVRAKYEWLMKELEATKQYLMLDPNKWLSEFDLEQVWELDSLEYLEALECVTERLESRVNFCKAHLMMITCFDITSRRR

SEQ ID NO: 341062 - DNA, 5184 bp, Artificial Sequence
  derived and/or modified sequence
atgatgatggactggaaggcagtcgctgcacagaagctcaacctgtcaagcaaaaagaagaaacaccgccctagtacctcttccgcggcagagccccctctattcgccacctcatttagcggtatcctgcagacatctccaccccctgccccaccttgtctcctacgggctgtgaacaaggttaaagacacccctggcctggggaaggtcaaggtgatgctgcgcatatgtagcacgctggctagagatacctccgagagcagcagcttcctgaaggtagatcctaggaagaaacagataactctgtatgacccactgacatgtggcggccagaacgccttccagaaacgaggaaatcaggtcccccctaagatgttcgccttcgacgccgtctttccacaggacgcttctcaggcagaggtgtgtgctggcactgtggcagaggtgatccagtctgtagtcaatggtgcggacggttgtgtgttctgtttcggacacgccaagctcgggaagtcctacacaatgataggaaaagacgactcaatgcagaacttggggatcattccttgtgcaataagttggctgtttaaattgattaatgaaagaaaagagaagacaggggctcggttcagcgtgcgagtctccgcagtggaggtgtggggcaaggaagaaaatctgagagatttgttatccgaggtagcaaccggatcactccaagacggacagtcaccaggcgtgtacctctgcgaagaccccatatgcgggacgcagttgcaaaaccagtcggaattacgcgctccaaccgcggaaaaggccgccttcttcttagacgctgctatagcatcccggaggtctcaccaacaagactgcgatgaggacgatcatcgaaactctcacgtattctttaccctccatatatatcagtatcgcatggaaaagagtggtaagggcgggatgtccggcgggagaagtaggctgcatctgattgatctggggtcctgcgttaaggctctgtctaagaatcgggagggaggatccggactgtgcttgtcgctgtcagctctgggcaatgtgatactggccctggtcaacggcagcaaacacattccttacaaagagtccaagctggcaatgctcttgcgtgaatcactgggcaacatgaattgtcggaccactatgatagctcacataagcgcggccgtcggatcctatgccgaaaccctttctaccatacaaatcgcttcaagagttctgaggatgaagaaaaagaagacgaagtacacttcgtcctcatccgggggggagtcaagctgtgaggagggcagaatgcgcagaccaacacagcttagaccttttcatacaagagccacagtggacccggacttccctatagcacacctgagctctgaccctgactactcttcctccagcgagcagtcctgcgacacggtaatctacatcgggccaaatggcactgctctgagcgacaaagaacttactgataatgagggaccacctgactttgtgcctattgtgcctgccctccagaagacccgcggggattctcggcccgccgaggccggtgaagccgcggctggcaagtctgagagagactgtttaaagtgtaacacgttcgccgagctgcaggagcgcctggattgcatcgacggttcagaagaaccctcatcctttccatttgaagaactcccagcccagttcggacctgagcaggctagcagaggccctaggctgtctcaggccgccggggcctctccactttccgagtccgacaaagaggataacgggagcgaggggcagctgaccaaccgggaagggcccgaactgccagcctcaaagatgcagcgtagccacagccccgtacctgccgccgcaccagcgcacagcccatccccagcgagtcctaggtcagtacctgggagctcctcgcagcacagtgcaagccccctggtccagtcgccatccctgcaatcctcaagagagagtcttaatagctgtgggttcgttgaaggaaaacccagaccgatggggagtcccagactcgggattgctagcttgtccaagacatccgaatataaacccccgtcttctcccagccaaaggtgcaaagtgtatacccagaagggtgtccttcccagccctgctcctctgcctccttcctctaaggacagtggcgtggcctcccgggagtctctgctgcagcccgaggttcgaacacctcctgtgggaatgtcaccccaggttctgaagaagtcaatgagcgccgggagcgagggctttcctgagacccctgtcgatgatgagcagcaagcagctacacccagcgagtcaaaaaaagaaattctgagcactactatggtgactgtacaacagccccttgagctaaatggtgaggacgaactggtgttcacactggttgaggaactgaccatttccggcgtgctggactctggccgaccaacctccattatatcatttaatagcgactgctcagcacgggccttagcctcaggcagcagacctgtttcaatcatctcctccataagtgaagatcttgagtgctatagctcaaccgcccccgtgtccgaagtgtctataacacagtttctgcctcttcctaagatgagcttagacgaaaaggcacaggatgctggaagtaggaggtcctcgatttcctcctggctctccgagatgtccgccggctccgaaggagaacagtcctgtcactcttttatagcccaaacgtgttttggccacggtgaagccatggccgaaccagttgcttcagaattcgtgtccagtctgcagaatacagccgttgtgtgtagagagaagcccaaagcctcgccagacaacctgctgattctctctgagatgggtgatgactcttttaataaagccgctcctatcaagggttgtaagatctcaaccgtgtctaaggccatggtgacaattagcaatacagccaacttgtcaagttgcgagggctatattcctatgaagactaatattaccgtgtatccctgcatagccatgagccctcgaaatattcaagagccagaggcccccaccgccactccaaaagccgggcccaccttggcccaatctagggaatccaaggaaaactcagcaaagaaagagatgaagtttgaagacccatggcttaagcgggaggaagaagttaaaaaggaaactgcccatcccaacgaagagggcatgatgcggtgcgagacagccacagggccgtcaaacgcagaaacccgcgctgaacaagagcaggacggcaagccatctccaggggatcggctgtcctcatccagcggggaagtgtctgcttcgccagttactgataattttcggagagttgtggatggttgtgaaatggctttaccgggcctggccactcagtccccagtacaccccaataaaagcgtcaaatccagtagcctccctagggccttccagaaagcgtcccggcaggaagagcccgacagcctgagctattattgtgccgcggagacgaacggcgtaggagccgcaagcggcactcctccatccaaggccaccctggaaggcaaggtcgccagccccaaacactgtgttctggcccgacccaaagggaccccccccctgcctcccgtccggaagagctccttagaccagaaaaaccgcgcatctccgcagcattctgccagtgggtctggtacaagcagcccgctcaatcagcctgccgctttccccgctggcttgccagacgagcctagcgggaagacaaaggacgcatcatctagttcaaaactcttctcagcaaagctggaacagctcgccagcaggagcaactcgctagggcgcgccaccgtgtcccattatgagtgcctttccttggaaagggccgagagtctgtcttctgtgagctcccgcctgcatgccgggaaagacggtacaatgcctagggccgggaggagtttgggacgaagcgccggaacctcccccccaagcagtggcgcctctccaaaggccgggcagtcaaaaattagcgctgtgtctagactcctgcttgcttccccccgagctcggggccccagtgccagcaccacgaagaccctcagcttctccacgaaaagcttacctcaggcagtgggccagggcagctctagcccccccgggggaaagcacactccttggtctactcagtccctgtcaagaaacagatcctccggcctggcaagtaagctgccactccgggctgtcagcggccgaatcagtgaactcctgcagggcggtgctggcgcgagaggcttacagctccgggctggccctgaggctgaagctagaggtggggccctggctgaggatgaacctgctgctgcccaccttttaccgagcccctactcaaaaatcactcccccaaggagaccccaccggtgttcctctggtcatggttcagataattctagcgtgctatccggggaacttcctcctgctatgggtaagacagcactgttctatcactcaggcggcagcagcggctatgagtcagttatgcgcgattccgaggctactggctcagctagttctgcgcaggactctacttctgagaactcctcatccgtcggcggaaggtgtaggtctctgaaaacccccaagaagagatccaaccccggatctcagcggcgtagactgatccctgccttgtcactggatacctcatctcctgtacggaagccacctaattctaccggggtccgctgggtggacggccctctcagatcctccccacgcggtctgggggaaccatttgagattaaagtgtacgagattgacgacgtggagaggttacagcgtcgaagggggggtgccagcaaggaggcgatgtgcttcaacgccaagttaaagatactagaacacaggcagcagcggattgccgaggttagagcaaaatacgagtggctcatgaaggagctcgaagctaccaagcagtacctgatgctggaccccaacaagtggctgagcgagttcgacctcgaacaggtttgggaattagacagccttgagtacttggaggcgctcgagtgtgtgacagagaggcttgagagtcgtgtgaacttctgcaaagcccatctcatgatgatcacttgttttgacataacctctcggagaagatag

SEQ ID NO: 341063 - DNA, 5175 bp, Artificial Sequence
  derived and/or modified sequence
gactggaagacgaaggccgcccagaaactgaacctgtcctcgaaaaaaaagaaacaccgccccagcacttcaagcgctgcagagccccccttgttcgccacatcttttagtggaatcctgcaaacatccccgccgcctgcgcctccttgtttgctgagggctgtgaataaggtcaaagacaccccaggcctgggtaaggtgaaggtaatgctgcggatctgctctacgcttgcccgggatacgtctgagagctcctcattcctgaaggtggatccaagaaaaaagcaaattacactctacgaccccctgacatgtggtggtcagaacgcattccagaagagaggaaatcaggtcccgcccaagatgtttgccttcgacgctgtcttcccacaggacgcctcacaagcggaagtatgtgccggaacagtcgccgaagttatccagagtgtggtgaatggtgccgatgggtgcgtcttctgttttggccacgcgaaactcggaaaatcatataccatgataggcaaggacgactctatgcagaacctggggattatcccgtgcgccattagctggctctttaagttgattaacgagagaaaagagaaaaccggcgcccgcttttcagtgagggtgtcagcagtggaggtgtggggtaaggaggaaaatttgagagacctactctcagaagtggcgacaggcagcctccaggatggtcagtcccctggagtgtatctgtgcgaagatcccatatgcggaacccagctgcagaaccagagcgaattgcgagcccccacagcggagaaagccgccttctttctggacgccgccatcgcatctaggagaagccaccagcaagattgtgacgaagatgatcatcggaatagtcacgtgttcttcacactacacatttatcaataccggatggaaaagagtgggaaaggaggaatgtctggtggccgtagcaggctccatctgattgacctgggtagctgtgtaaaggctctgtctaaaaatagagaaggaggatcgggactgtgcctgtccctttcagcacttggcaacgtgattctggctctggtgaatggcagtaagcacattccttataaagaatcaaagctggcgatgttactgagggagagcctgggtaacatgaactgtcgcactacaatgatcgcacatatttccgccgctgtgggcagctacgctgaaaccctctccaccatccagatcgccagccgcgttctacgtatgaaaaagaaaaaaaccaaatacacctctagcagctccggcggggagtcgagctgcgaggaagggaggatgcgtcgcccaacccagctgagaccgttccacaccagagccaccgtggatccagatttccctatagcacacctgtctagtgatcctgattacagcagctcgtccgaacaaagttgcgatactgtgatttacatcggacccaatggcaccgccctgagcgataaggagttgacagacaacgagggcccgccagacttcgtccctattgtccccgcactacagaagacgagaggcgattcccgcccagcagaagcaggcgaggctgctgccggtaagtccgagcgtgattgcctgaaatgtaacactttcgctgaactacaggaacgccttgactgtattgacggatccgaggaaccatcaagttttccgttcgaggaactccctgcccagttcggacccgagcaggcatccagaggcccacggctatcccaggcagccggagctagtccactcagcgaatccgacaaggaggataatggctccgagggacaactgacgaaccgggaggggcctgagctgccagcaagcaagatgcagagatcacatagcccagttccggccgcagctcccgcccactccccgagtccggcttcccctcgaagcgtaccagggagttctagtcaacatagcgcatctcccctggtgcagtctccctctttgcagtcctctagggagtcactgaattcctgcgggtttgtcgaaggtaagccacggcccatgggtagtccccggcttggaatcgcaagcttgtctaagacgtcggagtacaagcctcctagttcaccatctcaacgatgcaaggtgtacacccagaaaggcgttctgccgtctcccgccccgcttcctccatcatccaaagatagcggagtggcctctcgggagagtctgctgcaacctgaggttcggacaccgcctgtcggaatgagccctcaagtgttgaagaaatcaatgtctgccgggtctgaaggatttccagagacacctgtggacgacgagcagcaggctgcaactcctagcgaaagcaagaaggagattctctctactaccatggttaccgtgcagcaaccattggagctcaatggcgaggatgaactggtattcaccctcgtcgaagagttgactattagcggcgtactcgacagcggccggccaacctcaatcattagctttaacagcgattgcagcgctcgggccctcgcgagcggatccaggcctgtgtccattattagctccatctcagaggatctggaatgctacagcagtaccgcccccgtttccgaggtttctatcacccagtttctgcctttgcccaaaatgagtttagacgagaaggcccaagatgcggggtccagacgaagttccatttcttcatggctgagcgagatgagcgccgggagcgaaggggaacagtcgtgccattccttcatcgcccaaacctgttttggccatggtgaagccatggccgagcctgtagcctcagagttcgtgtcaagtctccagaacaccgcggtagtgtgcagggagaagcccaaggcctcgcccgataatctgttgatcctgagcgaaatgggggatgattccttcaataaggccgccccaatcaaagggtgtaagatttcaacagtgagcaaggccatggtgacgatctccaacacagccaatctgtcctcctgcgagggctacatcccaatgaaaaccaatattaccgtatatccctgcattgcgatgtcccccaggaacatccaagagccagaggcccccactgccacaccgaaagccggccccaccctcgcacagagtagggaatcaaaggagaacagcgctaagaaagaaatgaaatttgaagacccctggctcaaaagagaagaagaggtgaagaaggagactgcccatccaaacgaggaggggatgatgcgttgcgaaacagcaaccgggccttctaacgcggaaacacgggccgagcaggaacaagacggaaaaccatctcccggggacaggctcagttcatcctcaggcgaagtgagtgcttcaccagtcaccgacaatttccgaagagtggtggatggatgcgagatggccctcccgggcctggccacccagtctccagtacaccccaataagagcgtaaagtcttcctctctaccaagggcctttcagaaggccagccgccaagaggagcccgacagcttgagctattactgtgctgccgaaacaaacggcgtgggggctgctagtggcacacctccatctaaggccaccctggagggtaaggtggcatctcctaagcattgcgtcctcgctcgccccaaaggtacaccacctttgccgcctgtcagaaagtcatccctggatcagaaaaacagagcaagcccccagcactccgccagtggttctggcacttcaagtcctcttaaccagccggccgccttcccagctggactcccggacgagcccagcggtaagacaaaggatgcttcctcaagtagcaagctgtttagcgccaagttggaacagctggcgtcgcgcagcaattctttaggcagggctactgtctctcactacgaatgtctgtcgctcgagcgcgccgagtccctgtctagcgtttccagcaggctgcatgctgggaaggatggaacaatgccacgggctgggcggagcctggggagaagcgccgggactagtccccctagctcgggcgcttcgccaaaggcgggtcagtctaaaattagtgcagtaagtcgactactcctggcaagtcctcgggcgcgcggtccctctgcgtccacaaccaaaaccctctcgtttagtacaaaaagtctcccccaggccgtggggcagggttcatcctcgcccccagggggtaagcacactccttggagcacacagtctctttccaggaatcgatcatctggacttgcctccaagcttccgcttcgcgccgtgtccggccgcataagtgagcttctccaggggggggctggagctaggggactacagttgcgcgcaggaccagaggctgaggcgcgaggcggagctctcgctgaagacgaacctgcagctgcgcacctcttgccctccccatactcaaaaattaccccgccccgaaggcctcatcgctgctcatccggccatggctctgacaatagctccgtgctgtccggggaactacctccggctatggggaaaaccgccctgttttatcattctggcggatccagtggctatgagagtgtgatgcgagattcggaggccaccggctccgccagcagtgcccaggattcaacaagcgaaaatagtagctccgtcggaggtaggtgtcgctcactgaagacacccaaaaaacggagtaatcccgggagtcagagacgccggttgattcctgcccttagcctggatacctcctctcccgtccgcaaaccaccaaactccacaggagtccgctgggtagacggacccctgcgtagtagtccgcgcggactgggcgaaccatttgagattaaagtttacgagatcgatgatgttgaacgactccagcggcgtcggggcggtgcaagtaaggaagcgatgtgcttcaatgcaaagctgaagatattggaacacagacagcaacggatcgccgaggtgcgcgccaaatacgagtggctgatgaaggaactggaggctactaagcagtacctcatgctcgacccgaataagtggctttccgagtttgatctcgagcaagtctgggagttggattccctcgagtatctggaggctctggagtgcgtgaccgagcgtctcgagtcacgagtgaacttttgtaaggctcacctaatgatgatcacctgttttgatattacctctaggcgcagatag

SEQ ID NO: 341064 - DNA, 5808 bp, Artificial Sequence
  derived and/or modified sequence
tcctgagatggccccagatctgcaagagacatttgagagaagctatttattagcagacgtgaagaaatggattctgcacttgattatttagccatgacttatcaatgatgatggattggaaagcagtagctgcccagaagttaaatctgtcttctaaaaagaagaaacatcggccttccacttcttccgctgccgaaccaccgctctttgcaaccagcttcagtgggattctgcagacctcccctcccccagccccaccctgcctgctgagggctgtcaacaaggtgaaggacaccccggggctgggcaaggtgaaagtcatgcttcgcatctgttccaccttggctcgagatacttcagaatccagctctttcttaaaggtggacccacggaagaagcagatcaccttgtacgatcccctgacttgtggaggtcaaaatgccttccaaaagagaggcaaccaggttcctccaaagatgtttgccttcgatgcagtttttccacaagacgcttctcaggctgaagtgtgtgcaggcaccgtggcagaggtgatccagtctgtggtcaacggggcagatggctgcgtgttctgtttcggccacgccaaactgggaaaatcctacaccatgatcggaaaggatgattccatgcagaacctgggcatcattccctgtgccatctcttggctcttcaagctcataaacgaacgcaaggaaaagaccggcgcccgtttctcagtccgggtttccgccgtggaagtgtgggggaaggaggagaacctgcgggacctgctgtcggaggtggccacgggcagcctgcaggacggccagtccccgggcgtgtacctctgtgaggaccccatctgcggcacgcagctgcagaaccagagcgagctgcgggcccccaccgcagagaaggctgcctttttcctggatgccgccattgcctcccgcaggagccaccaacaggactgtgatgaggacgaccaccgcaactcacacgtgttcttcacactgcacatctaccagtaccggatggagaagagcgggaaagggggaatgtctggaggtcgcagccgcctgcatctcattgatctcggcagctgtgtgaaagctcttagcaaaaatcgagaaggaggctcagggctgtgtctctcgctgtctgctctgggcaatgtcatcctggctctcgtcaatggcagcaaacacattccatacaaagagagcaagctcgccatgttgctgcgggagtctctggggaacatgaactgccgtaccaccatgatcgcgcacatctcggccgcggtcgggagctacgcggagaccctgtccaccatccagattgcatcgagagtcttgaggatgaagaaaaagaagacgaagtacacatccagctcgtccggcggggagagctcctgcgaagaaggccgcatgcgcaggcccacccagctgagacccttccacaccagggccacggtggaccctgacttccccatcgctcacctgtccagcgaccccgactactcctccagcagcgagcagtcctgcgacaccgtcatctacatcgggcccaacggcacggccctctctgacaaggagctcaccgacaacgagggccccccagactttgtccctatcgtgccagccctgcagaagacccggggcgacagccggcccgcagaggcaggagaggctgcagccggcaagtcagaaagggactgcctgaagtgcaacacgtttgccgagctgcaggagaggctggactgcatcgacggcagcgaggagcccagcagctttcctttcgaagaactgcctgctcagtttgggccagagcaggcaagcagaggcccccggttaagccaagcagcgggggcaagcccactctctgagtctgataaggaagataatgggtccgaaggtcagctgaccaacagagaaggccctgaactcccagcctccaagatgcagaggagtcactcacctgtgcccgccgcggcacccgcccacagccccagcccggcctcacccaggagcgtcccgggcagcagtagccagcacagcgcctccccactcgtgcagagccccagcctccagagcagccgggagagcctcaactcctgcggcttcgtggaaggcaagcccaggcccatgggctccccccggctgggcatcgccagcctgtccaagacctcggagtacaagccacccagctctccttcccagagatgcaaagtctacacccagaagggggtcctgccgtctcccgccccactgcctccctcgagcaaggattccggcgtggcgtctagggagtccttgctgcagcccgaggtgcgtacgcccccggttggaatgagcccccaggttttgaaaaaatccatgtctgctgggagcgaagggttcccggaaactcctgtcgatgatgagcagcaggcagctactccttcagagtccaagaaggagatcctgagcaccacgatggtgacggtgcagcagccactggagctgaacggtgaggacgagctggtgttcacgctggtggaggagctgaccatcagcggggtcctggacagcggccgccccaccagcatcatcagcttcaacagcgactgctctgcacgggccctggcctcgggctcgcggcccgtcagcatcatcagcagcatcagcgaggacctggagtgctactccagcacggcccccgtctccgaggtcagcatcacacagttcttgcccctcccgaagatgagcctggatgagaaggcccaggacgcagggagcagacgctcttccatcagctcctggctgagcgagatgagcgcgggcagtgagggtgagcagtcgtgccacagtttcatagcccagacgtgttttgggcacggggaggcaatggcagaacctgtggcctcggagtttgtcagcagcctccagaacaccgctgtggtgtgcagagagaagcccaaggccagccccgacaacttgctcatcctgtctgagatgggagatgactctttcaacaaagcagcccccatcaaaggctgcaaaatatccacagtgagcaaggccatggtcaccatctccaacacggccaatctgagcagctgcgaggggtacatccccatgaagaccaatatcacagtttacccctgcattgccatgagcccccggaacatccaagagccggaggcccccaccgccacccccaaagcaggccccacattagcccagtcccgggagagtaaggaaaacagtgcaaagaaagagatgaaatttgaggacccgtggctgaaacgagaagaggaagtgaaaaaagagacggctcatcccaatgaagaagggatgatgaggtgtgagactgccacgggcccctcgaatgctgagaccagagcagagcaggagcaggacggaaagcccagtccgggagacaggctcagcagcagcagcggagaggtgtcggcctccccggtcactgacaacttcaggagggtcgtggatgggtgtgagatggccctgcccggtttggccacccagagccccgtgcatcccaacaaaagcgtcaagtccagcagccttcccagggcctttcagaaggccagccggcaggaggagccggacagcctctcctattactgcgctgctgagaccaacggggtgggtgcagcctcgggcaccccgccctccaaggctaccctggaggggaaggtggcttcccccaagcactgtgttctggctcggcccaaagggactccccctctgccccctgtccgaaagtccagcctggaccagaagaaccgggccagccctcagcacagtgccagcggcagcggcaccagcagccccctgaaccaaccagccgccttcccggcgggcctcccagacgagcctagcggcaagacgaaggacgccagcagcagcagcaagctcttcagtgccaagctggagcagctggccagcagaagcaactcgctgggcagggcgacagtcagccactacgaatgcctctccctggagcgggccgagagcctgtcctccgtgagctcccggctgcacgcgggcaaggacggcaccatgccccgcgcggggaggagcctgggccgcagcgccgggacctcgccccccagctccggggcctcgcccaaggccggccagtccaagatctccgccgtgagcagactcctcctggccagccccagagcgcgcggcccgtccgcctccaccaccaaaaccctcagcttctccaccaagtccctgccgcaggcggtgggccagggctccagctcgccccccggtgggaagcacacgccctggtccacgcagtccctcagcaggaacaggagctcgggcctggcctccaagcttcccctgcgggccgtcagcgggcgcatctcggagctgctgcagggtggcgcgggcgcccggggcttgcagctgcgggccgggcccgaggcggaggcgcgcgggggggccctggccgaggacgagcccgcggccgcgcacctgctcccgtcgccctacagcaagatcacgcccccgcggaggccccaccgctgcagcagcggccacggcagcgacaacagcagcgtgctgagcggggagctcccgccggccatggggaagacggccctgttctaccacagcggcggcagcagcggctacgagagcgtgatgcgggacagcgaggccaccggcagcgcgtcctcggcgcaggactccacgagcgagaacagcagctccgtgggcggcaggtgccggagcctcaagaccccgaagaaacgctccaatccaggttctcagagacggaggcttatcccagcactatccctggacacctcttcccctgtgagaaaaccccccaacagcacaggcgtccgctgggtggatggccccttgcggagcagcccgaggggccttggggaaccctttgagattaaagtctatgaaatcgatgacgtggagcgcctgcagcggcgacgagggggtgccagcaaggaggccatgtgcttcaatgcaaagctgaagattctggaacaccgccagcagaggatcgccgaggtccgcgcgaagtacgagtggctgatgaaggagctggaggcgaccaaacagtatctgatgctggatcccaacaagtggctcagtgaatttgacttggagcaggtttgggagctggattccctggagtacctggaggcactggagtgtgtgacggagcgcctggagagccgtgtcaacttctgcaaggcccatctcatgatgatcacctgcttcgacatcacctccaggcgccggtagatgagccagacccttgtcctagtggtcccccgctccccaggacttcagagatgttgcacgcccctaggccctctgtgctggggcatcaaagacaatgaatgaggatgaaggttggtggcaagtctggagcgggcgttgagcggaaggcgagttttcttttgttttctgtaggaaaggtgcaaacgtcaaacaccgtggaaggagaaaaggatgggaagcccgaggggtgtccaagccctgtgagactgaaaaagcactttgaggaaccttaaagaccttgtttgtacataagaactgctagcaaaagagacctcactcttctcttgctttcgtgagaaaggaggggcgtggatgtaggattgctgtggaaagcgaacacaaaacaacccagaatgactgattaagtgccttgcaaatctttattattatccaaacatttatgttcatactttcttgtgtacagatggtgctagtcaagatgaaaacaacaaaacaaacaagaaaaacattttggaaatgt

SEQ ID NO: 341065 - DNA, 5695 bp, Artificial Sequence
  derived and/or modified sequence
gattggaaaacgaaagctgcccagaagttaaatctgtcttctaaaaagaagaaacatcggccttccacttcttccgctgccgaaccaccgctctttgcaaccagcttcagtgggattctgcagacctcccctcccccagccccaccctgcctgctgagggctgtcaacaaggtgaaggacaccccggggctgggcaaggtgaaagtcatgcttcgcatctgttccaccttggctcgagatacttcagaatccagctctttcttaaaggtggacccacggaagaagcagatcaccttgtacgatcccctgacttgtggaggtcaaaatgccttccaaaagagaggcaaccaggttcctccaaagatgtttgccttcgatgcagtttttccacaagacgcttctcaggctgaagtgtgtgcaggcaccgtggcagaggtgatccagtctgtggtcaacggggcagatggctgcgtgttctgtttcggccacgccaaactgggaaaatcctacaccatgatcggaaaggatgattccatgcagaacctgggcatcattccctgtgccatctcttggctcttcaagctcataaacgaacgcaaggaaaagaccggcgcccgtttctcagtccgggtttccgccgtggaagtgtgggggaaggaggagaacctgcgggacctgctgtcggaggtggccacgggcagcctgcaggacggccagtccccgggcgtgtacctctgtgaggaccccatctgcggcacgcagctgcagaaccagagcgagctgcgggcccccaccgcagagaaggctgcctttttcctggatgccgccattgcctcccgcaggagccaccaacaggactgtgatgaggacgaccaccgcaactcacacgtgttcttcacactgcacatctaccagtaccggatggagaagagcgggaaagggggaatgtctggaggtcgcagccgcctgcatctcattgatctcggcagctgtgtgaaagctcttagcaaaaatcgagaaggaggctcagggctgtgtctctcgctgtctgctctgggcaatgtcatcctggctctcgtcaatggcagcaaacacattccatacaaagagagcaagctcgccatgttgctgcgggagtctctggggaacatgaactgccgtaccaccatgatcgcgcacatctcggccgcggtcgggagctacgcggagaccctgtccaccatccagattgcatcgagagtcttgaggatgaagaaaaagaagacgaagtacacatccagctcgtccggcggggagagctcctgcgaagaaggccgcatgcgcaggcccacccagctgagacccttccacaccagggccacggtggaccctgacttccccatcgctcacctgtccagcgaccccgactactcctccagcagcgagcagtcctgcgacaccgtcatctacatcgggcccaacggcacggccctctctgacaaggagctcaccgacaacgagggccccccagactttgtccctatcgtgccagccctgcagaagacccggggcgacagccggcccgcagaggcaggagaggctgcagccggcaagtcagaaagggactgcctgaagtgcaacacgtttgccgagctgcaggagaggctggactgcatcgacggcagcgaggagcccagcagctttcctttcgaagaactgcctgctcagtttgggccagagcaggcaagcagaggcccccggttaagccaagcagcgggggcaagcccactctctgagtctgataaggaagataatgggtccgaaggtcagctgaccaacagagaaggccctgaactcccagcctccaagatgcagaggagtcactcacctgtgcccgccgcggcacccgcccacagccccagcccggcctcacccaggagcgtcccgggcagcagtagccagcacagcgcctccccactcgtgcagagccccagcctccagagcagccgggagagcctcaactcctgcggcttcgtggaaggcaagcccaggcccatgggctccccccggctgggcatcgccagcctgtccaagacctcggagtacaagccacccagctctccttcccagagatgcaaagtctacacccagaagggggtcctgccgtctcccgccccactgcctccctcgagcaaggattccggcgtggcgtctagggagtccttgctgcagcccgaggtgcgtacgcccccggttggaatgagcccccaggttttgaaaaaatccatgtctgctgggagcgaagggttcccggaaactcctgtcgatgatgagcagcaggcagctactccttcagagtccaagaaggagatcctgagcaccacgatggtgacggtgcagcagccactggagctgaacggtgaggacgagctggtgttcacgctggtggaggagctgaccatcagcggggtcctggacagcggccgccccaccagcatcatcagcttcaacagcgactgctctgcacgggccctggcctcgggctcgcggcccgtcagcatcatcagcagcatcagcgaggacctggagtgctactccagcacggcccccgtctccgaggtcagcatcacacagttcttgcccctcccgaagatgagcctggatgagaaggcccaggacgcagggagcagacgctcttccatcagctcctggctgagcgagatgagcgcgggcagtgagggtgagcagtcgtgccacagtttcatagcccagacgtgttttgggcacggggaggcaatggcagaacctgtggcctcggagtttgtcagcagcctccagaacaccgctgtggtgtgcagagagaagcccaaggccagccccgacaacttgctcatcctgtctgagatgggagatgactctttcaacaaagcagcccccatcaaaggctgcaaaatatccacagtgagcaaggccatggtcaccatctccaacacggccaatctgagcagctgcgaggggtacatccccatgaagaccaatatcacagtttacccctgcattgccatgagcccccggaacatccaagagccggaggcccccaccgccacccccaaagcaggccccacattagcccagtcccgggagagtaaggaaaacagtgcaaagaaagagatgaaatttgaggacccgtggctgaaacgagaagaggaagtgaaaaaagagacggctcatcccaatgaagaagggatgatgaggtgtgagactgccacgggcccctcgaatgctgagaccagagcagagcaggagcaggacggaaagcccagtccgggagacaggctcagcagcagcagcggagaggtgtcggcctccccggtcactgacaacttcaggagggtcgtggatgggtgtgagatggccctgcccggtttggccacccagagccccgtgcatcccaacaaaagcgtcaagtccagcagccttcccagggcctttcagaaggccagccggcaggaggagccggacagcctctcctattactgcgctgctgagaccaacggggtgggtgcagcctcgggcaccccgccctccaaggctaccctggaggggaaggtggcttcccccaagcactgtgttctggctcggcccaaagggactccccctctgccccctgtccgaaagtccagcctggaccagaagaaccgggccagccctcagcacagtgccagcggcagcggcaccagcagccccctgaaccaaccagccgccttcccggcgggcctcccagacgagcctagcggcaagacgaaggacgccagcagcagcagcaagctcttcagtgccaagctggagcagctggccagcagaagcaactcgctgggcagggcgacagtcagccactacgaatgcctctccctggagcgggccgagagcctgtcctccgtgagctcccggctgcacgcgggcaaggacggcaccatgccccgcgcggggaggagcctgggccgcagcgccgggacctcgccccccagctccggggcctcgcccaaggccggccagtccaagatctccgccgtgagcagactcctcctggccagccccagagcgcgcggcccgtccgcctccaccaccaaaaccctcagcttctccaccaagtccctgccgcaggcggtgggccagggctccagctcgccccccggtgggaagcacacgccctggtccacgcagtccctcagcaggaacaggagctcgggcctggcctccaagcttcccctgcgggccgtcagcgggcgcatctcggagctgctgcagggtggcgcgggcgcccggggcttgcagctgcgggccgggcccgaggcggaggcgcgcgggggggccctggccgaggacgagcccgcggccgcgcacctgctcccgtcgccctacagcaagatcacgcccccgcggaggccccaccgctgcagcagcggccacggcagcgacaacagcagcgtgctgagcggggagctcccgccggccatggggaagacggccctgttctaccacagcggcggcagcagcggctacgagagcgtgatgcgggacagcgaggccaccggcagcgcgtcctcggcgcaggactccacgagcgagaacagcagctccgtgggcggcaggtgccggagcctcaagaccccgaagaaacgctccaatccaggttctcagagacggaggcttatcccagcactatccctggacacctcttcccctgtgagaaaaccccccaacagcacaggcgtccgctgggtggatggccccttgcggagcagcccgaggggccttggggaaccctttgagattaaagtctatgaaatcgatgacgtggagcgcctgcagcggcgacgagggggtgccagcaaggaggccatgtgcttcaatgcaaagctgaagattctggaacaccgccagcagaggatcgccgaggtccgcgcgaagtacgagtggctgatgaaggagctggaggcgaccaaacagtatctgatgctggatcccaacaagtggctcagtgaatttgacttggagcaggtttgggagctggattccctggagtacctggaggcactggagtgtgtgacggagcgcctggagagccgtgtcaacttctgcaaggcccatctcatgatgatcacctgcttcgacatcacctccaggcgccggtagatgagccagacccttgtcctagtggtcccccgctccccaggacttcagagatgttgcacgcccctaggccctctgtgctggggcatcaaagacaatgaatgaggatgaaggttggtggcaagtctggagcgggcgttgagcggaaggcgagttttcttttgttttctgtaggaaaggtgcaaacgtcaaacaccgtggaaggagaaaaggatgggaagcccgaggggtgtccaagccctgtgagactgaaaaagcactttgaggaaccttaaagaccttgtttgtacataagaactgctagcaaaagagacctcactcttctcttgctttcgtgagaaaggaggggcgtggatgtaggattgctgtggaaagcgaacacaaaacaacccagaatgactgattaagtgccttgcaaatctttattattatccaaacatttatgttcatactttcttgtgtacagatggtgctagtcaagatgaaaacaacaaaacaaacaagaaaaacattttggaaatgt

SEQ ID NO: 341066 - DNA, 5184 bp, Artificial Sequence
  derived and/or modified sequence
atgatgatggactggaaggctgtggccgcccagaagctgaacctgagcagcaagaagaagaagcaccggcccagcaccagcagcgctgctgagccccccctgtttgccaccagcttcagcggcatcctgcagaccagccccccaccagccccaccctgcctgctgcgggctgtgaacaaggtgaaggacaccccaggcctgggcaaggtgaaggtgatgctgcgcatctgcagcaccctggcccgggacaccagcgagagcagcagcttcctgaaggtggaccccaggaagaagcagatcaccctgtatgaccccctgacctgtggcggccagaatgccttccagaagaggggcaaccaggtgccccccaagatgtttgcctttgatgctgtgttcccccaggatgccagccaggccgaggtgtgtgccggcaccgtggccgaggtgatccagagcgtggtgaatggagcagatggctgtgtgttctgcttcggccacgccaagctgggcaagagctacaccatgattggcaaggatgacagcatgcagaacctgggcatcatcccctgtgccatctcctggctgttcaagctgatcaatgaaaggaaggagaagacaggagcccgcttctctgtgcgggtgtctgctgtggaggtgtggggcaaggaggagaacctgcgggacctgctgtctgaggtggccaccggcagcctgcaggacggccagagccctggggtgtacctgtgtgaggaccccatctgtggcacccagctgcagaaccagagcgagctgcgggcccccacagctgagaaggccgccttcttcctggatgctgccatcgccagcagaagaagccaccagcaggactgtgatgaagatgaccacaggaacagccacgtgttcttcaccctgcacatctaccagtacaggatggagaagagcggcaagggcggcatgtctgggggccgcagccggctgcacctgattgacctgggcagctgtgtgaaggccctgagcaagaaccgggagggcggcagcggcctgtgcctgagcctgagcgccctgggcaatgtcatcctggccctggtgaatggcagcaagcacatcccctacaaggagagcaagctggccatgctgctgcgggagagcctgggcaacatgaactgcaggaccaccatgattgcccacatctctgctgctgtgggcagctatgcagagaccctgagcaccatccagatcgccagccgggtgctgaggatgaagaagaagaagaccaagtacaccagcagcagcagcggcggggagagcagctgtgaggagggccgcatgaggcggcccacccagctgcggcccttccacacccgggccaccgtggaccctgacttccccatcgcccacctgagcagtgaccctgactacagcagcagcagcgagcagagctgtgacaccgtcatctacatcggccccaacggcacagccctgagtgacaaggagctgacagacaatgaaggacctccagactttgtgcccatcgtgcctgccctgcagaagaccaggggggacagcaggcctgctgaggccggggaggccgccgccggcaagtctgagcgggactgcctgaagtgcaacacctttgctgagctgcaggagcggctggactgcattgatggcagcgaggagcccagcagcttcccctttgaggagctgcctgcccagtttggacctgagcaggccagccggggcccccggctgagccaggccgccggggccagccccctgtctgagagtgacaaggaggacaatggaagtgagggccagctgaccaaccgggagggccctgagctgcctgccagcaagatgcagaggagccacagccctgtgcctgctgctgccccagcccacagccccagccctgccagccccaggtctgtgcccggcagcagcagccagcacagcgccagccccctggtgcagagccccagcctgcagagcagccgggagagcctgaacagctgtggctttgtggagggcaagccccggcccatgggcagcccccggctgggcatcgccagcctgagcaagaccagcgagtacaagccacccagcagccccagccagcgctgcaaggtgtacacccagaagggcgtgctgcccagccctgcccccctgccccccagcagcaaggacagcggcgtggccagccgggagagcctgctgcagcctgaggtgaggaccccacctgtgggcatgagcccccaggtgctgaagaagtccatgtctgctggcagcgagggcttccctgagacccctgtggatgatgagcagcaggccgccaccccatctgagagcaagaaggagatcctgagcaccaccatggtgacagtgcagcagcccctggagctgaatggagaagatgagctggtgttcaccctggtggaggagctgaccatcagcggcgtgctggacagcggccggcccaccagcatcatctccttcaacagcgactgcagcgcccgggccctggccagcggcagcaggcctgtgtccatcatcagcagcatcagcgaggacctggagtgctacagcagcacagcccctgtgtctgaggtgtccatcacccagttcctgcccctgcccaagatgagcctggatgagaaggcccaggatgctggcagcagaagaagcagcatcagctcctggctgtctgagatgtctgctggcagcgagggggagcagagctgccacagcttcatcgcccagacctgctttggacatggagaggccatggccgagcctgtggccagcgagtttgtgagcagcctgcagaacacagctgtggtgtgccgggagaagcccaaggccagcccagacaacctgctgatcctgtctgagatgggagatgacagcttcaacaaggccgcccccatcaagggctgcaagatcagcacagtgtccaaggccatggtgaccatcagcaacacagccaacctgagcagctgtgagggctacatccccatgaagaccaacatcaccgtgtacccctgcatcgccatgagccccaggaacatccaggagcctgaggcccccacagccacccccaaggccggccccaccctggcccagagccgggagagcaaagaaaattctgccaagaaggagatgaagtttgaggacccctggctgaagcgggaggaggaggtgaagaaggagacagcccaccccaatgaggagggcatgatgagatgtgaaacagccaccggccccagcaatgctgagaccagggctgagcaggagcaggacggcaagcccagccctggggaccggctgagcagcagcagtggagaggtgtctgccagccctgtgacagacaacttccggcgggtggtggatggctgtgagatggccctgcccggcctggccacccagagccctgtgcaccccaacaagtctgtgaagagcagcagcctgccccgggccttccagaaggccagccggcaggaggagccagacagcctgagctactactgtgccgctgagaccaatggagtgggcgccgccagcggcaccccacccagcaaggccaccctggagggcaaggtggccagccccaagcactgtgtgctggcccggcccaagggcaccccacccctgccccctgtgaggaagagcagcctggaccagaagaacagagccagcccccagcacagcgccagcggcagcggcaccagcagccccctgaaccagcctgctgccttccctgctggcctgcctgatgagcccagcggcaagaccaaggatgccagcagcagcagcaagctgttcagcgccaagctggagcagctggccagccgcagcaacagcctgggccgggccaccgtgagccactatgaatgtctgagcctggagcgggcagagagcctgagctctgtgagcagccggctgcacgccggcaaggatggcaccatgcccagggctggccgcagcctgggccgctctgctggcaccagcccccccagcagcggggccagccccaaggccggccagagcaagatctctgctgtgtcccggctgctgctggccagcccccgggcccggggccccagcgccagcaccaccaagaccctgtccttcagcaccaagagcctgccccaggccgtgggccagggcagcagcagccccccaggcggcaagcacaccccctggagcacccagagcctgagcaggaacagaagcagcggcctggccagcaagctgcccctgcgggctgtgtctggccgcatcagcgagctgctgcagggcggggccggggcccggggcctgcagctgcgggccggccctgaggccgaggcccggggcggggccctggctgaagatgagcctgctgctgcccacctgctgcccagcccctacagcaagatcaccccaccaagaagaccccaccgctgcagcagcggccacggcagtgacaacagctctgtgctgtctggagagctgcccccagccatgggcaagacagccctcttctaccacagcggcggcagcagcggctatgaatctgtgatgagggacagcgaggccactggaagtgccagcagcgcccaggacagcaccagcgagaacagcagctctgtgggcggccgctgccgcagcctgaagacccccaagaagaggagcaaccctggcagccagaggagaagactcatcccagccctgagcctggacaccagcagccctgtgaggaagccacccaacagcactggagtgcgctgggtggatggccccctgcggagcagcccccggggcctgggggagccctttgagatcaaggtgtatgaaattgatgatgtggagcggctgcagaggcggcggggcggggccagcaaggaggccatgtgcttcaatgccaagctgaagatcctggagcaccggcagcagagaattgctgaggtgcgggccaagtatgagtggctgatgaaggagctggaggccaccaagcagtacctgatgctggaccccaacaagtggctgtctgaatttgacctggagcaggtgtgggagctggacagcctggagtacctggaggccctggagtgtgtgacagagcggctggagagccgggtgaacttctgcaaggcccacctgatgatgatcacctgctttgacatcaccagcagaagaagatag

SEQ ID NO: 341067 - DNA, 5175 bp, Artificial Sequence
  derived and/or modified sequence
gactggaagaccaaggccgcccagaagctgaacctgagcagcaagaagaagaagcaccggcccagcaccagcagcgctgctgagccccccctgtttgccaccagcttcagcggcatcctgcagaccagccccccaccagccccaccctgcctgctgcgggctgtgaacaaggtgaaggacaccccaggcctgggcaaggtgaaggtgatgctgcgcatctgcagcaccctggcccgggacaccagcgagagcagcagcttcctgaaggtggaccccaggaagaagcagatcaccctgtatgaccccctgacctgtggcggccagaatgccttccagaagaggggcaaccaggtgccccccaagatgtttgcctttgatgctgtgttcccccaggatgccagccaggccgaggtgtgtgccggcaccgtggccgaggtgatccagagcgtggtgaatggagcagatggctgtgtgttctgctttggacatgccaagctgggcaagagctacaccatgattggcaaggatgacagcatgcagaacctgggcatcatcccctgtgccatctcctggctgttcaagctgatcaatgaaaggaaggagaagacaggagcccgcttctctgtgcgggtgtctgctgtggaggtgtggggcaaggaggagaacctgcgggacctgctgtctgaggtggccaccggcagcctgcaggacggccagagccctggggtgtacctgtgtgaggaccccatctgtggcacccagctgcagaaccagagcgagctgcgggcccccacagctgagaaggccgccttcttcctggatgctgccatcgccagccgccgcagccaccagcaggactgtgatgaagatgaccacaggaacagccacgtgttcttcaccctgcacatctaccagtacaggatggagaagtctggaaaaggaggcatgtctgggggccgcagccggctgcacctgattgacctgggcagctgtgtgaaggccctgagcaagaaccgggagggcggcagcggcctgtgcctgagcctgagcgccctgggcaatgtcatcctggccctggtgaatggcagcaagcacatcccctacaaggagagcaagctggccatgctgctgcgggagagcctgggcaacatgaactgcaggaccaccatgattgcccacatctctgctgctgtgggcagctatgcagagaccctgagcaccatccagatcgccagccgggtgctgaggatgaagaagaagaagaccaagtacaccagcagcagcagtggaggagagagcagctgtgaggagggccgcatgagaagacccacccagctgcggcccttccacacccgggccaccgtggaccctgacttccccatcgcccacctgagcagtgaccctgactacagcagcagcagcgagcagagctgtgacaccgtcatctacatcggccccaatggaacagccctgagtgacaaggagctgacagacaatgaaggccccccagactttgtgcccatcgtgcctgccctgcagaagaccaggggggacagcaggcctgctgaggccggggaggccgctgctgggaagtctgagcgggactgcctgaagtgcaacacctttgctgagctgcaggagcggctggactgcattgatggcagcgaggagcccagcagcttcccctttgaggagctgcctgcccagtttggacctgagcaggccagccggggcccccggctgagccaggccgccggggccagccccctgtctgagagtgacaaggaggacaatggcagcgagggccagctgaccaaccgggagggccctgagctgcctgccagcaagatgcagaggagccacagccctgtgcctgctgctgccccagcccacagccccagccctgccagccccaggtctgtgcccggcagcagcagccagcacagcgccagccccctggtgcagagccccagcctgcagagcagccgggagagcctgaacagctgtggctttgtggagggcaagccccggcccatgggcagcccccggctgggcatcgccagcctgagcaagaccagcgagtacaagccacccagcagccccagccagcgctgcaaggtgtacacccagaagggcgtgctgcccagccctgcccccctgccccccagcagcaaggacagcggcgtggccagccgggagagcctgctgcagcctgaggtgaggaccccacctgtgggcatgagcccccaggtgctgaagaagtccatgtctgctggcagcgagggcttccctgagacccctgtggatgatgagcagcaggccgccacccccagcgagagcaagaaggagatcctgagcaccaccatggtgacagtgcagcagcccctggagctgaatggagaagatgagctggtgttcaccctggtggaggagctgaccatctctggagtgctggacagcggccggcccaccagcatcatctccttcaacagcgactgcagcgcccgggccctggccagcggcagcaggcctgtgtccatcatcagcagcatcagcgaggacctggagtgctacagcagcacagcccctgtgtctgaggtgtccatcacccagttcctgcccctgcccaagatgagcctggatgagaaggcccaggatgctggcagccgccgcagcagcatcagctcctggctgtctgagatgtctgctggcagcgagggggagcagagctgccacagcttcatcgcccagacctgcttcggccacggggaggccatggccgagcctgtggccagcgagtttgtgagcagcctgcagaacacagctgtggtgtgccgggagaagcccaaggccagcccagacaacctgctgatcctgtctgagatgggagatgacagcttcaacaaggccgcccccatcaagggctgcaagatcagcacagtgtccaaggccatggtgaccatcagcaacacagccaacctgagcagctgtgagggctacatccccatgaagaccaacatcaccgtgtacccctgcatcgccatgagccccaggaacatccaggagcctgaggcccccacagccacccccaaggccggccccaccctggcccagagccgggagagcaaggagaacagcgccaagaaggagatgaagtttgaggacccctggctgaagcgggaggaggaggtgaagaaggagacagcccaccccaatgaggagggcatgatgagatgtgaaacagccaccggccccagcaatgctgagaccagggctgagcaggagcaggacggcaagcccagccctggggaccggctgagcagcagcagcggggaggtgtctgccagccctgtgacagacaacttcagaagagtggtggatggctgtgagatggccctgcccggcctggccacccagagccctgtgcaccccaacaagtctgtgaagagcagcagcctgccccgggccttccagaaggccagccggcaggaggagccagacagcctgagctactactgtgccgctgagaccaacggggtgggcgccgccagcggcaccccacccagcaaggccaccctggagggcaaggtggccagccccaagcactgtgtgctggcccggcccaagggcaccccacccctgccccctgtgaggaagagcagcctggaccagaagaacagagccagcccccagcacagcgccagcggcagcggcaccagcagccccctgaaccagcctgctgccttccctgctggcctgcctgatgagcccagcggcaagaccaaggatgccagcagcagcagcaagctgttcagcgccaagctggagcagctggccagccgcagcaacagcctgggccgggccaccgtgagccactatgagtgcctgagcctggagagagctgagagcctgagctctgtgagcagccggctgcatgctgggaaggatggcaccatgccccgggccggccgcagcctgggccgctctgctggcaccagcccccccagcagcggggccagccccaaggccggccagagcaagatctctgctgtgtcccggctgctgctggccagcccccgggcccggggccccagcgccagcaccaccaagaccctgtccttcagcaccaagagcctgccccaggccgtgggccagggcagcagcagccccccaggcggcaagcacaccccctggagcacccagagcctgagcaggaacagaagcagcggcctggccagcaagctgcccctgcgggctgtgtctggccgcatcagcgagctgctgcagggcggggccggggcccggggcctgcagctgcgggccggccctgaggccgaggcccggggcggggccctggccgaggatgagcctgctgctgcccacctgctgcccagcccctacagcaagatcaccccaccccggcggccccaccgctgcagcagcggccacggcagtgacaacagctctgtgctgagcggggagctgcccccagccatgggcaagacagccctcttctaccacagcggcggcagcagcggctatgagagcgtgatgagggacagcgaggccaccggcagcgccagcagcgcccaggacagcaccagcgagaacagcagctctgtgggcggccgctgccgcagcctgaagacccccaagaagaggagcaaccctggcagccagaggcggcggctcatcccagccctgagcctggacaccagcagccctgtgaggaagccacccaacagcactggagtgcgctgggtggatggccccctgcggagcagcccccggggcctgggggagccctttgagatcaaggtgtatgaaattgatgatgtggagcggctgcagaggagaagaggaggagccagcaaggaggccatgtgcttcaatgccaagctgaagatcctggagcaccggcagcagagaattgctgaggtgcgggccaagtatgagtggctgatgaaggagctggaggccaccaagcagtacctgatgctggaccccaacaagtggctgtctgaatttgacctggagcaggtgtgggagctggacagcctggagtacctggaggccctggagtgtgtgacagagcggctggagagccgggtgaacttctgcaaggcccacctgatgatgatcacctgctttgacatcaccagcagaagaagatag

SEQ ID NO: 341068 - DNA, 5184 bp, Artificial Sequence
  derived and/or modified sequence
atgatgatggactggaaggccgtggccgcccagaagctgaacctgagcagcaaaaaaaaaaaacaccggcctagcaccagctccgccgctgagccaccactctttgccacaagtttttccgggatcctgcagacgtcgccacctccagcccccccatgtctcctgcgcgctgtgaataaggtgaaggatactcccgggcttggcaaggtgaaagtcatgttaaggatttgctccacgttggctcgcgatacttctgagagttccagcttcctcaaggtggatccaagaaagaagcagatcacactctatgatcctttgacatgcggtggccagaatgcttttcaaaagcgaggtaatcaggtacccccgaaaatgtttgctttcgacgccgtgtttccacaggatgcaagtcaggccgaggtttgcgcgggtacagtcgcagaggtcattcaatccgtcgtcaacggggccgatggatgcgttttctgtttcggacacgctaagcttgggaagtcgtataccatgataggcaaggacgactccatgcagaacctgggcatcataccctgcgccatatcttggctttttaagttgatcaatgagagaaaggagaagaccggcgccaggttttctgtccgggtaagtgctgttgaggtatgggggaaagaagaaaatcttcgtgatctcctgtctgaggtggctaccggatctctgcaggacggacagtcgcccggagtctatctgtgtgaggaccccatctgcggaactcagctgcagaatcagtccgaactacgggctcctactgctgagaaagcagccttcttccttgacgccgccatcgcgagcagacggtctcaccagcaggattgcgatgaagacgatcacaggaacagccacgtgttcttcacccttcacatctaccagtacaggatggaaaagtctggaaagggaggcatgagtggagggcgatcccggctccacctgatcgacctcggatcatgtgtaaaggctctgagcaagaaccgggaaggggggagtggtctctgtctaagcctgagcgcactaggtaatgttattctcgcgttggtgaatgggtcaaaacacattccatataaggaatctaagctggccatgctgttgcgagagtctctggggaatatgaactgcagaaccaccatgatcgctcacattagtgcagctgtaggaagctatgcagaaaccctgtctacaattcaaatcgccagccgagtcctcaggatgaaaaagaagaagacgaagtatacctcctcttcctctggaggcgaatcctcttgcgaagaaggaaggatgcggcgccccacccagctgcgcccttttcatacccgcgctactgtcgacccagactttccaatagcgcacttgagttccgaccctgattacagttcatcttcagagcagtcttgtgacaccgtcatatatattgggcctaacggtacagccctaagtgacaaggaactcactgacaacgaaggccctccagactttgtcccaatcgtcccggccttacagaagacacgaggggactccaggcctgctgaggccggagaagcagctgcaggcaagtctgagcgggattgtctgaagtgtaatacattcgccgagctccaggaacgcctcgattgcatcgatggcagcgaggagccctcgagtttcccctttgaagagttacccgcgcagttcgggcccgagcaagcatccagaggccccagactttctcaggcggcgggggcatctcctctgagtgagtcggataaagaagataatggctccgaagggcagttgaccaatagagagggtcccgagcttcctgcttccaagatgcagcgctcccattctccagtcccagccgcagcccctgcccattcacctagcccagctagcccacggtcagtgccgggaagcagcagtcagcattctgcatcacccctcgtccagtccccttccttacagtccagcagagagtccttgaattcttgcggtttcgtggagggtaaaccaagacctatgggaagcccacgtttgggaatcgcctctttgagcaaaacttctgagtataaacccccgtcgtcacctagccagagatgcaaggtttatacacagaaaggagtgttaccatccccggcacctctgccaccatcatccaaggattctggtgtagcctcccgtgagagcctgttacagccagaggtccggaccccacctgtgggtatgagccctcaggtgctgaaaaagtcgatgtcagccggatctgaaggtttccctgagacgcctgtggatgatgagcagcaggccgcaaccccgagtgagtctaagaaagagattctgagtaccacaatggtgaccgtccagcagccactggagttgaatggtgaagatgaactggtcttcaccctcgtggaagagctgacgatcagtggcgtgctagactcaggtcggccaacgtcaatcatctcttttaatagtgactgctctgctcgagcattggcgtctggttccagaccagtcagcattatttcaagtatcagtgaggatctggagtgttattctagcacagccccggtgtcagaagtttccattacacagtttttacctctgccaaagatgtccttggacgagaaggcccaggatgcaggaagccgacgcagcagcatttcatcctggctgagtgaaatgtccgccgggtccgagggcgagcagtcttgtcatagcttcatcgcccaaacctgttttggccatggggaggccatggccgaaccagttgccagtgagttcgttagctcacttcagaacaccgccgtggtgtgccgtgagaagcccaaggcgtcccctgataacctgttgatcctgtctgagatgggggacgactcattcaacaaggctgccccaattaagggttgcaaaatcagcacagtttctaaagccatggtcacgatctccaacacagccaatctcagcagttgcgaggggtacatacctatgaaaacaaatatcaccgtctatccttgtattgccatgagccccagaaacatccaagagcctgaggcacctactgccactccaaaggccgggccaacactagctcagtcacgggaaagtaaagagaattccgccaaaaaagaaatgaagttcgaggacccctggctgaaaagggaggaagaagtgaaaaaagaaacggctcacccaaatgaggaaggcatgatgcgatgtgagacagcgacaggaccgagcaacgcggaaacgagagctgaacaggaacaggacggcaaacctagtccaggagatcggctgtcctcttcttctggtgaggtttccgcttcccctgtcaccgataatttccgtagagtagtggacggatgtgaaatggctctgcctgggctcgccacacaaagtcctgtgcacccaaacaaaagtgtcaagagttctagcctgcctagggccttccagaaggcatcccggcaggaagaacctgacagcttgagctattattgcgcagctgaaacaaatggtgtcggcgcggctagtggaacccctccctctaaggcaactcttgaaggcaaagtggcttccccaaagcattgcgtcctcgccaggcctaagggtacgccccctctgcccccggtgagaaaaagttctttagatcagaaaaaccgagccagcccacagcatagtgcctccggtagcgggacaagcagcccgctgaaccaacccgcagctttccctgctggcctcccagatgagcctagtggcaagacaaaggatgcatcgtcctcatccaaactcttctccgccaagcttgagcagctggcctccaggtccaactccctcggccgggccactgtttctcactacgagtgtctgagcttggagcgcgctgaatccttgtcgtctgtttctagtcgactacatgccggaaaggatgggacaatgccccgcgccggacgctcactgggtaggtcagcaggcacctcccctcccagtagcggggcctcacctaaggcgggtcagagtaagatcagtgccgtgtcaagactcctgctggccagccctagggcccgagggcccagtgcctcaacaactaagaccctctctttctctacaaagagtctgcctcaggctgttggacagggctcttcctctccccctgggggcaagcatacgccttggagcacacagtccttgagccggaaccgcagctcaggcctggcttcaaaactccctttgcgggctgtgagcggccgaatttctgagttactgcagggcggcgctggggcaagaggcctgcagctgcgcgctggcccagaggctgaggcacgcggcggcgctcttgcggaggacgagccagcggcagctcatttgctgccatccccgtatagtaagattactcctccacgcaggccccacaggtgctcgagcggacatgggtccgataactcatctgtgttatctggcgagctcccaccggcaatgggcaagactgcacttttctatcactctggaggcagcagcggctatgaatccgtgatgcgggactctgaagctacaggctctgcaagctctgctcaagatagtacaagtgagaattcgtcttccgtcgggggcaggtgccggtcactcaaaacgcctaagaaaagaagtaaccctgggtcccaacggcggcggctcatcccagcgctgagccttgatacttctagtcctgtcaggaaacctccaaacagcacgggggttcgttgggtcgacggtcccctgagatcctcccctagaggtctgggagagcccttcgagataaaagtgtatgagattgacgatgtggagagattgcagagacggaggggcggagcctccaaggaggccatgtgcttcaacgccaaattaaaaatactggagcataggcagcagagaattgccgaggtgagggccaaatacgaatggctgatgaaggagttagaggcgactaagcagtatctgatgctggaccctaacaagtggctgtctgagttcgacctcgagcaggtgtgggaactcgattcactggagtacctggaggcactcgagtgcgtaacagagcgattggaatcccgcgttaatttttgcaaagcccatctgatgatgataacttgctttgacataacctccaggcgcaggtag

SEQ ID NO: 341069 - DNA, 5175 bp, Artificial Sequence
  derived and/or modified sequence
gactggaagaccaaggccgcccagaagctgaacctgagcagcaagaagaaaaaacatcggccctctacctcctccgccgccgagccacccctttttgccacctctttttcaggtatcctgcagacgagtccacctccggccccaccctgtttgctccgcgccgtgaataaagtgaaggatactccagggctggggaaggtaaaagtaatgcttagaatttgttcgaccctagcccgcgatacctcagagtcttccagctttctgaaagtagacccaagaaagaagcagattaccctgtacgatccattgacttgcggcggccagaacgcttttcagaagagaggcaatcaggtcccccccaaaatgtttgcctttgacgctgtcttccctcaggacgcttcccaggcggaagtctgcgccggtactgtggcggaagtgattcagtccgttgtgaatggcgccgacggctgcgtcttctgcttcggccacgcaaagttgggtaaatcctatacaatgatcgggaaagatgatagcatgcaaaaccttggcattatcccatgcgcaatttcgtggctgtttaagctcatcaatgagcgaaaagagaagacaggggcccggttctctgtgagagtgtctgccgtcgaggtttgggggaaggaggagaatttgcgtgacctgctgtccgaagtggcaacaggtagcctgcaggacggccagtcacctggcgtctacctgtgcgaggatccaatatgcggcacccagcttcagaaccagagtgaactgcgggctccgaccgccgaaaaggcagctttttttctggacgccgccatagcctccaggcggtcacaccagcaggactgtgacgaggacgatcataggaactcacacgtgttttttacactgcacatataccagtaccgcatggaaaagagcggcaagggggggatgtccgggggtaggagccggctacacttaatagatctggggtcctgtgtcaaggccttgagtaagaatagggaaggcggatcaggactctgcctcagcctgtctgcgttgggcaacgttatcctagcactagtgaacggctccaagcatatcccttacaaggagtctaagctggccatgctgcttagagagtcactggggaatatgaattgcagaaccaccatgatcgcccatatctccgcagccgtcggtagctacgctgagacactgagcacaattcagattgcttctagagtgctcaggatgaagaagaaaaagacgaagtatacgtcttctagttctggaggcgaatcttcctgtgaagaaggtcgcatgaggcggcccacccagctgagacccttccatacaagagctaccgtagaccctgactttcccatagcacatctctcaagtgacccagactactcttcatcgtctgagcagagctgcgacacggtaatatatattggcccaaacgggacggctctgtccgacaaagaactcacagacaatgaggggcctcctgacttcgttccaattgtgccagcccttcagaaaacacgcggtgacagccggcctgcagaagcgggtgaggccgccgccgggaagagtgaaagggactgccttaagtgtaataccttcgccgaacttcaggaacgcttagattgcatcgacggctccgaagagcctagctcttttcccttcgaagaactgcccgctcagtttgggcccgaacaggcgtcccggggaccccgcctttcccaggcggctggggcttcacctctgtctgagagcgataaagaggacaatggttccgaaggtcagctaacgaaccgcgagggccccgaactacctgcaagcaagatgcagcgtagtcacagccctgtgccagcagccgccccagcacacagcccgagtcccgccagcccacgctctgtgcctgggtcatcatctcagcacagtgcctcccctctagtccaatccccttccttacagtccagcagggagagtctgaactcttgcggttttgtggagggaaagcctcgcccgatggggagccccaggttggggattgctagtctgtcaaagaccagcgaatacaaacctccaagcagccctagccaaagatgcaaagtttatacgcagaagggagtgttaccttcaccggcaccactacctcccagcagcaaagattcgggggtcgcatctcgggaaagtttgttgcagccagaggtcaggactccaccagtggggatgtcgcctcaagtgcttaagaagtctatgagcgccgggagtgaggggtttccagaaacgcccgtggacgatgagcaacaggctgcaacaccatctgagtctaagaaagagatcctgtccaccacaatggtcactgtgcaacaaccccttgaactgaacggtgaggacgagcttgtgtttaccctcgttgaggaattaaccattagcggcgtcctcgacagtggtcgacctacctcaattatcagctttaacagtgactgttccgcgcgagcactcgcttcgggttccagacccgtgtcgataatctcaagcatctcagaggatttggagtgttatagctcgacagcacctgtttctgaggtgtcaataactcagtttcttccgctcccaaagatgagcctggatgaaaaggctcaagatgcagggtcccggcgatcctcgatctcaagttggctctctgagatgtcggcaggcagtgagggagagcagtcttgtcacagtttcattgcgcagacatgttttggacatggagaagctatggctgaaccggtggcctcagagttcgttagcagcttgcagaacacagccgtggtttgccgagagaaaccaaaggcttccccggataacctactcatcctgtctgaaatgggcgatgattcctttaacaaggccgccccaatcaagggatgtaagataagtaccgtcagtaaagcaatggtgactatttctaacacagcaaatctgtcatcctgtgaagggtacatccctatgaagacaaacatcactgtatacccatgcatagcgatgagccctagaaatatccaggagccagaggcgcctacagccactccgaaggcaggcccaaccctggcccagagcagagagtccaaggaaaacagcgctaaaaaagagatgaagtttgaggacccatggctgaaacgcgaggaggaagttaaaaaggagactgctcacccaaacgaagaaggcatgatgcggtgcgagacagcgacagggccctccaacgcagaaacgcgcgctgagcaggagcaggatggtaaaccttctccgggagaccgcctgtcgagcagtagcggagaagtttcagccagtcctgtgactgataacttccggagagttgtcgatgggtgtgaaatggccttaccaggactggcaactcagagtccagtccaccctaataaaagcgtgaagtcttccagcctcccaagagcctttcagaaggcctctagacaagaggaacctgatagtttgtcctattactgcgcggccgagaccaacggcgtcggggccgcttcaggcacacctccgtctaaggcaactctcgaaggcaaggtggccagccctaagcactgcgtgctggcacgccccaagggcacgccccctttaccccctgttagaaaatcatccttggatcagaaaaatcgagcttctcctcaacacagtgcctcaggctcaggaacatccagtcctcttaaccaacccgctgctttcccggccgggctccccgatgaaccctccggcaagaccaaggatgcctcaagctcatctaaattgttcagtgccaagctcgaacagttggcctcacggtcaaacagcctcggccgggccacagtgagtcattatgaatgtttaagcctggaacgcgcggagagcctgagctccgtatcatcccggctgcacgccggcaaggatggtaccatgccacgcgccggccggagcctgggacgatccgcaggtacgtcacccccctcctctggcgcatccccgaaagctggtcagtcaaaaatcagcgcagtttctcggttattgttggcctccccaagagcaagaggcccttcggcctctacaaccaaaaccttgtcattttcaactaagtctcttccgcaggccgtgggacagggctcatcatctcctcccggcggtaagcacacaccgtggtccacacagagtcttagtcggaataggtcatcaggcctggcctccaagctaccactgcgggccgtgtcgggcaggatttcagagctcctccaggggggcgctggtgcccgagggctccagctaagggcaggcccagaggccgaggcccgaggtggagccctggcggaggatgaaccagcagccgcacacctgctaccatctccttacagtaagattactccccctcgccgcccccatcgatgttcctctggccacggatcagacaattccagcgtgctcagcggggaactcccaccagccatgggaaaaacggcattgttctaccattccggagggagttcgggctatgagagcgttatgcgggacagcgaggccaccggtagcgcgagctctgcccaggattccaccagcgagaattctagtagcgttggtggtcgatgcagaagcctcaagacccccaaaaaaaggagcaacccaggttcacaaaggaggagactgatcccggccttatccctggatacgtcaagtccggttcgaaagcctcctaattccaccggagttagatgggtggatgggccgttaaggagtagtcccaggggcctgggggaaccctttgaaatcaaagtttatgagattgatgatgtggaacggttgcagagaagaaggggcggggcgtccaaagaggcgatgtgtttcaatgccaaattaaaaatcctggaacaccggcagcaacgcattgctgaggtgcgtgccaagtacgagtggctcatgaaagagctggaagccactaaacagtatcttatgctggatccaaacaagtggcttagcgagttcgatcttgaacaggtgtgggagctcgacagcctggagtatctggaggctctggaatgcgtaactgaacgcctcgagtctcgcgtgaatttctgcaaagcccacctgatgatgattacctgcttcgacatcacgtctcgcagacggtag

SEQ ID NO: 341070 - DNA, 5183 bp, Artificial Sequence
  derived and/or modified sequence
atgatgatggactggaaagcagtcgccgcacagaaactgaacctatcctccaaaaagaaaaagcacagaccatctacctccagcgctgcagagccacccctctttgcaaccagcttttccgggattcttcagacatcaccaccaccagctcccccttgtctccttcgggctgtgaataaggtgaaggacacccctggtttgggcaaggttaaagttatgcttaggatatgctcgactttggctagagacacatcggagtcctccagctttttaaaagtcgatccacgcaagaaacaaatcacactctatgaccccctgacctgcggtggccaaaacgccttccagaaacgcggaaaccaagtgccccctaaaatgttcgcctttgatgccgtgttccctcaggacgcatcgcaagccgaagtctgtgctggtaccgtggcagaggtcatccagtcagtggtgaacggcgcagacggctgtgtgttctgtttcggacatgctaaactggggaaaagttacaccatgattggcaaagatgacagcatgcaaaaccttggcatcataccgtgtgcaattagttggttgttcaaactgataaacgaacggaaggagaaaacaggcgctcgattcagcgtgcgtgtgtcggccgtggaagtctgggggaaagaggaaaatctgagagatttgctgtctgaggtggcaacaggcagccttcaggatggccaaagtcctggcgtgtacctctgtgaggatccaatttgtggtacccaactgcagaaccagagcgaactccgcgcacctacagcagagaaggccgcattcttccttgatgctgccatcgcctccaggcgttcccaccagcaggattgcgatgaggacgatcatagaaactcccatgtctttttcactttacacatttaccagtaccgcatggaaaaatcgggcaaagggggaatgtctggcggtaggagcagactgcaccttatcgacctggggtcatgcgtgaaagccctttcaaaaaatcgggagggaggatccggtctgtgcctaagtctgtcggcactggggaatgtgatcctggctttggtcaacggctcaaagcacatcccctacaaggagagtaagctggcaatgctgctccgggaatcactggggaacatgaactgtaggacaaccatgattgctcacatcagtgccgctgtcggcagctacgccgaaaccctgtcaaccatccagatcgcctccagggtgctgcgtatgaagaagaagaagaccaaatacacgagttccagcagtgggggtgagagcagctgcgaggagggcagaatgaggagaccgacccagctaaggcccttccacacaagggccaccgttgatccagacttcccaatcgctcacttgtcctctgaccctgattacagcagcagttctgaacagtcatgcgacacagtaatctatattggtcctaatggaactgctctgtcagataaagagttaacagacaatgagggcccacctgattttgttcctattgtcccagctctgcaaaaaacacgcggtgattctcgtccagcagaggccggtgaagctgctgcagggaaaagcgaaagggattgcctgaaatgcaacaccttcgctgagctgcaagagcgtctcgattgcattgatggatctgaggaacccagttcattcccatttgaggaattgcctgctcaattcgggccagaacaggcttctcggggtccacgactgtcccaggccgctggcgctagcccattgtcagagagcgacaaagaagataacggctctgaaggacaacttactaatcgcgagggacctgaactcccagcctccaagatgcagcgttcacattccccagttccagctgctgcccctgcccattctccctctcctgcttcgcctaggtccgtccctggcagcagcagtcagcactctgcatcacctctggtgcagagcccttctctccagtcaagccgtgaaagccttaatagctgtggctttgtggagggaaagcctaggccaatgggtagtccacgtctcgggattgcctctctgagtaaaaccagcgagtacaagccaccttcatctccaagtcaaagatgtaaggtgtatacccaaaaaggggtgctcccgtcgcctgccccactccctccttctagcaaagacagcggtgttgcatcccgcgagtcgctgctgcagcctgaggtgcggacgccaccagttgggatgagcccgcaagtgctcaagaagagcatgtccgcgggaagcgagggtttccccgagaccccagtggacgatgagcagcaggccgcaaccccatccgagtccaagaaggagatcctgagcacaactatggtaacagtgcaacagcctttggagctgaacggggaagacgaactcgtttttactttggtcgaagaactgacaatctctggcgttcttgatagcgggaggcctactagtattattagttttaactcggattgctcagcgcgagccctggcctctggatctcgacccgtgtctatcatttcttccatcagcgaggatctggagtgttatagttccacggcgcctgtatctgaagtatccatcacgcagtttctccctctgcctaagatgtcattggacgagaaggcacaggacgcaggctctcggagatcctccatttcctcctggctgtctgagatgtcagccggatcagagggtgaacagagctgccatagctttatcgcacagacatgtttcggtcatggtgaagctatggccgagcccgttgcctctgagttcgttagctccttgcagaacaccgctgtggtgtgcagggaaaagcccaaagctagcccagataacttgttaatcttgagcgagatgggagatgatagtttcaacaaggctgcacccatcaagggctgcaaaataagtacagtgagtaaagcaatggtgaccatctccaacactgcaaacctgagcagttgtgaaggctacatccccatgaagactaacattacagtatatccttgcatcgccatgtcacctcgcaatattcaggagccagaggccccaacggcaacacctaaagctggccctactctggcccagagtcgggagagcaaagagaactcagctaaaaaggagatgaaattcgaggacccctggctgaagcgtgaggaagaggtgaagaaagagacagcccatcctaatgaggaaggcatgatgaggtgcgagactgccaccgggccttccaatgcagaaacccgggcagaacaagaacaggacgggaagccctcgcccggagaccgactctcgagtagtagtggagaagtatccgcttcgcctgtgaccgataattttagaagagtagttgacggttgcgagatggcactgccaggcttggccacccaatcaccagtgcaccccaataaatcagttaaatctagctctctgcccagagcctttcaaaaggcttcccgccaggaagagccggattcgctgtcttactattgtgcagccgaaactaacggtgtaggcgcagcttcaggtacacccccatccaaggctacacttgagggaaaagtggcaagtcctaaacactgcgtgttggctcgtcccaaaggcaccccccctctgcccccagtgcgcaagagttcacttgatcaaaagaatcgtgcaagcccacagcattctgcctccgggtctggcacaagcagtccacttaaccaacccgcagcctttcccgcaggactccccgacgaaccctcagggaaaacgaaggatgccagctcctcatcaaagctattctcagccaaactggagcagctggcctcacgaagcaatagcctcggcagggcaacggtctcacattatgaatgtctatctctggaaagagccgaaagcttaagctccgtctcctctaggttacacgccggaaaagatggcactatgccaagagcgggaaggtctcttggccgatcagcaggcaccagtccgcctagctcaggagcttcccctaaggcgggacaaagcaagatttccgccgtttctaggctgcttcttgcatctcccagggcccgagggccttcagcctccactaccaagactttgtcattttcaactaaaagcttgccgcaggctgtgggccagggtagctccagcccccctgggggtaaacataccccctggtccactcaatctctgagtaggaatagatcgagtggactggccagtaagctaccactgcgagcagtgagcggtaggattagtgaattgcttcagggaggcgcaggggctcgcggactgcaactgcgggctggtccggaagcggaggcccgaggaggcgctctggcagaggatgagccagcagctgctcacctgctgccttcgccctacagtaagatcacaccacccagacgaccgcatcgttgctcaagtggacatggttccgataattcctccgtgttgtccggggaactgccccctgccatggggaagacagcattgttttaccacagtggaggtagcagcggctacgagtcggtgatgcgcgactcagaggctacagggagcgcatcatccgcccaggattccacgtcggagaactcatcctcagtgggtggtaggtgcaggtccctcaaaacccccaagaaacggtctaatcccggatcgcagcggagacggcttatccccgctctgagcctcgatacctccagtcctgttaggaagccacccaactcaacgggggtccgctgggtcgatggtcccctacgaagttccccacggggactaggcgagccttttgagatcaaagtctatgagattgatgacgtcgaaaggctgcagcggcgacggggaggagccagcaaggaagcaatgtgcttcaatgctaaattaaagatcctggaacatcgacagcagcgtatcgcggaggtccgggctaaatacgaatggttgatgaaggaactggaagcaaccaagcaatacctgatgttggaccctaacaagtggttgagcgagttcgacctggaacaggtctgggagctcgattctcttgagtacctagaagctctggagtgcgtgacagagcggttagagagcagggtcaatttttgtaaggcacacctaatgatgatcacctgcttcgacattacgtcaaggcgcaggta

SEQ ID NO: 341071 - DNA, 5174 bp, Artificial Sequence
  derived and/or modified sequence
gactggaagacaaaggcagctcagaagctaaacctgagctctaagaaaaagaagcatcgcccaagcacaagctccgccgctgagccccctctgtttgctacaagcttctctgggattctccagacctcaccaccgccagccccaccgtgcctgctgagggctgtaaacaaagttaaagacactccaggcttgggcaaggtgaaggtgatgcttaggatttgttctactctggccagggacacctctgaatctagcagctttctcaaggtggaccccagaaaaaagcagatcaccctgtacgatcctctgacatgtggaggccagaacgcatttcagaagcggggtaatcaggttccccctaagatgttcgctttcgacgcagtgttccctcaagatgcttcgcaggcagaagtgtgtgccggtaccgtggctgaggtcatccaatccgtggtgaatggcgctgatgggtgcgtcttctgttttggtcacgccaagctgggcaaaagctacacgatgataggcaaggatgactccatgcagaatttgggaatcattccttgtgctatctcgtggcttttcaagctgatcaatgaacggaaagagaagactggggctcgattttctgtcagagtctccgctgtggaggtgtggggtaaagaggagaatctgcgggatttgctgtccgaggtcgccacagggtccctccaggacggccagagccccggagtctatctatgcgaggaccctatttgtggtacacagttgcagaatcagagcgagttgagagcccctacggctgagaaagccgcattttttctggacgccgctattgcttccaggcggtcacaccaacaggactgcgatgaggatgatcatcggaactcccatgtgtttttcacactgcatatctaccagtaccgcatggagaaatctggcaagggtggaatgtccggaggcaggagtaggctccacctaatagatctcggatcgtgtgtaaaggccctgagcaaaaaccgggaaggagggtcaggtctgtgcctttctctgagtgctctgggaaatgtgatacttgccctggtcaatggctcgaaacacattccctacaaggagtccaaactggcaatgctgctgcgcgaatcacttgggaatatgaactgccgcacaactatgattgcacacatcagtgccgcagtgggctcctacgctgagacactgagcactatccagatcgccagccgggtgcttcgaatgaagaagaagaaaactaaatatacaagttcaagctcaggaggcgaatcttcgtgtgaagagggaaggatgcgcaggcctacccagttgcggccattccacacccgtgccacagtcgatccggattttcccatcgctcatctgtccagtgatccagattatagctcttcttcagagcagtcctgtgacacggtaatctacatcggtccaaacgggaccgccctgtcagacaaggaacttactgacaacgaagggccaccggacttcgttccaattgtgccagccctgcagaagacccgcggagattctaggcccgcagaggctggcgaagccgctgctggaaaatcggaaagggattgcctgaagtgcaacaccttcgcagaactgcaggagcggctggattgtatcgatggcagcgaagagcccagctcgttcccttttgaagagctgcccgctcaattcggtcccgaacaggcatcccgaggacctagacttagccaggccgctggtgccagccccctgtctgagagcgataaggaggataatggttctgaggggcagcttactaatcgagaaggaccagagttacctgcatcgaagatgcagagatcccatagtccagtgcccgcagccgctccagcccatagtcctagtcctgccagtcccagaagtgttcccggtagcagcagccagcattcagccagcccccttgtgcagtcaccctcgttgcagagctctagagagagtttgaattcctgtgggtttgtggaaggaaagccacgtcctatgggcagcccgcgtctgggtatcgccagcctgagtaaaacctctgagtacaaacccccatcgtctccttcacagcggtgtaaggtgtatactcagaagggcgtgctcccctctcctgcacctttgcccccatcgtccaaggattcaggtgtggctagccgagagagcctcctccagcctgaagtgaggacccctccggtcggcatgtctccacaagtactcaaaaagagtatgagtgcagggtctgaaggctttcccgaaacacctgtggacgacgagcagcaggccgctactccaagcgagtccaagaaggaaatcctcagcacgaccatggtgacagttcagcagcccttggagctcaatggggaagacgaactggtatttacattggtagaggagctgactatctctggggtgcttgattctggaaggccgacgagtatcatctctttcaactcagactgttcagctagagccctcgccagtggcagtaggcccgtttccattatctcaagcatcagcgaagatcttgagtgttacagttctactgccccagtttccgaagtctccatcacacagtttctgcccctgccaaaaatgagcttagatgagaaggcacaggacgccggaagcaggcgtagttccatttcttcctggctctccgaaatgagcgccggatcagaaggcgagcaaagttgtcactcattcatcgcccagacgtgttttggacacggcgaggccatggcagagccagttgcctccgaatttgtatccagccttcagaatacggccgtggtatgtcgtgagaagccaaaggctagcccggataacttgctaatactcagcgaaatgggcgatgattcttttaacaaggcagcccctatcaagggttgtaagattagtacggttagcaaagctatggtgaccatatccaatacagcgaatttaagttcttgtgagggatatatccccatgaagactaacatcaccgtttatccttgcatagcaatgtcccctagaaacattcaggagcccgaggcacctactgctacacccaaagccggacccacacttgcacagtctcgtgaatctaaggagaactccgccaagaaagaaatgaaattcgaagacccgtggctgaaaagggaggaggaggtaaagaaagaaactgcacatcccaatgaagaggggatgatgaggtgtgaaacagcgaccggcccatctaacgccgaaacccgcgctgagcaggaacaggacggcaagccaagccctggcgaccggctcagctcatcctcaggcgaagtgagcgcgtctccggtgacagataactttaggagggtggtcgacggttgcgaaatggcactgccaggtctcgccacccaatctcccgtgcatcctaataagagcgtgaagtcctcttctctgcctagagcgttccagaaggcctctaggcaggaggaaccagacagcctctcctactattgcgccgcagagacaaatggtgtgggtgctgcatctgggacgccaccatctaaagcgacgctcgagggcaaggtggccagtcctaaacattgcgttttggcacgacctaagggcactccccctcttccccctgtgagaaaaagctccctggaccagaaaaatcgagcctcaccccagcacagcgcctccggatctggaacaagctcgcccttgaaccagcctgcggctttccccgcaggccttcccgatgagccctccggcaaaaccaaggacgcttcgtcaagctctaaacttttctctgccaagctggaacagctggcctcaaggtctaattccctgggacgggctaccgtgtcacactatgaatgtctcagtctggaacgggctgagtcgctcagcagcgtttcctcccgcctgcacgcaggcaaggacggcactatgccacgcgctggacggtcactggggaggtccgccggaacttccccgccaagcagcggcgcttcaccgaaagccggacaatcaaaaatctctgctgtctcaagattgctccttgctagccctagagccaggggtccatccgcctccacgactaagactctcagcttttccaccaagtctctgccccaggctgtgggccaagggtcatcaagcccgcctggaggaaagcataccccatggtccactcagtctctcagccgtaataggtcttccgggctcgctagcaaactgcctttaagagccgtatccggacgcatctctgaattgcttcagggtggggcaggagcaaggggactgcagctgcgagcaggaccagaggccgaagccaggggcggtgccctggccgaggacgaacccgcagccgcacacttgcttccttctccctacagtaagatcactcctcccaggcgaccccataggtgttcttcaggacacggctctgacaatagttctgtgcttagcggcgagctccccccagccatgggaaagactgctctgttctatcatagtggcggatcaagcggttatgaatcagtgatgagggacagcgaagcaacaggaagcgccagttccgcacaggattcaacttcggagaactcatcaagcgtaggcggaaggtgtcgtagtctgaaaacaccaaagaaaaggtcgaatccaggctcccagcgcagaaggctgattcctgctctgtctcttgacacgagtagcccagtgcggaagccaccaaactctactggagttagatgggtggacggccctttgcgatcatctccacggggacttggagagcccttcgagataaaggtttatgagattgatgatgtggaaaggctccagcgacggcgtggtggagcctcgaaagaggccatgtgttttaacgctaagctcaaaattctcgagcaccggcagcagagaatcgctgaggtgagagcaaaatatgaatggttgatgaaagagttggaagccaccaagcagtacttaatgctggaccctaataaatggctgagcgaattcgatctggagcaggtgtgggagttggactcacttgagtacctcgaggctcttgagtgtgttaccgagcggctcgagagccgggtcaacttctgtaaagcccatttgatgatgatcacgtgttttgacatcacttcacgcaggagata

SEQ ID NO: 341072 - DNA, 5184 bp, Artificial Sequence
  derived and/or modified sequence
atgatgatggactggaaggccgtggccgcccagaagctgaacctgagcagcaagaagaagaagcacagacccagcaccagcagcgccgccgagccccccctgttcgccaccagcttcagcggcatcctgcagaccagccccccccccgcccccccctgcctgctgagagccgtgaacaaggtgaaggacacccccggcctgggcaaggtgaaggtgatgctgagaatctgcagcaccctggccagagacaccagcgagagcagcagcttcctgaaggtggaccccagaaagaagcagatcaccctgtacgaccccctgacctgcggcggccagaacgccttccagaagagaggcaaccaggtgccccccaagatgttcgccttcgacgccgtgttcccccaggacgccagccaggccgaggtgtgcgccggcaccgtggccgaggtgatccagagcgtggtgaacggcgccgacggctgcgtgttctgcttcggccacgccaagctgggcaagagctacaccatgatcggcaaggacgacagcatgcagaacctgggcatcatcccctgcgccatcagctggctgttcaagctgatcaacgagagaaaggagaagaccggcgccagattcagcgtgagagtgagcgccgtggaggtgtggggcaaggaggagaacctgagagacctgctgagcgaggtggccaccggcagcctgcaggacggccagagccccggcgtgtacctgtgcgaggaccccatctgcggcacccagctgcagaaccagagcgagctgagagcccccaccgccgagaaggccgccttcttcctggacgccgccatcgccagcagaagaagccaccagcaggactgcgacgaggacgaccacagaaacagccacgtgttcttcaccctgcacatctaccagtacagaatggagaagagcggcaagggcggcatgagcggcggcagaagcagactgcacctgatcgacctgggcagctgcgtgaaggccctgagcaagaacagagagggcggcagcggcctgtgcctgagcctgagcgccctgggcaacgtgatcctggccctggtgaacggcagcaagcacatcccctacaaggagagcaagctggccatgctgctgagagagagcctgggcaacatgaactgcagaaccaccatgatcgcccacatcagcgccgccgtgggcagctacgccgagaccctgagcaccatccagatcgccagcagagtgctgagaatgaagaagaagaagaccaagtacaccagcagcagcagcggcggcgagagcagctgcgaggagggcagaatgagaagacccacccagctgagacccttccacaccagagccaccgtggaccccgacttccccatcgcccacctgagcagcgaccccgactacagcagcagcagcgagcagagctgcgacaccgtgatctacatcggccccaacggcaccgccctgagcgacaaggagctgaccgacaacgagggcccccccgacttcgtgcccatcgtgcccgccctgcagaagaccagaggcgacagcagacccgccgaggccggcgaggccgccgccggcaagagcgagagagactgcctgaagtgcaacaccttcgccgagctgcaggagagactggactgcatcgacggcagcgaggagcccagcagcttccccttcgaggagctgcccgcccagttcggccccgagcaggccagcagaggccccagactgagccaggccgccggcgccagccccctgagcgagagcgacaaggaggacaacggcagcgagggccagctgaccaacagagagggccccgagctgcccgccagcaagatgcagagaagccacagccccgtgcccgccgccgcccccgcccacagccccagccccgccagccccagaagcgtgcccggcagcagcagccagcacagcgccagccccctggtgcagagccccagcctgcagagcagcagagagagcctgaacagctgcggcttcgtggagggcaagcccagacccatgggcagccccagactgggcatcgccagcctgagcaagaccagcgagtacaagccccccagcagccccagccagagatgcaaggtgtacacccagaagggcgtgctgcccagccccgcccccctgccccccagcagcaaggacagcggcgtggccagcagagagagcctgctgcagcccgaggtgagaaccccccccgtgggcatgagcccccaggtgctgaagaagagcatgagcgccggcagcgagggcttccccgagacccccgtggacgacgagcagcaggccgccacccccagcgagagcaagaaggagatcctgagcaccaccatggtgaccgtgcagcagcccctggagctgaacggcgaggacgagctggtgttcaccctggtggaggagctgaccatcagcggcgtgctggacagcggcagacccaccagcatcatcagcttcaacagcgactgcagcgccagagccctggccagcggcagcagacccgtgagcatcatcagcagcatcagcgaggacctggagtgctacagcagcaccgcccccgtgagcgaggtgagcatcacccagttcctgcccctgcccaagatgagcctggacgagaaggcccaggacgccggcagcagaagaagcagcatcagcagctggctgagcgagatgagcgccggcagcgagggcgagcagagctgccacagcttcatcgcccagacctgcttcggccacggcgaggccatggccgagcccgtggccagcgagttcgtgagcagcctgcagaacaccgccgtggtgtgcagagagaagcccaaggccagccccgacaacctgctgatcctgagcgagatgggcgacgacagcttcaacaaggccgcccccatcaagggctgcaagatcagcaccgtgagcaaggccatggtgaccatcagcaacaccgccaacctgagcagctgcgagggctacatccccatgaagaccaacatcaccgtgtacccctgcatcgccatgagccccagaaacatccaggagcccgaggcccccaccgccacccccaaggccggccccaccctggcccagagcagagagagcaaggagaacagcgccaagaaggagatgaagttcgaggacccctggctgaagagagaggaggaggtgaagaaggagaccgcccaccccaacgaggagggcatgatgagatgcgagaccgccaccggccccagcaacgccgagaccagagccgagcaggagcaggacggcaagcccagccccggcgacagactgagcagcagcagcggcgaggtgagcgccagccccgtgaccgacaacttcagaagagtggtggacggctgcgagatggccctgcccggcctggccacccagagccccgtgcaccccaacaagagcgtgaagagcagcagcctgcccagagccttccagaaggccagcagacaggaggagcccgacagcctgagctactactgcgccgccgagaccaacggcgtgggcgccgccagcggcaccccccccagcaaggccaccctggagggcaaggtggccagccccaagcactgcgtgctggccagacccaagggcaccccccccctgccccccgtgagaaagagcagcctggaccagaagaacagagccagcccccagcacagcgccagcggcagcggcaccagcagccccctgaaccagcccgccgccttccccgccggcctgcccgacgagcccagcggcaagaccaaggacgccagcagcagcagcaagctgttcagcgccaagctggagcagctggccagcagaagcaacagcctgggcagagccaccgtgagccactacgagtgcctgagcctggagagagccgagagcctgagcagcgtgagcagcagactgcacgccggcaaggacggcaccatgcccagagccggcagaagcctgggcagaagcgccggcaccagcccccccagcagcggcgccagccccaaggccggccagagcaagatcagcgccgtgagcagactgctgctggccagccccagagccagaggccccagcgccagcaccaccaagaccctgagcttcagcaccaagagcctgccccaggccgtgggccagggcagcagcagcccccccggcggcaagcacaccccctggagcacccagagcctgagcagaaacagaagcagcggcctggccagcaagctgcccctgagagccgtgagcggcagaatcagcgagctgctgcagggcggcgccggcgccagaggcctgcagctgagagccggccccgaggccgaggccagaggcggcgccctggccgaggacgagcccgccgccgcccacctgctgcccagcccctacagcaagatcaccccccccagaagaccccacagatgcagcagcggccacggcagcgacaacagcagcgtgctgagcggcgagctgccccccgccatgggcaagaccgccctgttctaccacagcggcggcagcagcggctacgagagcgtgatgagagacagcgaggccaccggcagcgccagcagcgcccaggacagcaccagcgagaacagcagcagcgtgggcggcagatgcagaagcctgaagacccccaagaagagaagcaaccccggcagccagagaagaagactgatccccgccctgagcctggacaccagcagccccgtgagaaagccccccaacagcaccggcgtgagatgggtggacggccccctgagaagcagccccagaggcctgggcgagcccttcgagatcaaggtgtacgagatcgacgacgtggagagactgcagagaagaagaggcggcgccagcaaggaggccatgtgcttcaacgccaagctgaagatcctggagcacagacagcagagaatcgccgaggtgagagccaagtacgagtggctgatgaaggagctggaggccaccaagcagtacctgatgctggaccccaacaagtggctgagcgagttcgacctggagcaggtgtgggagctggacagcctggagtacctggaggccctggagtgcgtgaccgagagactggagagcagagtgaacttctgcaaggcccacctgatgatgatcacctgcttcgacatcaccagcagaagaagatag

SEQ ID NO: 341073 - DNA, 5175 bp, Artificial Sequence
  derived and/or modified sequence
gactggaagaccaaggccgcccagaagctgaacctgagcagcaagaagaagaagcacagacccagcaccagcagcgccgccgagccccccctgttcgccaccagcttcagcggcatcctgcagaccagccccccccccgcccccccctgcctgctgagagccgtgaacaaggtgaaggacacccccggcctgggcaaggtgaaggtgatgctgagaatctgcagcaccctggccagagacaccagcgagagcagcagcttcctgaaggtggaccccagaaagaagcagatcaccctgtacgaccccctgacctgcggcggccagaacgccttccagaagagaggcaaccaggtgccccccaagatgttcgccttcgacgccgtgttcccccaggacgccagccaggccgaggtgtgcgccggcaccgtggccgaggtgatccagagcgtggtgaacggcgccgacggctgcgtgttctgcttcggccacgccaagctgggcaagagctacaccatgatcggcaaggacgacagcatgcagaacctgggcatcatcccctgcgccatcagctggctgttcaagctgatcaacgagagaaaggagaagaccggcgccagattcagcgtgagagtgagcgccgtggaggtgtggggcaaggaggagaacctgagagacctgctgagcgaggtggccaccggcagcctgcaggacggccagagccccggcgtgtacctgtgcgaggaccccatctgcggcacccagctgcagaaccagagcgagctgagagcccccaccgccgagaaggccgccttcttcctggacgccgccatcgccagcagaagaagccaccagcaggactgcgacgaggacgaccacagaaacagccacgtgttcttcaccctgcacatctaccagtacagaatggagaagagcggcaagggcggcatgagcggcggcagaagcagactgcacctgatcgacctgggcagctgcgtgaaggccctgagcaagaacagagagggcggcagcggcctgtgcctgagcctgagcgccctgggcaacgtgatcctggccctggtgaacggcagcaagcacatcccctacaaggagagcaagctggccatgctgctgagagagagcctgggcaacatgaactgcagaaccaccatgatcgcccacatcagcgccgccgtgggcagctacgccgagaccctgagcaccatccagatcgccagcagagtgctgagaatgaagaagaagaagaccaagtacaccagcagcagcagcggcggcgagagcagctgcgaggagggcagaatgagaagacccacccagctgagacccttccacaccagagccaccgtggaccccgacttccccatcgcccacctgagcagcgaccccgactacagcagcagcagcgagcagagctgcgacaccgtgatctacatcggccccaacggcaccgccctgagcgacaaggagctgaccgacaacgagggcccccccgacttcgtgcccatcgtgcccgccctgcagaagaccagaggcgacagcagacccgccgaggccggcgaggccgccgccggcaagagcgagagagactgcctgaagtgcaacaccttcgccgagctgcaggagagactggactgcatcgacggcagcgaggagcccagcagcttccccttcgaggagctgcccgcccagttcggccccgagcaggccagcagaggccccagactgagccaggccgccggcgccagccccctgagcgagagcgacaaggaggacaacggcagcgagggccagctgaccaacagagagggccccgagctgcccgccagcaagatgcagagaagccacagccccgtgcccgccgccgcccccgcccacagccccagccccgccagccccagaagcgtgcccggcagcagcagccagcacagcgccagccccctggtgcagagccccagcctgcagagcagcagagagagcctgaacagctgcggcttcgtggagggcaagcccagacccatgggcagccccagactgggcatcgccagcctgagcaagaccagcgagtacaagccccccagcagccccagccagagatgcaaggtgtacacccagaagggcgtgctgcccagccccgcccccctgccccccagcagcaaggacagcggcgtggccagcagagagagcctgctgcagcccgaggtgagaaccccccccgtgggcatgagcccccaggtgctgaagaagagcatgagcgccggcagcgagggcttccccgagacccccgtggacgacgagcagcaggccgccacccccagcgagagcaagaaggagatcctgagcaccaccatggtgaccgtgcagcagcccctggagctgaacggcgaggacgagctggtgttcaccctggtggaggagctgaccatcagcggcgtgctggacagcggcagacccaccagcatcatcagcttcaacagcgactgcagcgccagagccctggccagcggcagcagacccgtgagcatcatcagcagcatcagcgaggacctggagtgctacagcagcaccgcccccgtgagcgaggtgagcatcacccagttcctgcccctgcccaagatgagcctggacgagaaggcccaggacgccggcagcagaagaagcagcatcagcagctggctgagcgagatgagcgccggcagcgagggcgagcagagctgccacagcttcatcgcccagacctgcttcggccacggcgaggccatggccgagcccgtggccagcgagttcgtgagcagcctgcagaacaccgccgtggtgtgcagagagaagcccaaggccagccccgacaacctgctgatcctgagcgagatgggcgacgacagcttcaacaaggccgcccccatcaagggctgcaagatcagcaccgtgagcaaggccatggtgaccatcagcaacaccgccaacctgagcagctgcgagggctacatccccatgaagaccaacatcaccgtgtacccctgcatcgccatgagccccagaaacatccaggagcccgaggcccccaccgccacccccaaggccggccccaccctggcccagagcagagagagcaaggagaacagcgccaagaaggagatgaagttcgaggacccctggctgaagagagaggaggaggtgaagaaggagaccgcccaccccaacgaggagggcatgatgagatgcgagaccgccaccggccccagcaacgccgagaccagagccgagcaggagcaggacggcaagcccagccccggcgacagactgagcagcagcagcggcgaggtgagcgccagccccgtgaccgacaacttcagaagagtggtggacggctgcgagatggccctgcccggcctggccacccagagccccgtgcaccccaacaagagcgtgaagagcagcagcctgcccagagccttccagaaggccagcagacaggaggagcccgacagcctgagctactactgcgccgccgagaccaacggcgtgggcgccgccagcggcaccccccccagcaaggccaccctggagggcaaggtggccagccccaagcactgcgtgctggccagacccaagggcaccccccccctgccccccgtgagaaagagcagcctggaccagaagaacagagccagcccccagcacagcgccagcggcagcggcaccagcagccccctgaaccagcccgccgccttccccgccggcctgcccgacgagcccagcggcaagaccaaggacgccagcagcagcagcaagctgttcagcgccaagctggagcagctggccagcagaagcaacagcctgggcagagccaccgtgagccactacgagtgcctgagcctggagagagccgagagcctgagcagcgtgagcagcagactgcacgccggcaaggacggcaccatgcccagagccggcagaagcctgggcagaagcgccggcaccagcccccccagcagcggcgccagccccaaggccggccagagcaagatcagcgccgtgagcagactgctgctggccagccccagagccagaggccccagcgccagcaccaccaagaccctgagcttcagcaccaagagcctgccccaggccgtgggccagggcagcagcagcccccccggcggcaagcacaccccctggagcacccagagcctgagcagaaacagaagcagcggcctggccagcaagctgcccctgagagccgtgagcggcagaatcagcgagctgctgcagggcggcgccggcgccagaggcctgcagctgagagccggccccgaggccgaggccagaggcggcgccctggccgaggacgagcccgccgccgcccacctgctgcccagcccctacagcaagatcaccccccccagaagaccccacagatgcagcagcggccacggcagcgacaacagcagcgtgctgagcggcgagctgccccccgccatgggcaagaccgccctgttctaccacagcggcggcagcagcggctacgagagcgtgatgagagacagcgaggccaccggcagcgccagcagcgcccaggacagcaccagcgagaacagcagcagcgtgggcggcagatgcagaagcctgaagacccccaagaagagaagcaaccccggcagccagagaagaagactgatccccgccctgagcctggacaccagcagccccgtgagaaagccccccaacagcaccggcgtgagatgggtggacggccccctgagaagcagccccagaggcctgggcgagcccttcgagatcaaggtgtacgagatcgacgacgtggagagactgcagagaagaagaggcggcgccagcaaggaggccatgtgcttcaacgccaagctgaagatcctggagcacagacagcagagaatcgccgaggtgagagccaagtacgagtggctgatgaaggagctggaggccaccaagcagtacctgatgctggaccccaacaagtggctgagcgagttcgacctggagcaggtgtgggagctggacagcctggagtacctggaggccctggagtgcgtgaccgagagactggagagcagagtgaacttctgcaaggcccacctgatgatgatcacctgcttcgacatcaccagcagaagaagatag

SEQ ID NO: 341074 - protein, 532 aa, Artificial Sequence
  derived and/or modified sequence
SEQSICQARAAVMVYDDANKKWVPAGGSTGFSRVHIYHHTGNNTFRVVGRKIQDHQVVINCAIPKGLKYNQATQTFHQWRDARQVYGLNFGSKEDANVFASAMMHALEVLNSQETGPTLPRQNSQLPAQVQNGPSQEELEIQRRQLQEQQRQKELERERLERERMERERLERERLERERLERERLEQEQLERERQERERQERLERQERLERQERLERQERLDRERQERQERERLERLERERQERERQEQLEREQLEWERERRISSAGIVLGPLAPPPPPPLPPGPAQASVALPPPPGPPPPPPLPSTGPPPPPPPPPLPNQVPPPPPPPPAPPLPASGFFLASMSEDNRPLTGLAAAIAGAKLRKVSRMEDTSFPSGGNAIGVNSASSKTDTGRGNGPLPLGGSGLMEEMSALLARRRRIAEKGSTIETEQKEDKGEDSEPVTSKASSTSTPEPTRKPWERTNTMNGSKSPVISRPKSTPLSQPSANGVQTEGLDYDRLKQDILDEMRKELTKLKEELIDAIRQELSKSNTA

SEQ ID NO: 341075 - DNA, 1599 bp, Artificial Sequence
  derived and/or modified sequence
agcgagcagagcatctgccaggccagagccgccgtgatggtgtacgacgacgccaacaagaagtgggtgcccgccggcggcagcaccggcttcagcagagtgcacatctaccaccacaccggcaacaacaccttcagagtggtgggcagaaagatccaggaccaccaggtggtgatcaactgcgccatccccaagggcctgaagtacaaccaggccacccagaccttccaccagtggagagacgccagacaggtgtacggcctgaacttcggcagcaaggaggacgccaacgtgttcgccagcgccatgatgcacgccctggaggtgctgaacagccaggagaccggccccaccctgcccagacagaacagccagctgcccgcccaggtgcagaacggccccagccaggaggagctggagatccagagaagacagctgcaggagcagcagagacagaaggagctggagagagagagactggagagagagagaatggagagagagagactggagagagagagactggagagagagagactggagagagagagactggagcaggagcagctggagagagagagacaggagagagagagacaggagagactggagagacaggagagactggagagacaggagagactggagagacaggagagactggacagagagagacaggagagacaggagagagagagactggagagactggagagagagagacaggagagagagagacaggagcagctggagagagagcagctggagtgggagagagagagaagaatcagcagcgccggcatcgtgctgggccccctggccccccccccccccccccccctgccccccggccccgcccaggccagcgtggccctgccccccccccccggcccccccccccccccccccctgcccagcaccggccccccccccccccccccccccccccccctgcccaaccaggtgccccccccccccccccccccccccgccccccccctgcccgccagcggcttcttcctggccagcatgagcgaggacaacagacccctgaccggcctggccgccgccatcgccggcgccaagctgagaaaggtgagcagaatggaggacaccagcttccccagcggcggcaacgccatcggcgtgaacagcgccagcagcaagaccgacaccggcagaggcaacggccccctgcccctgggcggcagcggcctgatggaggagatgagcgccctgctggccagaagaagaagaatcgccgagaagggcagcaccatcgagaccgagcagaaggaggacaagggcgaggacagcgagcccgtgaccagcaaggccagcagcaccagcacccccgagcccaccagaaagccctgggagagaaccaacaccatgaacggcagcaagagccccgtgatcagcagacccaagagcacccccctgagccagcccagcgccaacggcgtgcagaccgagggcctggactacgacagactgaagcaggacatcctggacgagatgagaaaggagctgaccaagctgaaggaggagctgatcgacgccatcagacaggagctgagcaagagcaacaccgcctag

SEQ ID NO: 341076 - DNA, 1609 bp, Artificial Sequence
  derived and/or modified sequence
agtgaacagagtatctgtcaggcaagagctgctgtgatggtttatgatgatgccaataagaagtgggtgccagctggtggctcaactggattcagcagagttcatatctatcaccatacaggcaacaacacattcagagtggtgggcaggaagattcaggaccatcaggtcgtgataaactgtgccattcctaaagggttgaagtacaatcaagctacacagaccttccaccagtggcgagatgctagacaggtgtatggtctcaactttggcagcaaagaggatgccaatgtcttcgcaagtgccatgatgcatgccttagaagtgttaaattcacaggaaacagggccaacattgcctagacaaaactcacaactacctgctcaagttcaaaatggcccatcccaagaagaattggaaattcaaagaagacaactacaagaacagcaacggcaaaaggagctggagcgggaaaggctggagcgagaaagaatggaaagagaaaggttggagagagagaggttagaaagggaaaggctggagagggagcgactggaacaagaacagctggagagagagagacaagaacgggaacggcaggaacgcctggagcggcaggaacgcctggagcggcaggaacgcctggagcggcaggaacgcctggatcgggagaggcaagaaagacaagaacgagagaggctggagagactggaacgggagaggcaagaaagggagcgacaagagcagttagaaagggaacagctggaatgggagagagagcgcagaatatcaagtgctggcattgtcttgggaccacttgcacctccacctcctccaccactcccaccagggcctgcacaggcttcagtagccctccctcctcccccagggccccctccacctcctccactcccatccaccgggcctccaccgccccctcctccccctcctctccctaatcaagtaccccctcctcctccaccacctcctgccccacccctccctgcatctggattctttttggcatccatgtcagaagacaatcgccctttaactggacttgcagctgcaattgccggagcaaaacttaggaaagtgtcacggatggaggatacctctttcccaagtggagggaatgctattggtgtgaactccgcctcatctaaaacagatacaggccgtggaaatggaccccttcctttagggggtagtggtttaatggaagaaatgagtgccctgctggccaggaggagaagaattgctgaaaagggatcaacaatagaaacagaacaaaaagaggacaaaggtgaagattcagagcctgtaacttctaaggcctcttcaacaagtacacctgaaccaacaagaaaaccttgggaaagaacaaatacaatgaatggcagcaagtcacctgttatctccagaccaaaatccacacccttatcacagcccagtgccaatggagtccagacggaaggacttgactatgacaggctgaagcaggacattttagatgaaatgagaaaagaattaacaaagctaaaagaagagctcattgatgcaatcaggcaggaactgagcaagtcaaatactgcatagaggaacagac

SEQ ID NO: 341077 - DNA, 1599 bp, Artificial Sequence
  derived and/or modified sequence
tccgagcagagcatctgtcaggcccgcgcagctgtgatggtgtatgatgacgccaacaagaaatgggtgcccgcagggggaagcacagggttcagcagagttcacatttatcaccacaccggtaacaataccttccgggtggtaggtagaaaaatccaggatcaccaggtcgtgattaattgcgccattccaaaaggactgaagtacaaccaagcaacacagactttccatcagtggcgcgacgcgcggcaggtgtacgggctgaactttggctccaaagaggatgcgaacgtcttcgcttcagccatgatgcatgcccttgaggtgctgaactcacaggagactggccccacactgcctcgccagaactcccaactgccagctcaggtgcagaacggtccatctcaggaggagcttgagattcaaaggaggcagctgcaagagcaacagcggcagaaggagctagagcgtgaacggctggaacgcgagcgtatggaacgggagcggctggaaagagagagacttgagcgggagcggctcgagcgcgagaggctggagcaggagcagctggaaagagagcggcaagaacgggaacgccaagagcggctggagcggcaggaaagattagagcgtcaggaacggctcgagaggcaggaacgcctggatcgggagcgacaggagagacaagagcgtgagaggctggagcggctcgagcgcgagcggcaggagcgcgaaagacaggaacagttagagagggagcagctcgagtgggagcgggagcggcgcattagttccgccggtattgtgctcgggcccctcgccccgccacccccaccaccccttccccctggtcctgcccaggcaagtgtggctctgccgcctccccccggtcctcctcccccgccgcctctcccttcaacaggaccaccccccccccctccgccaccgcccttgccaaatcaggttcccccgcctccaccaccaccacccgctccacccctcccagcatcaggattcttcctggctagtatgtctgaggacaaccgacccttgacaggactggctgcagctattgcaggcgctaagctgcggaaagtgtctcgcatggaggatacttctttcccctccggggggaatgccattggtgtgaacagtgcctcctccaagactgataccggaagaggaaacgggcccctgccgctcggggggtcaggtttaatggaggaaatgagcgctctgttggccagaaggaggcgcattgccgaaaaaggtagcaccatcgaaaccgaacagaaggaagataagggagaagattcggagccagtgacatcaaaagctagcagcacctccaccccagagcctacccgtaagccttgggaacggaccaataccatgaatggaagtaagtcgcctgtaataagcagaccaaagtcaacccctctgtcacagccatctgccaacggcgtgcagacagagggcctggactatgatagactgaaacaggatatactggatgaaatgaggaaagaacttaccaagctgaaggaggagttgattgacgccatccggcaggagttgtccaagtcaaacacggcttag

SEQ ID NO: 341078 - DNA, 1599 bp, Artificial Sequence
  derived and/or modified sequence
tctgagcagagcatctgccaggcccgggctgctgtgatggtgtatgatgatgccaacaagaagtgggtgcctgctgggggcagcacaggcttcagccgggtgcacatctaccaccacacaggcaacaacaccttccgggtggtgggcaggaagatccaggaccaccaggtggtgatcaactgtgccatccccaagggcctgaagtacaaccaggccacccagaccttccaccagtggagagatgcccggcaggtgtatggcctgaactttggcagcaaggaggatgccaacgtgtttgccagcgccatgatgcacgccctggaggtgctgaacagccaggagaccggccccaccctgccccggcagaacagccagctgcctgcccaggtgcagaatggccccagccaggaggagctggagatccagaggcggcagctgcaggagcagcagaggcagaaggagctggagcgggagcggctggagcgggagaggatggagcgggagcggctggagcgggagcggctggagcgggagcggctggagcgggagcggctggagcaggagcagctggagcgggagcggcaggagcgggagcggcaggagcggctggagcggcaggagcggctggagcggcaggagcggctggagcggcaggagcggctggaccgggagcggcaggagcggcaggagcgggagcggctggagcggctggagcgggagcggcaggagcgggagcggcaggagcagctggagcgggagcagctggagtgggagcgggagcggcgcatcagcagcgctggcatcgtgctgggccccctggcccctcctcctcctccacccctgcccccaggccctgcccaggcctctgtggccctgcccccacctcctggccccccacctcctccacccctgcccagcactggacctcctcctcctcctcctcctccacccctgcccaaccaggtgcccccacctcctcctcctcctccagccccacccctgcctgccagcggcttcttcctggcctccatgtctgaggacaaccggcccctgaccggcctggccgccgccatcgccggggccaagctgaggaaggtgtccaggatggaggacaccagcttccccagcggcggcaatgccatcggcgtgaacagcgccagcagcaagacagacaccggcagaggaaatggccccctgcccctgggcggcagcggcctgatggaggagatgtctgccctgctggccaggagaagaagaattgctgagaagggcagcaccattgaaacagagcagaaggaggacaagggagaagattctgagcctgtgaccagcaaggccagcagcaccagcaccccagagcccaccaggaagccctgggagaggaccaacaccatgaatggcagcaagagccctgtgatcagccggcccaagagcacccccctgagccagcccagcgccaatggagtgcagacagagggcctggactatgaccggctgaagcaggacatcctggatgagatgaggaaggagctgaccaagctgaaggaggagctgattgatgccatccggcaggagctgagcaagagcaacacagcctag

SEQ ID NO: 341079 - DNA, 1599 bp, Artificial Sequence
  derived and/or modified sequence
agcgagcagagcatctgccaggcccgggccgccgtgatggtgtacgacgatgctaataagaagtgggtgcctgcaggagggtcgacaggttttagccgggtccatatctaccaccacacaggtaacaatacctttagggttgtgggacgtaaaatccaggaccaccaggtggttattaactgtgcgatccctaaagggctgaagtacaaccaagcaacacagacttttcatcagtggagagacgcaagacaggtgtacggactcaactttgggtcaaaggaggacgccaatgtcttcgcctcggcaatgatgcatgcactggaggtgctgaacagtcaggaaacaggacccaccctgcctcgccagaactctcagctgcctgcccaggtgcagaatggcccctcacaggaagaactggagattcagcggagacagcttcaggagcaacagagacagaaggagctggagcgcgagcgtcttgaacgggaacgaatggaacgagaacgcctggagagggagaggcttgagagggaacgcctggagagagaaaggttggagcaggaacagttggagagggagcgccaagagcgcgaacgtcaagagcgcctcgaacggcaagagagactggagagacaggaacggctcgaacgccaggaacggctggaccgagagcggcaggagcgccaggaacgcgaacggttggaacgactagaacgggagcgacaggagagagagagacaggaacagttagaacgcgaacaactcgaatgggaacgggaaagaaggataagctctgctggaatagtactcggaccactggcaccacctccccccccccctctcccgccaggcccagcccaggccagcgtcgcattacctcctcctcctggaccaccgccccccccgcctttgccatctacaggtcctccaccacctccccctccccctccgctgcccaaccaggttccacccccacctccccccccgcctgctccgcccttacccgcctccggctttttcttggcatctatgtcggaggacaatcgtcctcttactgggctcgctgctgccatagcaggcgccaaactacgcaaggtgtcgcggatggaagatacctcctttccttccggggggaatgctataggggtgaactccgcaagcagtaagactgatactggacgtggtaacggccccttgcccctgggggggagcggactaatggaagaaatgtcagcacttcttgcccggcgccggcgcattgcagagaagggatctaccatcgaaaccgagcagaaggaagacaagggagaggactctgagcctgtgacttccaaggctagtagcacatctaccccagaaccaaccaggaagccctgggagaggacaaacactatgaacggctctaaaagccctgttataagccgtcccaaatcaacacccctgtcacaacccagtgccaacggggtgcaaactgaaggcctcgactacgatagacttaaacaggatatcctggatgagatgcgaaaggaactgaccaaattgaaagaggagctgattgatgctatccggcaagagctgagcaaatccaacaccgcttag

SEQ ID NO: 341080 - DNA, 1599 bp, Artificial Sequence
  derived and/or modified sequence
agcgagcaaagcatctgccaagcccgagccgctgttatggtgtatgatgatgccaacaagaaatgggtgcctgcgggaggaagcacagggttctctagggtgcacatttaccatcacacgggcaataacacttttagggtagtggggaggaagatccaggatcatcaggtagttataaactgtgctatcccgaaggggcttaagtacaatcaggccacacagaccttccatcagtggagggacgctcggcaggtgtacggactgaacttcggttctaaggaggacgccaatgtttttgcttccgctatgatgcacgctctcgaagtgctgaattctcaggagacaggaccgaccctgcccagacagaactctcagctcccggctcaggtgcagaatggtccttcacaagaggaactcgagatccagcgacgccagttgcaggaacagcagagacagaaagaattggagcgcgagcgcctggaacgcgagcgtatggagagagagaggctggagcgggaacgtctcgaaagggagcgcctggaacgcgaacgtctggagcaggagcagttggagcgggagcggcaggaacgggagcgccaggaacgactggagagacaggaaaggctggaacggcaggagaggttggagcgacaggagcggctggacagggagcgccaggagcgacaggaaagagagcgtcttgagcgtctggaaagagagcgtcaggaacgggagagacaggagcaacttgagcgggagcagcttgagtgggagcgtgaaagaagaatctccagcgctgggatagtgttggggccactggcgccacccccaccaccacccctgccacccggtccagcccaagctagcgtcgctctgccaccaccaccagggcctccccctcctcctcctttaccgagtaccgggccaccacctccacctccccctccaccgctcccgaaccaggtccctccccctcccccacctccgccagccccaccgctacccgcatcaggcttcttcctcgccagcatgagtgaggacaaccgccctttaacagggctcgcggctgcgatcgcgggagcaaaactgagaaaagtatcacgcatggaggataccagcttcccctccggcggtaatgccattggagttaactcagcaagctccaagactgacaccggcaggggcaatggccctctgcccttagggggttcaggcttgatggaagaaatgagcgccctgctagcgagacgtcggaggatagcagagaaagggagtactatcgagacggagcaaaaagaagacaaaggtgaggacagcgagccagtcacatcaaaggcctcctcaacatccacacccgaaccgacgcgcaagccctgggagaggactaacacaatgaacggcagcaaatctccagtaattagtcggccaaaatccacacccttgtcccagccttcagcaaatggtgtgcaaacagaagggctggactacgaccgattgaagcaagatatcttggatgagatgcgaaaagaactgaccaaattgaaagaagagttgatcgacgccataagacaggagttgtccaaatccaacactgcatag

SEQ ID NO: 341081 - DNA, 1776 bp, Artificial Sequence
  derived and/or modified sequence
atgagcgagcagagcatctgccaggccagagccgccgtgatggtgtacgacgacgccaacaagaagtgggtgcccgccggcggcagcaccggcttcagcagagtgcacatctaccaccacaccggcaacaacaccttcagagtggtgggcagaaagatccaggaccaccaggtggtgatcaactgcgccatccccaagggcctgaagtacaaccaggccacccagaccttccaccagtggagagacgccagacaggtgtacggcctgaacttcggcagcaaggaggacgccaacgtgttcgccagcgccatgatgcacgccctggaggtgctgaacagccaggagaccggccccaccctgcccagacagaacagccagctgcccgcccaggtgcagaacggccccagccaggaggagctggagatccagagaagacagctgcaggagcagcagagacagaaggagctggagagagagagactggagagagagagaatggagagagagagactggagagagagagactggagagagagagactggagagagagagactggagcaggagcagctggagagagagagacaggagagagagagacaggagagactggagagacaggagagactggagagacaggagagactggagagacaggagagactggacagagagagacaggagagacaggagagagagagactggagagactggagagagagagacaggagagagagagacaggagcagctggagagagagcagctggagtgggagagagagagaagaatcagcagcgccgccgcccccgccagcgtggagacccccctgaacagcgtgctgggcgacagcagcgccagcgagcccggcctgcaggccgccagccagcccgccgagacccccagccagcagggcatcgtgctgggccccctggccccccccccccccccccccctgccccccggccccgcccaggccagcgtggccctgccccccccccccggcccccccccccccccccccctgcccagcaccggccccccccccccccccccccccccccccctgcccaaccaggtgccccccccccccccccccccccccgccccccccctgcccgccagcggcttcttcctggccagcatgagcgaggacaacagacccctgaccggcctggccgccgccatcgccggcgccaagctgagaaaggtgagcagaatggaggacaccagcttccccagcggcggcaacgccatcggcgtgaacagcgccagcagcaagaccgacaccggcagaggcaacggccccctgcccctgggcggcagcggcctgatggaggagatgagcgccctgctggccagaagaagaagaatcgccgagaagggcagcaccatcgagaccgagcagaaggaggacaagggcgaggacagcgagcccgtgaccagcaaggccagcagcaccagcacccccgagcccaccagaaagccctgggagagaaccaacaccatgaacggcagcaagagccccgtgatcagcagaagagacagccccagaaagaaccagatcgtgttcgacaacagaagctacgacagcctgcacagacccaagagcacccccctgagccagcccagcgccaacggcgtgcagaccgagggcctggactacgacagactgaagcaggacatcctggacgagatgagaaaggagctgaccaagctgaaggaggagctgatcgacgccatcagacaggagctgagcaagagcaacaccgcctag

SEQ ID NO: 341082 - DNA, 7167 bp, Artificial Sequence
  derived and/or modified sequence
ggttcctcgcggcgatcccgactctcctcccgcggctgcagcagctgccggttgcacacggcctcggcggcggcgcggcgagcgcgggcctgtggagcggcggccgggcgcgcggccccggcgggcacccctcagagggcggccgaggaagctccgggaggaggagcaggaccacgaggaggtgggaggcggcggccgcctggggaccagctccgcgcctcggcctctccgccccctccccagcctttctctcgccctcttctcccacactcccggccggcgcctcggctttgtgcgaggagatggtgtagccccctggccgccgaaggaggagccggacacttgtctcccgtctccgagctgctccccacccctggaggagagacccccccctcggctcggcgccttctgcgtctcccggctggtggggaagcctctgcgccgccggcaccatgagtgaacagagtatctgtcaggcaagagctgctgtgatggtttatgatgatgccaataagaagtgggtgccagctggtggctcaactggattcagcagagttcatatctatcaccatacaggcaacaacacattcagagtggtgggcaggaagattcaggaccatcaggtcgtgataaactgtgccattcctaaagggttgaagtacaatcaagctacacagaccttccaccagtggcgagatgctagacaggtgtatggtctcaactttggcagcaaagaggatgccaatgtcttcgcaagtgccatgatgcatgccttagaagtgttaaattcacaggaaacagggccaacattgcctagacaaaactcacaactacctgctcaagttcaaaatggcccatcccaagaagaattggaaattcaaagaagacaactacaagaacagcaacggcaaaaggagctggagcgggaaaggctggagcgagaaagaatggaaagagaaaggttggagagagagaggttagaaagggaaaggctggagagggagcgactggaacaagaacagctggagagagagagacaagaacgggaacggcaggaacgcctggagcggcaggaacgcctggagcggcaggaacgcctggagcggcaggaacgcctggatcgggagaggcaagaaagacaagaacgagagaggctggagagactggaacgggagaggcaagaaagggagcgacaagagcagttagaaagggaacagctggaatgggagagagagcgcagaatatcaagtgctgctgcccctgcctctgttgagactcctctaaactctgtgctgggagactcttctgcttctgagccaggcttgcaggcagcctctcagccggccgagactccatcccaacagggcattgtcttgggaccacttgcacctccacctcctccaccactcccaccagggcctgcacaggcttcagtagccctccctcctcccccagggccccctccacctcctccactcccatccaccgggcctccaccgccccctcctccccctcctctccctaatcaagtaccccctcctcctccaccacctcctgccccacccctccctgcatctggattctttttggcatccatgtcagaagacaatcgccctttaactggacttgcagctgcaattgccggagcaaaacttaggaaagtgtcacggatggaggatacctctttcccaagtggagggaatgctattggtgtgaactccgcctcatctaaaacagatacaggccgtggaaatggaccccttcctttagggggtagtggtttaatggaagaaatgagtgccctgctggccaggaggagaagaattgctgaaaagggatcaacaatagaaacagaacaaaaagaggacaaaggtgaagattcagagcctgtaacttctaaggcctcttcaacaagtacacctgaaccaacaagaaaaccttgggaaagaacaaatacaatgaatggcagcaagtcacctgttatctccagacgggattctccaaggaaaaatcagattgtttttgacaacaggtcctatgattcattacacagaccaaaatccacacccttatcacagcccagtgccaatggagtccagacggaaggacttgactatgacaggctgaagcaggacattttagatgaaatgagaaaagaattaacaaagctaaaagaagagctcattgatgcaatcaggcaggaactgagcaagtcaaatactgcatagaggaacagactaaggagagataggactttaatctggaggaaaaatatcctacaaacaacaactgttcacaacagcaaacccctacatttatgagctgtaagaagaaaatggagacaaacagaaggagggaaaaaccaacctactctgaaagccttcagacattatgactctggtgataagctctttccctctccgtttgctgcttttttctggcctttacaacagaatggaagagaatcatttaagagttcctgtaacagttatgcagaaaatactaaaacccatcaggcaagatcaccacgcattgaaatattttcatatcaagataaagtcgcacattttccacaatacattgctaaaataaagaggagaaaggcttaggaagtttttttgcagagagtgctggtaaagaattgagcaagtttgctattgtattgtaatgtttctctcaggtttgttcttcctatcatgtttgatattccatgaataattgagatcagccctatgtaagttaagatcataatatgtggaacaaatggaattgtaagtgctttcaaagggtaatatttataagaaagtgtccgaaaaatgtttcttcagcttgagaaattttagaatgataggaagtttctcgagttagccttcatgcaattttgtagattaaaacataaaatttgtccagaacttaaagatttagatgccttcctaaattgttacaatgctttaccaaatctatgacttctacataacacaaaccagtggtcaaatgtaaacactatattgtagatttactgtaggttttcaaccttttttagatttatgcatgtggacatttttataatgtaattacaatcaccacaaggttagcttttttaattgcagacagtaatgcatgtcacactaatatgtagtggccttttcaaggcctagtcccagggaaaacattttgtagagtataggggagtgggaggaaggggaggaataattttttatttaaagttgatttctgcactatctttttctcagttacctgcatgaataaataatgagaaatattttgtgactttaattggtaaatatgttacaaaaccaagtacttaatcttttacatcatgtcttcagctatttgtattttaaccagtaatttcaatggtctgaaacatgattctgagcttcacataatatcttaactgtggaactcaaaagtttgatcactgaatttggcagttattattacctaggtacccccgctgttacacaggtgtttagatacgtgttcctgaatgaagctgcttttgaattttgttatgttgaaatgcaagaaataacaatgatggcagcaattaaggtcacagaaatcattaggtaaaggaaaaccaatgaggagttctgcagttttcttttaataagtaaagtgagacttgggtggtgggaagaaggaaggtgggaagaaggaattagacactctgcctgccactctgcgtgtgtgtgctctcgcgcacgtgctgtctatatggaagccactcccttttctttcctttgaaactggtaaggttaaaataggggagaaatcctacatgttggaatgatagctttttggaaaatttaagaaactctccaggctctccatcttgatttatgcttgagttgttatgtgccatatttgctttgaactctgattatcagaagttttactaaaactttgaaataattcactttcatctgctttctagattttgtacatctcagtccataaagcaaagcttgttgatagtgtagttttctaaacgctgcaaatttgcagcctttaccactacaaagaagtttggatgagggattttttttttctttgtcaaaatagttcctgtttctgtagaaatttcatttttagattaaactgtgatggatgagctatcataattcaagtatacatttcttttttctatcagatattcattgtcatgcagtagtagtaaaaacatcaaagatgcagcaagcttattaagtattattttctaaaagaaataggaggcattttcatctttattattgtacttttggttatgcaaacactttgataatataaacagttatgtcccctataaatctggtcagcaacctcttttgattttgttgggtaagttaaatagtctgtagtaggtagagtactgggtacaagtggtccaaactaagataagagactaaaataaaatgctaaatcttaaaagaaactgggtttatgcactaaacgttttgtgccttggtctaatattaacatgatgtatgtgtaaactgacaaaaaaaaaaaaaaaaaaaaaccagtgttgaatcatgctatatttcccatcatcccagattgctaaatgttctttccaagaagtctgaatgaattattatatacatttgctatcatacatgacagttgtgtcattattagagatttcagtaattaaaatgggaaacagaagcctaagttatttaccttatcaaaaccacgttccttggaaccacattattatgatggtttttgtgctcttgtacgttggatgtcttaagctgagtacagtttaggggatcctttctaatgacaggaaggcactgctttcctcaacactgtgatctgacctgtgacaagtctgtactatccactatgtaaatggctcacaagtcaattgcaaacaaactgaatgtacaaatcttagtgctggtgctgaaatctcttcagaatagtcatcatgatttaaaagtttgtttaaaaatttgcaagcatcaagtgtcaatcaaaactgaagatgaaacactaatgaatgttgaattctcatgcttttaggtgtacttcctttttagaattttcagttttctgctatttttaccgtaactatttcgtttaaatttgtttcatttaagtttcctacacgctaacttcgtttgtgcgattgaaataaaattgcagtatatatatgttgcttgtttgtgacacttagataatcttctgaaataatttgttttaaagtaagttatattggatgtgaaaaacaccttttaaagtccaagactttactacttaaaagtttacatgtcacgtcactattctttacagatttcatagaagtcgtgaatactaagtaatgtatacaaaagaaatatgtgatgatgtgtctactttttgtttgaaataactgttgggtgttccctcttcttattttctctctgcccaccttgacacagtaacttcctcttatagtcaagatgatgattaagtgtttaatttttattccattttgttctgcaacacgttcaggtacttaaaactcattcatgcagttagaattatcctttatgtagtttgcatggtaaaggacattgtgtggtaaagggcattattgagtaatgaattttaagtatagcaaaatatgtatagtgtttatacatgatgctgatttcttaaaacctacatataagcagtagtactttttctctattataaagtattaattttgagttccattttataattctgatgtcttcattagaaatacaaaaatacaatccttgtattttttctttgaccagacccaaattttccccttcccccctccattctcctctccacttctcgtggaccgcgtgttcccaatattcattaacatttgcagccattacagagttacagttgtaaaattttcagctgtttttttttttttttttttgctctagcctgtctcatgttcttgcttctcttcatatgtaagtcagtatttttgtctacaaattaaaagtcacttgtcattcaaaaatgagttaagtaacatgataatcttttaaatttacctagctacaacttttatgtctcttgtaaatttatatatactttcagtgccattgtgaagaattggccttttaattctaagtagtattaccctatgaagcacagtgtgcaaaggtatgctacaaggtctctttaattcctgtgtggccattataattttataacaccattaccctttaaattctaccgattataagcagcgtaaaagtaactatataaagcaaacatcgcaaaggaactctgcaggagctcttaattcctttatgtagctatcataaaattcactttcctgaagacatttactctcattcacttccaaactccaaacctttttctggtagcaccacttttgtttttaatagaaagatgagttcatatctgtacatctctccaaagctctaaggaatgagaaaaggatcctagtatattgaaattactgatgtttaatacctctgccttttcactaaaagccatttaatatttttaaagtcaaaacttgacatacaggtatttataaggaatctccatgactctgaaggaatgaaattgatgtaggtagctttggctatgtaaagacatagtagaggacaattacttaaagaagagttttcttttgaggatttgtagatttgactaagcagctgaagtcagtaacccctcaagaaagtccgtttatagaagccaagaactgttggaggtctgtgatgcaggtttttctgttcccaacatcaaaagctgtggattatttggtgtgttcccctttatgttatctctcgataatttttgagacatcaagattttttaaaatatcaatactggaaagatgaaaccttcaaattaaaacctaaaattgattagaaagaaaagtaaaatattaatgcagtaaatttaggatggttacagatactcaccatcaacataaataaatggagttctaggataaattatttgtggaatactaatggtcaagtcacataagagtaaaatcttttggtgaggagacacatttgacaactgctaaagaattaactaaatttgtctttctaaatagttttctttataaagtaacagaaacattgtaaaaggataaatgactgtcataatgactta

SEQ ID NO: 341083 - DNA, 1776 bp, Artificial Sequence
  derived and/or modified sequence
atgtctgagcagagcatctgccaggcaagagctgccgtgatggtgtatgacgatgctaataagaagtgggttccagccggaggttccacagggtttagccgcgtccacatctatcatcacacgggaaacaacacctttcgggtcgtgggcagaaagatccaggaccatcaggtcgttatcaactgtgctatcccaaaaggcctaaagtataaccaggctacccaaacttttcatcagtggcgcgacgccagacaagtctacggattgaactttggaagcaaggaggacgcaaatgttttcgccagcgctatgatgcatgcgctcgaagtgctcaactctcaggagacagggccaaccctgccacgccagaacagccaactcccggctcaagtacagaacgggccgtcccaagaggagctcgagatccagaggcggcagctccaggagcagcagcgccaaaaagagctggagcgggaaaggctggagcgcgagaggatggagagggagaggctggaacgcgagagactggagagggaacggctagagagagagcggctcgagcaggagcagctagagagagaacgccaggagcgcgagaggcaggagaggctcgaacggcaagaacggctcgaaagacaggagcgattagagcggcaagagagactggatagggagcggcaggaaagacaggagcgggagaggctcgaaaggctggagagagaaagacaagagagggagcggcaggagcagcttgaacgggaacaactcgagtgggagcgggaacggcggatcagttctgcagcagcccctgcctccgtcgagacccctctgaatagtgtcttgggcgattccagtgcgtccgaacctggcctccaggcagccagccaaccagctgagactccgtcccagcagggaattgtcctggggcccctggctcctcctcctcccccaccactgcctcctggtcctgctcaggcaagcgttgcactgcccccaccgcctggtcctcccccacctccgcccttgccatcaactggaccacctcccccccccccgccgccccctctgcccaatcaggtcccaccgcctccccctccgccacccgccccaccattgcccgcatctggtttcttcctagcttcaatgagcgaggataataggcccctaactggtctggctgccgcaatcgccggagccaagctaaggaaggtatcccggatggaagataccagctttccatccgggggcaatgccatcggcgtcaacagtgcatcatcaaagaccgacaccggacgcgggaacggaccgttgccattgggggggtcaggtctaatggaggagatgtccgctttactagccagacgcaggcgcattgccgaaaaagggagcaccattgagactgagcagaaggaggacaaaggcgaagactcggagcctgttacatccaaagcctcgagtacgagcacccccgaacccaccaggaaaccttgggagagaaccaatactatgaacggctcgaagagcccagtcatatctagacgtgactccccgcggaaaaaccagatagtgtttgacaacaggtcttatgactctttgcatcggccaaaaagcacacctctctcccagcctagtgctaatggcgttcaaactgagggtctcgactacgaccgcctgaaacaggatatcctggacgagatgcggaaggagcttacaaaattgaaagaggaattaatcgatgcaattcggcaagaactcagcaagtcaaacaccgcgtag

SEQ ID NO: 341084 - DNA, 1776 bp, Artificial Sequence
  derived and/or modified sequence
atgtctgagcagagcatctgccaggcccgggctgctgtgatggtgtatgatgatgccaacaagaagtgggtgcctgctgggggcagcacaggcttcagccgggtgcacatctaccaccacactggaaacaacaccttccgggtggtgggcaggaagatccaggaccaccaggtggtgatcaactgtgccatccccaagggcctgaagtacaaccaggccacccagaccttccaccagtggagagatgcccggcaggtgtatggcctgaactttggcagcaaagaagatgccaacgtgtttgccagcgccatgatgcacgccctggaggtgctgaacagccaggagaccggccccaccctgccccggcagaacagccagctgcctgcccaggtgcagaatggccccagccaggaggagctggagatccagaggcggcagctgcaggagcagcagaggcagaaggagctggagcgggagcggctggagcgggagaggatggagcgggagcggctggagcgggagcggctggagcgggagcggctggagcgggagcggctggagcaggagcagctggagcgggagcggcaggagcgggagcggcaggagcggctggagcggcaggagcggctggagcggcaggagcggctggagcggcaggagcggctggaccgggagcggcaggagcggcaggagcgggagcggctggagcggctggagcgggagcggcaggagcgggagcggcaggagcagctggagcgggagcagctggagtgggagcgggagcggcgcatcagcagcgctgctgccccagcctctgtggagacccccctgaacagcgtgctgggggacagcagcgccagcgagcccggcctgcaggccgccagccagcctgctgagacccccagccagcagggcatcgtgctgggccccctggcccctcctcctcctccacccctgcccccaggccctgcccaggcctctgtggccctgcccccacctcctggccccccacctcctccacccctgcccagcactggacctcctcctcctcctcctcctccacccctgcccaaccaggtgcccccacctcctcctcctcctccagccccacccctgcctgccagcggcttcttcctggcctccatgtctgaggacaaccggcccctgaccggcctggccgccgccatcgccggggccaagctgaggaaggtgtccaggatggaggacaccagcttccccagcggcggcaatgccatcggcgtgaacagcgccagcagcaagacagacaccggcagaggaaatggccccctgcccctgggcggcagcggcctgatggaggagatgtctgccctgctggccaggagaagaagaattgctgagaagggcagcaccattgaaacagagcagaaggaggacaagggagaagattctgagcctgtgaccagcaaggccagcagcaccagcaccccagagcccaccaggaagccctgggagaggaccaacaccatgaatggcagcaagagccctgtgatcagcagaagagacagccccaggaagaaccagatcgtgtttgacaacagaagctatgacagcctgcaccggcccaagagcacccccctgagccagcccagcgccaacggggtgcagacagagggcctggactatgaccggctgaagcaggacatcctggatgagatgaggaaggagctgaccaagctgaaggaggagctgattgatgccatccggcaggagctgagcaagagcaacacagcctag

SEQ ID NO: 341085 - DNA, 1776 bp, Artificial Sequence
  derived and/or modified sequence
atgagcgagcagagcatctgccaggcccgggccgccgtgatggtgtacgacgacgccaataagaagtgggtccccgctggaggatctactggcttttctagagtacacatttaccaccatacgggtaacaacaccttccgggtggtagggcggaagatccaagatcatcaagtggtcattaattgtgccatccctaaggggcttaagtataatcaagccacacagacgtttcaccagtggcgcgacgcccgccaggtgtatggtctcaacttcggttcaaaagaggacgccaatgtgttcgcatccgcgatgatgcatgcacttgaagtgctcaacagccaggagaccggaccaacactcccgaggcaaaatagccagctgccagcccaggtccagaacggccccagccaagaagaactggagatacagcgcagacagctgcaagaacagcaacgacagaaggagctggagcgagagcggctagagcgggagagaatggagcgagaacgcttggaaagggagcgcttggaaagagaaagacttgagcgcgaacgactggaacaagagcaattggagcgggagaggcaagaacgcgagcgccaagaaagacttgagcgtcaggagcggctcgaacggcaggaaaggctggaacgtcaggagcggctggacagagagcggcaggaacggcaggaacgcgagagactggaaagacttgaaagggagcggcaggaaagagaaaggcaggagcagctggagcgcgaacagctagagtgggagcgggagcgcaggatatccagtgctgcagcacccgcatcggtggaaacgccactgaactccgttctgggagattcgagtgcttcggagcctggacttcaggccgcatctcaaccagcggaaaccccatctcaacagggtatcgtgcttggtccacttgcaccccccccaccccccccactgccaccgggccccgctcaagcctcagttgctctgcctccgccacctggacccccgcctccacctccactgccatcaactgggcctccccctccccctcctccccccccgttgccaaaccaggtgcctcccccacccccacctccgcccgcgccccctctcccagccagtggattttttttggcaagcatgtctgaggacaatcgtccacttactgggctagccgcggctattgctggagctaagctgaggaaagtgtcccgtatggaggatacctctttcccttcgggcggaaacgccataggcgttaattccgctagttccaagaccgataccgggcggggcaacggaccgcttcctctgggaggaagtgggctgatggaggagatgagcgctctgctcgctcgccgtagaaggattgccgagaaagggagcactattgagacagagcagaaagaagacaaaggcgaggacagtgagcctgttacaagcaaggcctcttcgactagtacgccggagcctacgcgcaaaccctgggagaggacaaacaccatgaacgggagtaagtccccggtgatttctagacgcgattctccaagaaagaaccagattgtgttcgacaataggagctacgacagcctgcaccggcccaagtccactccgttgagtcagccttcagccaacggagttcagacagagggactggactacgaccgactgaaacaggatatcctggacgagatgcgtaaggaactgacgaaactcaaggaagaacttattgacgctataagacaagaactgtcaaagagtaacaccgcctag

SEQ ID NO: 341086 - DNA, 1776 bp, Artificial Sequence
  derived and/or modified sequence
atgtctgaacagagtatctgccaggccagagccgcagttatggtgtacgatgatgctaataaaaaatgggtacccgctggcggaagtaccggattttctcgcgtccatatctaccaccacaccggcaacaataccttccgggtcgttgggagaaagatccaagaccaccaggtggtgatcaattgtgccatcccaaaaggcttaaaatataaccaggcaacacaaacatttcaccagtggagagatgcacgacaggtgtacggtctgaattttgggtccaaggaggacgcaaacgtgttcgcttcagcaatgatgcacgccttggaagtgttgaattctcaggagacaggcccaactttgccaaggcaaaactctcagctccccgctcaagttcagaatgggccaagccaagaagaattggagattcaacggaggcagctccaggagcaacagcggcaaaaagagctggagcgggagagattggaacgggaaagaatggagagagaacgactcgagagagaaagactcgagcgagaacgcttggagcgggagcgtctggaacaggaacaactggagcgtgagcgacaggagcgggagcggcaggagagactagagcgccaggaacgcctagaacgacaggaacgactggaaaggcaggagcgcttggatagggagcggcaggaacgccaggaaagagagcggctcgagaggctcgaacgcgagcggcaggagagggagaggcaggagcagctagaaagagagcaactggagtgggaaagagaacgaaggatatcctctgctgccgctcctgcttctgtagaaacaccactgaattccgtgctgggtgactcctctgcttccgaaccaggacttcaggcagcgagccaaccagccgagacaccgtcccagcaaggcattgtgttggggcctctcgcccctccccctcctcctcctttgcccccaggacccgctcaggcctctgtcgccctgccgcctcctccaggacctcccccacccccaccacttcccagtactggtccaccacccccaccgccaccccctccgctgcctaaccaagtgccccctcctcccccaccaccccctgcccctccccttccagcgtccggcttctttttggcgtcaatgagcgaagataatcgcccactaacagggctggccgcagccatcgccggtgccaagctccggaaggtgtcacggatggaggatacctctttcccatctggcggtaatgctatcggcgttaattcggccagcagcaaaactgacaccggtagagggaacggcccactaccgctcggcggaagcggtctaatggaggaaatgtctgccctgctggccaggcgccgaagaattgccgagaaggggtccacaatcgagacagagcagaaagaggacaaaggagaggatagtgaacccgtaacctctaaagcgtcgtccacaagcacgccagagccaacgcggaagccctgggagagaacgaatacaatgaacggaagcaagtcaccagtcatcagtaggagagattcacctcgaaagaatcaaatcgtttttgacaatcggtcctatgattccctgcaccggcctaagtccactccacttagccagccctcagcaaacggagttcagaccgaggggctggactacgaccggctgaagcaggacattctggatgaaatgcgcaaggaactgactaagcttaaggaggaacttatagatgctataagacaggagctcagtaagtcaaacacggcctag

SEQ ID NO: 341087 - DNA, 813 bp, Artificial Sequence
  derived and/or modified sequence
acaaaacatagagtaccccggcagccggcaagaggaagagagagtggcttccacatccccaatatcctagaggcggctgagccggaggcggtcgcacaaagcgggccccgggggccgttccagccgcggccgaccatagagatgcggctcccgccggctctgggtctggaggtgagtgagcggctgcggggcggaactgggaagggaatgcgggtggagcgagctggaggcaaagtttttcgagccccgggatcagggtgggcctgggcgctgggaactctcggaaggaggtactgaagggagcacccagacgagctgggccccggcgctgcagtcgcgtcacggttctggaccccgcccgggtacctgctgctctcaggacaaaatcatgacgatgctccatcccaagccttccaggttacaaaccgcctttccagttcgctggctcttatgatccagctcctgcccgacgatgtggacactgtcatcacctccattttacagataggaaagctgaggcccagagaagcgaagcgactgtgtctgtccaagaccacgcgccctcctgcccggaagataagcgtatttcttctctggtgcccacctgtctcctacctcaccctgccctcccgcaggtgaaggttcttaatcttgacggctcagcgtcctccttggctccccccggaggccatgtatggtcaagcttgaagattccccagaacagcgataatattcacatttaagaagccaaaacacacaagtcggtggtgatgacagacccccttttggactcacagccagccagtagcaccg

SEQ ID NO: 341088 - DNA, 447 bp, Artificial Sequence
  derived and/or modified sequence
atggagcacatgttgctagccaaccatactgataaggctactttcactggcacacagagacagcggtcgtgtagtggagcctccgtttcgcagccaaggcccctgagggggaagttagttgggtattgggacccccactcccggcttttgagccgggggagggctctcgggagtgtttcagccccatccacgcctcgggggcggggatggaaggccacctttgacggctgtatactgcatgatgaccttctgaccaaagtccatgggttccagagcctcatcgggctccagcaacacctcgcctgcggagatagtgggtctttaatgaaaaactgccatgatgttagaaagtccttgtctgagcggggttggggggcagcatgttggggaggaggcggcgtggccagtagagagaagctgcatcccctcgccgaatcaggtacttag

SEQ ID NO: 341089 - protein, 778 aa, Artificial Sequence
  derived and/or modified sequence
MSPCFSFIGCKLCSIVTRGCETVEMTLRRNGLGQLGFHVNFEGIVADVEPFGFAWKAGLRQGSRLVEICKVAVATLTHEQMIDLLRTSVTVKVVIIQPHDDGSPRRGCSELCRIPMVEYKLDSEGTPCEYKTPFRRNTTWHRVPTPALQPLSRASPIPGTPDRLPCQQLLQQAQAAIPRSTSFDRKLPDGTRSSPSNQSSSSDPGPGGSGPWRPQVGYDGCQSPLLLEHQGSGPLECDGAREREDTMEASRHPETKWHGPPSKVLGSYKERALQKDGSCKDSPNKLSHIGDKSCSSHSSSNTLSSNTSSNSDDKHFGSGDLMDPELLGLTYIKGASTDSGIDTAPCMPATILGPVHLAGSRSLIHSRAEQWADAADVSGPDDEPAKLYSVHGYASTISAGSAAEGSMGDLSEISSHSSGSHHSGSPSAHCSKSSGSLDSSKVYIVSHSSGQQVPGSMSKPYHRQGAVNKYVIGWKKSEGSPPPEEPEVTECPGMYSEMDVMSTATQHQTVVGDAVAETQHVLSKEDFLKLMLPDSPLVEEGRRKFSFYGNLSPRRSLYRTLSDESICSNRRGSSFGSSRSSVLDQALPNDILFSTTPPYHSTLPPRAHPAPSMGSLRNEFWFSDGSLSDKSKCADPGLMPLPDTATGLDWTHLVDAARAFEDQRVASFCTLTDMQHGQDLEGAQELPLCVDPGSGKEFMDTTGERSPSPLTGKVNQLELILRQLQTDLRKEKQDKAVLQAEVQHLRQDNMRLQEESQTATAQLRKFTEWFFTTIDKKS

SEQ ID NO: 341090 - DNA, 2337 bp, Artificial Sequence
  derived and/or modified sequence
atgtccccttgctttagtttcatcgggtgtaagttgtgtagcatagtgacaagagggtgcgaaacagttgagatgacacttcgacgtaacggacttgggcagctgggctttcacgtgaattttgaggggatcgtggccgacgtagaaccctttggcttcgcctggaaagctggcctgcgtcagggctccagactagttgagatttgtaaagtcgcagtggcaacactcactcatgagcagatgattgacttgctgaggacttcggtgacagttaaagtggtcatcattcagccacatgatgatggcagtcctcggcggggttgctccgaactgtgtaggatcccaatggtagaatacaaactggattccgagggtacaccttgtgaatataagactcccttcagacgcaacacaacctggcacagggttcctacacctgctctgcaacctctctcccgcgccagtccaatccctggcacccccgatcgcctgccatgtcaacagctgctgcaacaggcccaggctgccataccgaggagtaccagctttgacagaaagctcccggacggcacgaggtccagccccagcaatcagagttcatcctccgacccagggcctgggggctcagggccctggcgtccacaagtcggatacgatggctgtcagtcccccttactccttgagcaccaaggctccggcccactggagtgcgacggcgcacgggaaagagaagatactatggaagcctcacgtcatcctgagacgaagtggcacggacccccaagcaaggttctaggatcctataaagaacgggctttgcagaaggacggatcctgtaaggactcccctaataagctcagtcatattggcgataaatcctgctccagtcattcatcctctaacaccctctcatctaatactagtagcaattctgacgacaaacatttcggttccggcgacctgatggacccagagctccttgggctgacctacattaagggcgcctctacagatagcgggatcgacacagccccatgtatgccagccacaattctggggccagtccatctggcaggatcccgcagtctgatccatagcagggccgagcaatgggcagatgccgccgacgtttctggacccgatgacgagcctgctaagctgtactcagtgcacgggtatgcatccacgatatccgctggatccgcagccgaaggttcaatgggtgatcttagtgaaatcagtagccattcgtccggcagccatcatagtggcagcccatctgcccactgtagcaagtcctccggcagtctggacagcagcaaagtgtacattgttagccatagtagcgggcagcaggtgccaggctctatgagcaagccataccaccggcagggagctgtaaacaagtatgttataggctggaagaaaagcgaagggtctcccccaccagaggagcctgaagtaaccgaatgtccgggcatgtattccgagatggacgtcatgtctaccgccacccagcaccagaccgttgtaggcgacgcagtggccgagacccaacacgtgctgagtaaagaagatttcctgaagctcatgcttcctgatagcccccttgtcgaggaagggcgcagaaaattctcattctacggaaatctgtctcctagacgttcactatatcggaccctcagcgacgagtctatatgttcgaatagacggggatctagtttcggatccagtagatcctctgtccttgaccaagcccttcctaacgacattttattttcaacaactccaccgtaccactctacccttccccccagggcccatcccgcaccctccatgggatcgctgcgtaatgaattctggttctcggacgggagcttatcggataaaagtaaatgcgcagacccggggttgatgcctctgcccgatactgctacgggactcgactggacgcacctggtggacgcagcccgagcctttgaggaccagcgcgtggcatctttttgcaccttgacagacatgcagcacggccaggatctcgagggcgcacaagagttaccgctctgtgtggatccaggctccggcaaggaattcatggatactacgggggagcgttctccatccccgctcacgggcaaggtcaaccagctcgagcttattctgaggcagcttcagacagacctccgcaaagagaagcaggataaagcagtgttgcaggccgaagtgcagcatctgaggcaggataacatgcgcctgcaagaggagagtcaaacagcaaccgcccagcttcggaagttcactgaatggttctttactactatcgacaaaaaatcctag

SEQ ID NO: 341091 - DNA, 2337 bp, Artificial Sequence
  derived and/or modified sequence
atgagcccctgcttctccttcatcggctgcaagctgtgcagcatcgtgacccggggctgtgagaccgtggagatgaccctgcggagaaatggcctgggccagctgggcttccacgtgaactttgagggcatcgtggctgatgtggagccctttggatttgcctggaaggccggcctgcggcagggcagccggctggtggagatctgcaaggtggccgtggccaccctgacccatgagcagatgattgacctgctgcggacctctgtgacagtgaaggtggtgatcatccagccccatgatgatggcagcccccggcggggctgcagcgagctgtgccgcatccccatggtggagtacaagctggacagcgagggcaccccctgtgagtacaagacccccttcagaagaaacaccacctggcaccgggtgcccaccccagccctgcagcccctgagccgggccagccccatccctggcaccccagaccggctgccctgccagcagctgctgcagcaggcccaggccgccatccccaggagcaccagctttgacaggaagctgcctgatggcaccaggagcagccccagcaaccagagcagcagcagtgaccccggccctgggggcagcggcccctggaggccccaggtgggctatgatggctgccagagccccctgctgctggagcaccagggcagcggccccctggagtgtgatggagcccgggagcgggaggacaccatggaggccagccgccaccctgagaccaagtggcacggcccccccagcaaggtgctgggcagctacaaggagcgggccctgcagaaggatggcagctgcaaggacagccccaacaagctgagccacatcggggacaagagctgcagcagccacagcagcagcaacaccctgagcagcaacaccagcagcaacagtgatgacaagcacttcggcagcggggacctgatggaccctgagctgctgggcctgacctacatcaagggggccagcacagattctggaattgacacagccccctgcatgcctgccaccatcctgggccctgtgcacctggccggcagccgcagcctcatccacagcagagctgagcagtgggcagatgctgctgatgtgtctggcccagatgatgagcccgccaagctgtacagcgtgcacggctacgccagcaccatctctgctggcagcgctgctgagggctccatgggagacctgtctgagatcagcagccacagcagcggcagccaccacagcggcagccccagcgcccactgcagcaagagcagcggcagcctggacagcagcaaggtgtacatcgtgagccacagcagcggccagcaggtgcccggctccatgagcaagccctaccaccggcagggcgctgtgaacaagtatgtgattggctggaagaagtctgagggcagccccccacctgaggagcctgaggtgacagagtgccccggcatgtacagcgagatggatgtgatgagcacagccacccagcaccagacagtggtgggagatgctgtggccgagacccagcacgtgctgagcaaagaagacttcctgaagctgatgctgcctgacagccccctggtggaggagggccgcaggaagttctccttctacggcaacctgagcccccggcgcagcctgtaccgcaccctgagtgatgagagcatctgcagcaacagaagaggcagcagctttggcagcagccgcagctctgtgctggaccaggccctgcccaatgacatcctcttcagcaccaccccaccctaccacagcaccctgcccccccgggcccacccagcccccagcatgggcagcctgagaaatgagttctggttcagtgatggcagcctgagtgacaagagcaaatgtgccgaccccggcctgatgcccctgcctgacacagccaccggcctggactggacccacctggtggatgctgcccgggcctttgaggaccagagggtggccagcttctgcaccctgacagacatgcagcacggccaggacctggagggcgcccaggagctgcccctgtgtgtggaccccggcagcggcaaggagttcatggacaccaccggggagaggagccccagccccctgaccgggaaggtgaaccagctggagctgatcctgcggcagctgcagacagacctgaggaaggagaagcaggacaaggctgtgctgcaggccgaggtgcagcacctgcggcaggacaacatgaggctgcaggaggagagccagacagccacagcccagctgaggaagttcacagagtggttcttcaccaccatcgacaagaagagctag

SEQ ID NO: 341092 - DNA, 2337 bp, Artificial Sequence
  derived and/or modified sequence
atgagcccctgcttcagcttcatcggctgcaagctgtgcagcatcgtgacaagaggctgtgaaactgtggagatgaccctcaggaggaacggattaggccaacttggattccacgtgaattttgaagggattgtagccgacgtggagcctttcggcttcgcttggaaggcggggttacgccaaggttccagactggtcgagatctgtaaggtggcagttgctacattaactcacgagcagatgattgacctgctgagaacttccgtgaccgttaaggtagtaataatccaaccacacgatgatggtagcccccggagaggctgttcagaactgtgccggatccccatggtggaatacaaactggatagcgaagggactccatgtgagtacaagactccctttagacggaatacaacatggcaccgcgtacctacccccgctcttcaacccttaagcagggcctcgcctattcccggtacaccggatcgcttaccttgccagcaactgctccagcaggctcaggccgctatccctcgaagcacgagctttgataggaagctgccagacgggacacgtagttctcctagcaatcaatcaagcagctccgatcctgggcccggagggtccggtccctggcgcccccaagtgggctacgacggttgccagtcccctctgctcctggaacatcagggttctggccctttggagtgcgatggtgcccgggaaagggaggacactatggaggcatcacggcatcccgaaacaaaatggcacgggccaccgtctaaggtattgggctcctacaaggaaagggctctgcaaaaggacggaagctgcaaagattccccaaacaaactttctcatataggagataaatcttgtagctcccacagttcttccaacacattatctagcaacacttccagcaactcggatgacaagcacttcggctcgggcgatctaatggatcccgaattgctggggctgacttacatcaagggggcatcaactgattcagggatcgacaccgctccatgtatgccagcaacgatcctgggccccgtacatcttgctgggagtaggtcacttatccattcgagagccgagcaatgggctgatgctgccgatgtcagtggtcctgacgatgagcctgctaaactgtacagcgtccatggctatgcatcaactatctctgcaggatccgctgccgaaggcagcatgggagatctgagcgagatcagcagccatagctccggcagccaccatagcggttccccaagcgcccattgtagcaagagctctggctccttggattcgagcaaagtctacatagtgagccactctagcgggcagcaggttcccggatccatgtccaagccctatcacaggcaaggcgccgtcaacaaatatgttatcggctggaaaaaatccgaggggtccccgcccccagaggagcccgaagtaaccgagtgccctgggatgtacagcgaaatggatgtaatgtccaccgcaacacagcatcagaccgttgtcggtgatgcagtggcggagactcagcatgtgctgagtaaggaggattttttaaaattgatgctgccagactccccgctggtggaggaggggcggcgcaagttttctttttatggaaacctgtcgccccgtcggtcactctaccggaccctctccgatgaatctatctgcagcaacaggagaggctcatccttcggcagctcccgttcctctgtgcttgaccaggccctgccgaacgatatcctgttcagtaccactccaccatatcactctacactgccaccccgcgcccacccggcgcccagcatgggaagcttgagaaatgaattttggttctctgacggctctctctctgacaagtccaaatgcgccgaccctgggctgatgccattgccagatacagccacagggctggattggacccatcttgtagacgcagctagagcatttgaagaccagcgggtagcctctttttgtacacttaccgacatgcagcatgggcaagacttagagggggctcaggaactgcctctgtgtgtcgatcccggatcagggaaggagttcatggacaccacaggagaaagatcgccaagtcctctgaccgggaaggttaaccaattggaattaatcttgcgtcaattacagaccgatcttagaaaggagaaacaggacaaagccgtgcttcaggctgaggtgcagcacctgcgccaagacaacatgcggcttcaagaggagtctcagaccgctactgctcagcttaggaagttcacagagtggtttttcacaacgatcgataagaagtcttag

SEQ ID NO: 341093 - DNA, 2337 bp, Artificial Sequence
  derived and/or modified sequence
atgtccccgtgcttcagctttattggctgcaaactgtgctccattgtgactcgcggttgtgaaacagtggaaatgaccctcaggagaaatggtctgggacagctgggattccatgtgaatttcgaagggattgttgccgatgtggaaccatttgggttcgcatggaaggcaggtctgagacagggcagccgtttggttgaaatctgcaaggtagcggtcgctacgctaacacatgaacaaatgattgacctcctcagaacttcagtgactgtgaaagtagtcataatacaaccccatgatgacggctcccctcgtcggggatgtagcgaactgtgtagaatccctatggtcgagtataaactggacagcgagggcactccatgcgaatataaaaccccgtttaggagaaatacaacatggcacagggtgcccactcccgcacttcagcccctatcaagggcatctcctatccccggtacgcctgatcggcttccatgtcagcagctgctgcagcaggcccaggctgcaattccccgatcaacctcttttgataggaagctcccagatggcacgcggtcatctcctagtaaccagtccagttctagcgacccaggtccaggtggatccgggccatggcgaccacaagtcggctacgacggctgccagtcccccctcttactggagcatcagggttctgggccattggagtgtgatggcgctcgggagcgagaggacactatggaagcaagcagacatcctgaaacgaagtggcatggccctcctagcaaagttttggggagttacaaggagcgggctctgcagaaagacgggtcctgtaaggatagccctaacaagctatctcatatcggagacaagtcctgttcttcccattctagcagcaatactctctcttctaatacgagtagtaatagtgacgacaaacacttcggaagcggagacctgatggatccagagctcctcggacttacttacataaaaggagccagcaccgacagcgggattgataccgccccttgcatgcctgcaaccattctgggacctgtccatctggccggatccagaagcctgatccattcccgggcagaacaatgggccgacgcagccgatgtctccggcccagacgacgaacccgcaaaactatactctgtccacgggtacgcatctaccatcagtgccggaagcgcagctgaaggttcaatgggtgacttatcagagataagttcacactcctctggatcacaccactctgggtctccatccgcacactgtagcaaatcttcgggtagcctcgattcatccaaagtttatattgttagccacagctctgggcagcaggtgcccggaagcatgtccaaaccttaccaccgacagggcgctgtgaataaatatgtgatagggtggaagaaatccgaaggcagcccacctcctgaggagcctgaagtgactgaatgccctggaatgtattcagagatggacgtgatgtcaacagctacacagcaccagacagtggttggggatgctgttgccgagacacagcatgttctctccaaggaggacttcttaaagctgatgctgccggacagccccctcgtggaagagggcagacgcaagtttagtttttatggaaacctctcacccaggcgatccctctaccgaacactatcagacgagagcatttgctcgaatcgacgaggctcgtcctttggaagctccaggtcatcagtgcttgatcaggcgctaccgaatgacatactgttcagtacgacaccgccataccactccaccctgcctccgagggcccacccagccccatccatgggaagtctcaggaacgagttctggttctctgacggctctctgtctgacaagagtaaatgcgctgatcctggtctgatgccactcccagacacagccacagggcttgactggacccacctggtggacgccgcacgcgcatttgaagaccaacgagtcgctagtttttgtacactcaccgatatgcagcatggacaggacctcgagggtgcacaggagctgccactctgtgttgacccaggatcaggaaaggagtttatggacaccaccggcgagagatccccttcaccactgactggcaaggtgaatcaattagagctgatactgcgacagttacaaacagacctgagaaaggagaagcaggacaaggccgtactccaagccgaggtgcagcatctacgccaagataacatgaggctgcaggaagaaagccaaaccgcgacggcacagttaaggaagtttacggagtggttctttacaacaatcgataaaaaaagttag

SEQ ID NO: 341094 - DNA, 2937 bp, Artificial Sequence
  derived and/or modified sequence
acttactgtcataggtcttattaaataggtatctatgtagtcagagcatgtttcatagaaatggagtgttcattaaactgaaacttcatacattgcctctgggcttttggggataggagtatgatacctcccaacttgaaattcccacagataggtgaggtcatagtcatcgggtgatacttaatgagcccatgtttttctttcattggatgtaaactatgctcgatagtgacgagaggctgcgagactgtggaaatgaccctgaggaggaacgggctgggccagcttggcttccatgtgaattttgaaggaattgtcgcagatgtggaaccttttggctttgcctggaaggctggccttcgccaagggagccgcctcgtggagatctgcaaagtagccgtggccactctgacccacgagcagatgatcgacctgctccgtacttctgtgactgtgaaggtggtcatcatccagccccatgatgacggctcgccccgaagagggtgttcagagctctgccggatccctatggtggaatataaactcgacagcgagggcaccccctgcgagtataaaacccccttcaggaggaacaccacgtggcaccgggtgcccactcctgccctgcagcccctctctagagcttcccccatccccggcacgcccgaccggctgccgtgccaacagctgctccagcaggcccaggctgccattcctcgaagcacctccttcgaccggaagctgcccgatggcacgagaagctcacccagcaaccagtcatcctccagcgaccctggacccggcgggagcggaccctggagaccacaagtgggctacgacgggtgccagtcccctctactgctcgaacaccagggctcaggccctttggaatgtgacggagccagggagagggaagacaccatggaagcaagcaggcacccggaaaccaaatggcatggcccaccttccaaagtcctgggttcctataaagaaagagctctgcagaaagatggaagttgcaaagattcccccaataagctttctcacattggggataaaagttgctccagtcactccagcagcaacacgctctccagcaacacctccagcaacagtgacgacaagcactttgggtctggcgacctgatggaccccgaattactggggctgacctacatcaaaggggcctccaccgacagtggcatcgacacggccccctgcatgcctgccaccatcctcggccctgtgcacctggcaggcagcaggtccctgatccacagccgggccgagcagtgggctgatgctgccgacgtctctgggcctgacgacgagccagccaagttatattctgtgcatggctacgcgtccaccatctccgccggcagtgctgcggaaggcagcatgggcgatctcagtgagatatcctctcattccagtggttctcaccattcaggaagcccttcagctcactgttcaaaaagtagtgggtctctggattcatccaaagtctacatcgtgtctcacagcagcggacaacaggttcccgggtccatgtccaagccctaccacagacaaggggcagtgaacaaatatgtcatcggctggaagaaatcggagggcagcccaccgcccgaggagcctgaagtgactgaatgtcccgggatgtatagtgagatggatgtcatgtccacagcaactcagcatcagacagtggtgggagatgctgttgcagagactcaacatgttctgtctaaagaagattttctgaaattgatgcttcctgacagccccttagtggaggaggggcgaagaaagttttcgttctatgggaacctgtctccaaggaggtcgctttaccgcacgctgtctgacgagagcatctgcagcaacaggagggggtcctcctttggcagttcccggagttccgtgcttgaccaggccctgcccaacgacattctgttcagcaccaccccaccctaccacagcacgctgcctccgcgggcccaccccgcacccagcatggggagcctgagaaatgagttctggttctccgatgggtccttatcagataagtccaagtgcgcagatcctggcctgatgcccctcccggacacagccacagggttagattggacccacctcgtggatgctgcacgggcatttgaagaccagagggtggcatccttctgcaccctgacagatatgcagcatgggcaggacctggaaggggcccaagagctgcccttatgtgtagatccaggcagtggcaaagagttcatggacacaactggggagcgttctccatcaccactgaccgggaaagtcaatcagctggaattaattcttcgacaactccagaccgaccttcggaaggaaaaacaagacaaggccgttctccaagcagaagtgcagcacctgagacaggacaacatgagactgcaggaggagtcccagaccgcgacagctcagctgcggaaattcacagaatggtttttcaccaccatcgacaaaaaatcttagccaatccgcacctcatcaagggaccactgggaaatgccccttgtccctttgaagtcacaaacatgtggtttttctgtgtgctttcaaccaatcgtagatgtttttgctgttccattctgtgtagcaccattcaccacagcaggatagggagcctcgactctttctcggtaaccacggcagagagcagcgccgatgtgaagatgaatgaatgtaactcctggtgtgaagatgaatgtaaaccctggcgacagttgagacctttttcttttagactctgctaaaacagtgctctggcttgggcttacctcaagagggaagatagttgagttttatttcctgtatatcaggtgacctggtagagatgtaaagcaatttaccatagtttgggctttagtattgtaaaataaacatgagaac

SEQ ID NO: 341095 - DNA, 2337 bp, Artificial Sequence
  derived and/or modified sequence
atgagcccctgcttcagcttcatcggctgcaagctgtgcagcatcgtgaccagaggctgcgagaccgtggagatgaccctgagaagaaacggcctgggccagctgggcttccacgtgaacttcgagggcatcgtggccgacgtggagcccttcggcttcgcctggaaggccggcctgagacagggcagcagactggtggagatctgcaaggtggccgtggccaccctgacccacgagcagatgatcgacctgctgagaaccagcgtgaccgtgaaggtggtgatcatccagccccacgacgacggcagccccagaagaggctgcagcgagctgtgcagaatccccatggtggagtacaagctggacagcgagggcaccccctgcgagtacaagacccccttcagaagaaacaccacctggcacagagtgcccacccccgccctgcagcccctgagcagagccagccccatccccggcacccccgacagactgccctgccagcagctgctgcagcaggcccaggccgccatccccagaagcaccagcttcgacagaaagctgcccgacggcaccagaagcagccccagcaaccagagcagcagcagcgaccccggccccggcggcagcggcccctggagaccccaggtgggctacgacggctgccagagccccctgctgctggagcaccagggcagcggccccctggagtgcgacggcgccagagagagagaggacaccatggaggccagcagacaccccgagaccaagtggcacggcccccccagcaaggtgctgggcagctacaaggagagagccctgcagaaggacggcagctgcaaggacagccccaacaagctgagccacatcggcgacaagagctgcagcagccacagcagcagcaacaccctgagcagcaacaccagcagcaacagcgacgacaagcacttcggcagcggcgacctgatggaccccgagctgctgggcctgacctacatcaagggcgccagcaccgacagcggcatcgacaccgccccctgcatgcccgccaccatcctgggccccgtgcacctggccggcagcagaagcctgatccacagcagagccgagcagtgggccgacgccgccgacgtgagcggccccgacgacgagcccgccaagctgtacagcgtgcacggctacgccagcaccatcagcgccggcagcgccgccgagggcagcatgggcgacctgagcgagatcagcagccacagcagcggcagccaccacagcggcagccccagcgcccactgcagcaagagcagcggcagcctggacagcagcaaggtgtacatcgtgagccacagcagcggccagcaggtgcccggcagcatgagcaagccctaccacagacagggcgccgtgaacaagtacgtgatcggctggaagaagagcgagggcagccccccccccgaggagcccgaggtgaccgagtgccccggcatgtacagcgagatggacgtgatgagcaccgccacccagcaccagaccgtggtgggcgacgccgtggccgagacccagcacgtgctgagcaaggaggacttcctgaagctgatgctgcccgacagccccctggtggaggagggcagaagaaagttcagcttctacggcaacctgagccccagaagaagcctgtacagaaccctgagcgacgagagcatctgcagcaacagaagaggcagcagcttcggcagcagcagaagcagcgtgctggaccaggccctgcccaacgacatcctgttcagcaccacccccccctaccacagcaccctgccccccagagcccaccccgcccccagcatgggcagcctgagaaacgagttctggttcagcgacggcagcctgagcgacaagagcaagtgcgccgaccccggcctgatgcccctgcccgacaccgccaccggcctggactggacccacctggtggacgccgccagagccttcgaggaccagagagtggccagcttctgcaccctgaccgacatgcagcacggccaggacctggagggcgcccaggagctgcccctgtgcgtggaccccggcagcggcaaggagttcatggacaccaccggcgagagaagccccagccccctgaccggcaaggtgaaccagctggagctgatcctgagacagctgcagaccgacctgagaaaggagaagcaggacaaggccgtgctgcaggccgaggtgcagcacctgagacaggacaacatgagactgcaggaggagagccagaccgccaccgcccagctgagaaagttcaccgagtggttcttcaccaccatcgacaagaagagctag

SEQ ID NO: 341096 - DNA, 414 bp, Artificial Sequence
  derived and/or modified sequence
atgtggatccccgtggtgggcctgcccagaagactgagactgagcgccctggccggcgccggcagattctgcatcctgggcagcgaggccgccaccagaaagcacctgcccgccagaaaccactgcggcctgagcgacagcagcccccagctgtggcccgagcccgacttcagaaacccccccagaaaggccagcaaggccagcctggacttcaagagatacgtgaccgacagaagactggccgagaccctggcccagatctacctgggcaagcccagcagacccccccacctgctgctggagtgcaaccccggccccggcatcctgacccaggccctgctggaggccggcgccaaggtggtggccctggagagcgacaagaccttcatcccccacctggagaccagcctgtag

SEQ ID NO: 341097 - DNA, 414 bp, Artificial Sequence
  derived and/or modified sequence
atgtggatcccggtcgtgggcctgccaagacggctgcggctgtccgctctcgctggtgcagggagattttgcatactgggctctgaggcggcaacccggaagcacctgcctgcgagaaaccactgtggactctccgattccagtccccagttatggcctgaacccgacttccgaaatccgccccggaaggctagtaaagcaagcctggatttcaagcgttacgtcacagataggcgcctggccgaaacgctcgcccagatttacttgggaaaaccatcccgacccccacatttgttgctggaatgcaacccaggacctgggattttgacacaggctctgctcgaagctggagccaaagttgtcgctctagaatccgacaagacctttatcccgcacctggagacatccctgtag

SEQ ID NO: 341098 - DNA, 414 bp, Artificial Sequence
  derived and/or modified sequence
atgtggatccctgtggtgggcctgccccggcggctgcggctgagcgccctggccggggccggccgcttctgcatcctgggcagcgaggccgccaccaggaagcacctgcctgccaggaaccactgcggcctgagtgacagcagcccccagctgtggccagagccagacttcaggaacccccccaggaaggccagcaaggccagcctggacttcaagcgctacgtgacagaccggcggctggccgagaccctggcccagatctacctgggcaagcccagcaggcctccccacctgctgctggagtgcaaccctggccctggcatcctgacccaggccctgctggaggccggggccaaggtggtggccctggagagtgacaagaccttcatcccccacctggagaccagcctgtag

SEQ ID NO: 341099 - DNA, 414 bp, Artificial Sequence
  derived and/or modified sequence
atgtggatccccgtggtgggcctgccccggcggctgcggctgagcgcgttggctggagcagggcggttctgcatattaggttcagaagctgcgaccaggaagcaccttccggcacgcaaccattgtgggttatccgactcctctccccagttgtggcccgagcctgacttcagaaacccaccaagaaaagcaagtaaggcatcactggactttaagaggtacgttaccgataggaggctcgccgagacactggcacagatctatctcggtaaaccgtcccgcccccctcatctgctgcttgagtgcaacccaggccccgggattctcacccaggcacttctggaagctggcgcaaaagtggtggccctcgagtcagataaaaccttcattccacatctggaaacaagcttatag

SEQ ID NO: 341100 - DNA, 414 bp, Artificial Sequence
  derived and/or modified sequence
atgtggattcccgtcgtcgggctgcccagacggctcaggttatccgctcttgctggggcaggtcggttctgcattctcggtagtgaagcagcaacacgcaagcacctacccgcacggaatcactgtgggctgagtgactccagtccacagttgtggccagagcccgattttcggaacccacctagaaaggcatcgaaggcctccctcgacttcaaaagatacgtcactgacaggaggcttgctgaaacattggcgcagatctacttaggaaagcctagtcggcctccccacctgctcctcgagtgcaatccgggtccaggcattctaacccaggcactcctggaggccggtgcaaaggtggtggccctagagtcagacaaaaccttcattcctcatttggaaacatcactgtag

SEQ ID NO: 341101 - DNA, 827 bp, Artificial Sequence
  derived and/or modified sequence
agtgtttacttccgcttgacctggcccggacgccagaaaatgttccacgtgggataccctgcgtggggttcactgtagtagctgcactaggtgattcttggagcgggcctgagagacaaggacatgtggatcccagtggtcgggcttcctcggcggctgaggctctccgccttggcgggcgctggtcgcttttgcattttagggtctgaagcggcgacgcgaaagcatttgccggcgaggaaccactgtgggctctctgactcctctccgcagctgtggcccgaaccggatttcaggaatccgccaaggaaggcgtctaaggccagcttagactttaagcgttacgtaaccgatcggagattggctgagaccctggcgcaaatctatttgggaaaaccaagtagacctccacacctactgctggagtgcaatccaggtcctggaatcctgactcaggcattacttgaagctggtgccaaagtggttgcgctcgaaagtgacaaaacttttattccacatttggagacatccctttaaaagtagttggaatgttcccaagtagaggtgagaaaagggcactttggaaactcgcatatgacttgtattcctgtacttctatatataaatttggacgaatagaagtaaatatgtttattggtgaaaaagaattccagaaactaatggcagatcccggaaatccagacttgtatcatgtattaagtgttatctggcaattagcttgtgagattaaggttctgcacatggagccttggtcatcatttgatatatacacccggaaagggccgctggaaaacccaaagcgtagg

SEQ ID NO: 341102 - DNA, 507 bp, Artificial Sequence
  derived and/or modified sequence
atgttttggaagctcagcttgtctttgttcctggtggccgtgctggtgaaggttgccgaggcacgcaagaaccgcccggctggtgcgattcctagtccttataaagacgggtcatcaaacaattcagagagatggcagcaccagatcaaggaggtgcttgctagttcccaggaagccctggtggtgaccgagaggaaatacctaaaaagcgactggtgcaagacccagcccctgaggcagacggtatcggaagagggatgtcggtctcgcactattttgaatagattctgctatggacagtgcaactctttctatatcccccgtcatgtgaagaaagaggaggaaagtttccagagctgtgccttctgtaagccccagagggtgacgagcgtcctggtggaactagagtgtccaggcttagaccctccttttcgattgaagaaaatacaaaaagttaagcagtgccgctgtatgagcgtaaatttatccgatagcgacaagcaatag

SEQ ID NO: 341103 - DNA, 507 bp, Artificial Sequence
  derived and/or modified sequence
atgttctggaagctgagcctgagcctcttcctggtggccgtgctggtgaaggtggccgaggccaggaagaacagacctgctggggccatccccagcccctacaaggatggcagcagcaacaacagcgagcgctggcagcaccagatcaaggaggtgctggccagcagccaggaggccctggtggtgacagagaggaagtacctgaagagtgactggtgcaagacccagcccctgcggcagacagtgtctgaggagggctgccgcagcaggaccatcctgaaccgcttctgctacggccagtgcaacagcttctacatccccaggcatgtgaagaaggaggaggagagcttccagagctgtgccttctgcaagccccagagggtgacctctgtgctggtggagctggagtgccccggcctggacccccccttccggctgaagaagatccagaaggtgaagcagtgccgctgcatgtctgtgaacctgagtgacagcgacaagcagtag

SEQ ID NO: 341104 - DNA, 507 bp, Artificial Sequence
  derived and/or modified sequence
atgttctggaagctgagcctgagcctgttcctggtggccgtgctggttaaggtcgcagaagcgagaaagaataggcccgctggagccatcccgtccccttataaagacggctcttcaaacaattccgaaagatggcagcaccagatcaaagaggtcctggcctccagccaggaggccttggtcgtcacagagcgtaagtacctgaagtccgattggtgtaagacccagcctttgcggcagacggttagcgaagagggttgcagatccagaaccattctcaatagattttgctatgggcagtgtaattccttttacatcccccgtcatgttaagaaggaggaggaatcatttcagagctgcgccttttgtaagccccagcgggttaccagtgttctggtcgaattggagtgtccagggttggatccccccttccggcttaaaaaaatccaaaaagttaaacagtgccggtgtatgtcggttaacctgagtgattcagataagcagtag

SEQ ID NO: 341105 - DNA, 507 bp, Artificial Sequence
  derived and/or modified sequence
atgttctggaagttgagtttgtcccttttcctggtagcagtgcttgtgaaagtcgccgaggccagaaaaaatagacctgcaggagctattccaagtccttataaagatggaagctctaacaactctgagcggtggcagcatcagatcaaagaagttcttgcatcaagccaggaggccctggtagtcaccgaacgcaaatatctgaagagcgattggtgcaaaacccaacccctcaggcaaacggtctctgaagaagggtgccggtcccggacgatactgaaccggttttgttatggtcagtgtaactccttttacataccaaggcacgtgaagaaggaagaagagtcctttcagtcatgtgcattctgtaaacctcagagggttaccagtgtgctggtggagttggagtgtcctggcctcgatccaccattccgcctcaagaaaatccagaaggtgaaacaatgtcggtgtatgagcgtcaacttatccgattctgataagcagtag

SEQ ID NO: 341106 - DNA, 507 bp, Artificial Sequence
  derived and/or modified sequence
atgttctggaagctgagcctgagcctgttcctggtggccgtgctggtgaaggtggccgaggccagaaagaacagacccgccggcgccatccccagcccctacaaggacggcagcagcaacaacagcgagagatggcagcaccagatcaaggaggtgctggccagcagccaggaggccctggtggtgaccgagagaaagtacctgaagagcgactggtgcaagacccagcccctgagacagaccgtgagcgaggagggctgcagaagcagaaccatcctgaacagattctgctacggccagtgcaacagcttctacatccccagacacgtgaagaaggaggaggagagcttccagagctgcgccttctgcaagccccagagagtgaccagcgtgctggtggagctggagtgccccggcctggacccccccttcagactgaagaagatccagaaggtgaagcagtgcagatgcatgagcgtgaacctgagcgacagcgacaagcagtag

SEQ ID NO: 341107 - protein, 131 aa, Artificial Sequence
  derived and/or modified sequence
MRCSQCRVAKYCSAKCQKKAWPDHKRECKCLKSCKPRYPPDSVRLLGRVVFKLMDGAPSESEKLYSFYDLESNINKLTEDKKEGLRQLVMTFQHFMREEIQDASQLPPAFDLFEAFAKVICNSFTICNAEM

SEQ ID NO: 341108 - protein, 74 aa, Artificial Sequence
  derived and/or modified sequence
MRCSQCRVAKYCSAKCQKKAWPDHKRECKCLKSCKPRYPPDSVRLLGRVVFKLMDGAPSESEKLYSFYDLESNI

SEQ ID NO: 341109 - DNA, 562 bp, Artificial Sequence
  derived and/or modified sequence
ggtcctgcctcttccccgccatcttctgtcagacaaaaggacttagtttttctatcagtgtctcacatggaaggttcaagaggaggctcatcagtgtgaaaatccaaatcttaagggactgtacataatggagtaaacagaacatacgggtgtccgaaggaaaagctgatgcgatgctctcagtgccgcgtcgccaaatactgtagtgctaagtgtcagaaaaaagcttggccagaccacaagcgggaatgcaaatgccttaaaagctgcaaacccagatatcctccagactccgttcgacttcttggcagagttgtcttcaaacttatggatggagcaccttcagaatcagagaagctttactcattttatgatctggagtcaaatattaacaaactgactgaagataagaaagagggcctcaggcaactcgtaatgacatttcaacatttcatgagagaagaaatacaggatgcctctcagctgccacctgcctttgacctttttgaagcctttgcaaaagtgatctgcaactctttcaccatctgtaatgcggagatgc

SEQ ID NO: 341110 - DNA, 566 bp, Artificial Sequence
  derived and/or modified sequence
agaggagaaagaatgtgaatgctcattgctggtcatttttttttcctgtgctatgccatcttaattgttcatagctcttctcttttaagaaagcttatgtgagagccacaattgtatcagagaacattattacataattatacagccttccctttcccttaaatggtcctttaaggctttacatctgcaatagagatagcttagtgaatattcttccaaataagtttttttagtttcatttttagattagccttttgtatttgcgtaaaacagtgcttttggtaaatgttgtgtatttaaggggaagaacaggatacttctgggggctgaggaaggaaaagctgatgcgatgctctcagtgccgcgtcgccaaatactgtagtgctaagtgtcagaaaaaagcttggccagaccacaagcgggaatgcaaatgccttaaaagctgcaaacccagatatcctccagactccgttcgacttcttggcagagttgtcttcaaacttatggatggagcaccttcagaatcagagaagctttactcattttatgatctggagtcaaatatt

SEQ ID NO: 341111 - DNA, 732 bp, Artificial Sequence
  derived and/or modified sequence
ggcggaggccgtccctgaggaagtaggagaagaccactagggctgtgtctaagtcacagcgaaaagttgttccgtgagacctcttgcataatgactctaaggggcttcagagacattctcctgcgaggtaactgtgcctgtgatgtggggagagtgtgagactgggaagcagaagaccggaatgtgatacagcctttcccacgacttggctgaggaactgctgttgtgaaccttttgccctggtgggattattgtgatctgcaactctttcaccatctgtaatgcggagatgcaggaagttggtgttggcctatatcccagtatctctttgctcaatcacagctgtgaccccaactgttcgattgtgttcaatgggccccacctcttactgcgagcagtccgagacatcgaggtgggagaggagctcaccatctgctacctggatatgctgatgaccagtgaggagcgccggaagcagctgagggaccagtactgctttgaatgtgactgtttccgttgccaaacccaggacaaggatgctgatatgctaactggtgatgagcaagtatggaaggaagttcaagaatccctgaaaaaaattgaagaactgaaggcacactggaagtgggagcaggttctggccatgtgccaggcaatcataagcagcaattctgaacggcttcccgatatcaacatctaccagctgaaggtgctcgactgcgccatggatgc

SEQ ID NO: 341112 - protein, 258 aa, Artificial Sequence
  derived and/or modified sequence
MEEDRDKVICNSFTICNAEMQEVGVGLYPSISLLNHSCDPNCSIVFNGPHLLLRAVRDIEVGEELTICYLDMLMTSEERRKQLRDQYCFECDCFRCQTQDKDADMLTGDEQVWKEVQESLKKIEELKAHWKWEQVLAMCQAIISSNSERLPDINIYQLKVLDCAMDACINLGLLEEALFYGTRTMEPYRIFFPGSHPVRGVQVMKVGKLQLHQGMFPQAMKNLRLAFDIMRVTHGREHSLIEDLILLLEECDANIRAS

SEQ ID NO: 341113 - DNA, 777 bp, Artificial Sequence
  derived and/or modified sequence
atggaggaggacagagacaaggtgatctgcaacagcttcaccatctgcaacgccgagatgcaggaggtgggcgtgggcctgtaccccagcatcagcctgctgaaccacagctgcgaccccaactgcagcatcgtgttcaacggcccccacctgctgctgagagccgtgagagacatcgaggtgggcgaggagctgaccatctgctacctggacatgctgatgaccagcgaggagagaagaaagcagctgagagaccagtactgcttcgagtgcgactgcttcagatgccagacccaggacaaggacgccgacatgctgaccggcgacgagcaggtgtggaaggaggtgcaggagagcctgaagaagatcgaggagctgaaggcccactggaagtgggagcaggtgctggccatgtgccaggccatcatcagcagcaacagcgagagactgcccgacatcaacatctaccagctgaaggtgctggactgcgccatggacgcctgcatcaacctgggcctgctggaggaggccctgttctacggcaccagaaccatggagccctacagaatcttcttccccggcagccaccccgtgagaggcgtgcaggtgatgaaggtgggcaagctgcagctgcaccagggcatgttcccccaggccatgaagaacctgagactggccttcgacatcatgagagtgacccacggcagagagcacagcctgatcgaggacctgatcctgctgctggaggagtgcgacgccaacatcagagccagctag

SEQ ID NO: 341114 - DNA, 777 bp, Artificial Sequence
  derived and/or modified sequence
atggaggaggacagagacaaggtcatttgcaacagtttcactatttgtaatgctgaaatgcaggaagtgggggttggcctgtatccttcgatctctctattgaaccattcttgcgatccaaattgcagtatcgtgttcaatggccctcacctcctgcttagggccgtgagggatatcgaggtgggggaggagctgacaatttgctatctcgacatgctcatgacgtctgaggagaggcgcaaacaactcagagaccagtactgcttcgagtgtgactgcttcaggtgccaaacgcaggacaaagacgcagacatgctcaccggtgacgaacaagtgtggaaggaagtccaggaatccctcaagaaaatcgaggaactgaaggcccactggaagtgggagcaggttctagctatgtgtcaggcgattatctccagcaacagtgagcggctgcccgatataaacatttaccaactgaaggtcctcgactgcgcaatggacgcatgcatcaacctcggtttgcttgaagaagcactcttctacggcaccaggactatggaaccataccgcatcttttttcccggtagtcaccccgttcgaggcgtccaggttatgaaagtaggaaaactgcaactgcatcagggtatgttcccacaggcgatgaagaaccttcgtcttgcttttgacataatgcgtgtcacacacggccgggagcattccctgatcgaggacctgatcctgctgctcgaggaatgtgatgccaatatacgagcatcttag

SEQ ID NO: 341115 - DNA, 777 bp, Artificial Sequence
  derived and/or modified sequence
atggaggaggaccgggacaaggtgatctgcaacagcttcaccatctgcaatgctgagatgcaggaggtgggcgtgggcctgtaccccagcatcagcctgctgaaccacagctgtgaccccaactgcagcatcgtgttcaacggcccccacctgctgctgcgggctgtgcgggacatcgaggtgggggaggagctgaccatctgctacctggacatgctgatgaccagcgaggagaggaggaagcagctgcgggaccagtactgctttgaatgtgactgcttccgctgccagacccaggacaaggatgctgacatgctgactggagatgagcaggtgtggaaggaggtgcaggagagcctgaagaagattgaggagctgaaggcccactggaagtgggagcaggtgctggccatgtgccaggccatcatcagcagcaacagcgagcggctgcctgacatcaacatctaccagctgaaggtgctggactgtgccatggatgcctgcatcaacctgggcctgctggaggaggccctcttctacggcaccaggaccatggagccctaccgcatcttcttccctggcagccaccctgtgcggggcgtgcaggtgatgaaggtgggcaagctgcagctgcaccagggcatgttcccccaggccatgaagaacctgcggctggcctttgacatcatgagggtgacccacggccgggagcacagcctgattgaggacctgatcctgctgctggaggagtgtgatgccaacatccgggccagctag

SEQ ID NO: 341116 - DNA, 777 bp, Artificial Sequence
  derived and/or modified sequence
atggaggaggaccgggacaaggtgatctgcaacagcttcaccatctgtaatgccgaaatgcaagaagtgggtgtcggcctgtacccatcaatctctctcctgaaccattcttgtgaccccaactgctccatcgtgtttaacggcccccacttattgttaagggcggtgagggatattgaggttggcgaggagctgacaatctgctacctcgatatgctgatgacaagtgaggaacgcagaaagcagctaagagatcagtactgtttcgagtgcgactgctttcgttgtcaaacacaagataaagacgctgatatgctgactggcgatgagcaggtgtggaaggaagtgcaggaatccctcaaaaaaatagaggagcttaaagcccattggaagtgggagcaagttttagccatgtgccaagcaatcatcagtagcaattctgaacgactccctgatataaatatttatcagcttaaagtgttggattgcgctatggatgcctgtattaacctaggcctgctagaggaggcactgttttacggtaccagaacaatggaaccctatagaatatttttccctggctcccaccccgtgcgcggggtccaggtaatgaaggtggggaaattgcagcttcaccaagggatgttcccacaggccatgaagaatcttcggctggcttttgatataatgcgcgtgacacacggccgcgaacacagcctgatcgaagatctgatattgctactagaggagtgtgacgctaacatcagggcgagttag

SEQ ID NO: 341117 - DNA, 777 bp, Artificial Sequence
  derived and/or modified sequence
atggaggaagatagggacaaagtcatttgtaatagcttcactatttgtaatgctgagatgcaagaagtgggcgtggggctgtatcccagcatctcacttctgaatcatagctgcgaccccaattgtagcattgtgttcaatggacctcacctgctgctcagggctgtgagggacatcgaagtgggcgaagaacttacgatctgttacctcgatatgctcatgacctcagaggaaagaaggaaacagctgcgcgaccaatactgtttcgagtgtgattgttttaggtgccagacccaagataaagatgctgacatgttaaccggggatgaacaggtgtggaaagaagtgcaggagagcttgaagaaaattgaggaactcaaggcacactggaaatgggaacaggtactcgccatgtgccaggccataattagctctaacagtgaaagactgcctgacatcaacatttaccagctcaaggttttggattgtgcaatggatgcttgcatcaacctgggactcctcgaagaggccctgttttatgggactagaacaatggagccctaccggatattttttccgggatcccaccctgtcaggggcgtgcaggtcatgaaggtcgggaaactgcagctgcatcaaggcatgttcccacaggccatgaaaaacctgcggctggccttcgacattatgcgggtaacccacgggagagaacatagcctgattgaagaccttattctcttactcgaagagtgtgatgcaaatatacgcgcatcttag

SEQ ID NO: 341118 - DNA, 997 bp, Artificial Sequence
  derived and/or modified sequence
atggaggaggaccgggataaagtgatctgcaactctttcaccatctgtaatgcggagatgcaggaagttggtgttggcctatatcccagtatctctttgctcaatcacagctgtgaccccaactgttcgattgtgttcaatgggccccacctcttactgcgagcagtccgagacatcgaggtgggagaggagctcaccatctgctacctggatatgctgatgaccagtgaggagcgccggaagcagctgagggaccagtactgctttgaatgtgactgtttccgttgccaaacccaggacaaggatgctgatatgctaactggtgatgagcaagtatggaaggaagttcaagaatccctgaaaaaaattgaagaactgaaggcacactggaagtgggagcaggttctggccatgtgccaggcaatcataagcagcaattctgaacggcttcccgatatcaacatctaccagctgaaggtgctcgactgcgccatggatgcctgcatcaacctcggcctgttggaggaagccttgttctatggtactcggaccatggagccatacaggatttttttcccaggaagccatcccgtcagaggggttcaagtgatgaaagttggcaaactgcagctacatcaaggcatgtttccccaagcaatgaagaatctgagactggcttttgatattatgagagtgacacatggcagagaacacagcctgattgaagatttgattctacttttagaagaatgcgacgccaacatcagagcatcctaagggaacgcagtcagagggaaatacggcgtgtgtctttgttgaatgccttattgaggtcacacactctatgctttgttagctgtgtgaacctctcctattggaaattctgttccgtgtttgtgtaggtaaataaaggcagacatggtttgcaaaccacaagaatcattagttgtagagaagcacgattataataaattcaaaacatttggttgaggatgcc

SEQ ID NO: 341119 - DNA, 447 bp, Artificial Sequence
  derived and/or modified sequence
atgcaggaggtgggcgtgggcctgtaccccagcatcagcctgctgaaccacagctgcgaccccaactgcagcatcgtgttcaacggcccccacctgctgctgagagccgtgagagacatcgaggtgggcgaggagctgaccatctgctacctggacatgctgatgaccagcgaggagagaagaaagcagctgagagaccagtactgcttcgagtgcgactgcttcagatgccagacccaggacaaggacgccgacatgctgaccggcgacgagcaggtgtggaaggaggtgcaggagagcctgaagaagatcgaggagctgaaggcccactggaagtgggagcaggtgctggccatgtgccaggccatcatcagcagcaacagcgagagactgcccgacatcaacatctaccagctgaaggtgctggactgcgccatggacgcctag

SEQ ID NO: 341120 - DNA, 447 bp, Artificial Sequence
  derived and/or modified sequence
atgcaggaggtaggcgttgggctgtatccctccatatcactgttaaaccactcctgcgacccaaactgttcaatcgtttttaacggcccccatctgctgctccgagcagtccgagatatcgaggtcggcgaggagttgacaatatgctacctcgatatgctgatgactagcgaggaaagaagaaaacagctgcgcgatcagtactgttttgagtgtgactgttttcgctgtcagactcaggacaaagacgccgatatgctgactggagatgagcaagtgtggaaggaagtccaggagagtctaaaaaagattgaagagttgaaggcacattggaagtgggagcaggtgttagccatgtgtcaggcaattatttcttctaactccgagagactgcctgatattaatatataccagcttaaggttttagattgcgctatggacgcttag

SEQ ID NO: 341121 - DNA, 447 bp, Artificial Sequence
  derived and/or modified sequence
atgcaggaggtgggcgtgggcctgtaccccagcatcagcctgctgaaccacagctgtgaccccaactgcagcatcgtgttcaacggcccccacctgctgctgcgggctgtgcgggacatcgaggtgggggaggagctgaccatctgctacctggacatgctgatgaccagcgaggagaggaggaagcagctgcgggaccagtactgctttgaatgtgactgcttccgctgccagacccaggacaaggatgctgacatgctgactggagatgagcaggtgtggaaggaggtgcaggagagcctgaagaagattgaggagctgaaggcccactggaagtgggagcaggtgctggccatgtgccaggccatcatcagcagcaacagcgagcggctgcctgacatcaacatctaccagctgaaggtgctggactgtgccatggatgcctag

SEQ ID NO: 341122 - DNA, 447 bp, Artificial Sequence
  derived and/or modified sequence
atgcaggaggtgggcgtgggcctgtaccccagcatcagcctgctgaatcattcctgtgaccctaattgtagtatcgtgttcaatggaccgcatctgctcctcagggcggttagagatatcgaggtgggcgaggagctcactatatgttatctggacatgttaatgacatccgaggaacggagaaagcagctcagggaccaatactgctttgagtgcgactgcttccggtgccaaactcaggataaagatgcagatatgctgacgggcgacgagcaggtctggaaggaagtgcaagagtctctaaaaaagatcgaagaactcaaggcgcattggaagtgggagcaggttctggccatgtgtcaagccattatcagctctaactccgagaggctccccgacatcaacatctaccagcttaaggttctggattgcgctatggatgcatag

SEQ ID NO: 341123 - DNA, 447 bp, Artificial Sequence
  derived and/or modified sequence
atgcaggaagtcggagtcggcttgtacccctcaatctctctgctgaaccactcttgcgaccccaattgttccatcgtgttcaatggtccgcatctcctgttgcgggcagtcagagatattgaagtgggagaggagctgactatttgctacttggatatgctgatgaccagtgaggagagacgaaaacaactcagggaccaatattgcttcgaatgcgactgcttccggtgtcagacgcaggataaggacgccgatatgttgaccggggacgagcaggtgtggaaggaggtgcaggagagcttgaagaagatcgaggagttaaaagcccactggaaatgggaacaggtcctcgcaatgtgccaggccatcatctcatctaactccgaaagactgcccgacataaacatttaccagcttaaggtcctggactgtgccatggatgcttag

SEQ ID NO: 341124 - protein, 1005 aa, Artificial Sequence
  derived and/or modified sequence
MDLTLAELQEMASRQQQQIEAQQQLLATKEQRLKFLKQQDQRQQQQVAEQEKLKRLKEIAENQEAKLKKVRALKGHVEQKRLSNGKLVEEIEQMNNLFQQKQRELVLAVSKVEELTRQLEMLKNGRIDSHHDNQSAVAELDRLYKELQLRNKLNQEQNAKLQQQRECLNKRNSEVAVMDKRVNELRDRLWKKKAALQQKENLPVSSDGNLPQQAASAPSRVAAVGPYIQSSTMPRMPSRPELLVKPALPDGSLVIQASEGPMKIQTLPNMRSGAASQTKGSKIHPVGPDWSPSNADLFPSQGSASVPQSTGNALDQVDDGEVPLREKEKKVRPFSMFDAVDQSNAPPSFGTLRKNQSSEDILRDAQVANKNVAKVPPPVPTKPKQINLPYFGQTNQPPSDIKPDGSSQQLSTVVPSMGTKPKPAGQQPRVLLSPSIPSVGQDQTLSPGSKQESPPAAAVRPFTPQPSKDTLLPPFRKPQTVAASSIYSMYTQQQAPGKNFQQAVQSALTKTHTRGPHFSSVYGKPVIAAAQNQQQHPENIYSNSQGKPGSPEPETEPVSSVQENHENERIPRPLSPTKLLPFLSNPYRNQSDADLEALRKKLSNAPRPLKKRSSITEPEGPNGPNIQKLLYQRTTIAAMETISVPSYPSKSASVTASSESPVEIQNPYLHVEPEKEVVSLVPESLSPEDVGNASTENSDMPAPSPGLDYEPEGVPDNSPNLQNNPEEPNPEAPHVLDVYLEEYPPYPPPPYPSGEPEGPGEDSVSMRPPEITGQVSLPPGKRTNLRKTGSERIAHGMRVKFNPLALLLDSSLEGEFDLVQRIIYEVDDPSLPNDEGITALHNAVCAGHTEIVKFLVQFGVNVNAADSDGWTPLHCAASCNNVQVCKFLVESGAAVFAMTYSDMQTAADKCEEMEEGYTQCSQFLYGVQEKMGIMNKGVIYALWDYEPQNDDELPMKEGDCMTIIHREDEDEIEWWWARLNDKEGYVPRNLLGLYPRIKPRQRSLA

SEQ ID NO: 341125 - protein, 367 aa, Artificial Sequence
  derived and/or modified sequence
METISVPSYPSKSASVTASSESPVEIQNPYLHVEPEKEVVSLVPESLSPEDVGNASTENSDMPAPSPGLDYEPEGVPDNSPNLQNNPEEPNPEAPHVLDVYLEEYPPYPPPPYPSGEPEGPGEDSVSMRPPEITGQVSLPPGKRTNLRKTGSERIAHGMRVKFNPLALLLDSSLEGEFDLVQRIIYEVDDPSLPNDEGITALHNAVCAGHTEIVKFLVQFGVNVNAADSDGWTPLHCAASCNNVQVCKFLVESGAAVFAMTYSDMQTAADKCEEMEEGYTQCSQFLYGVQEKMGIMNKGVIYALWDYEPQNDDELPMKEGDCMTIIHREDEDEIEWWWARLNDKEGYVPRNLLGLYPRIKPRQRSLA

SEQ ID NO: 341126 - DNA, 3018 bp, Artificial Sequence
  derived and/or modified sequence
atggacctgaccctggccgagctgcaggagatggccagcagacagcagcagcagatcgaggcccagcagcagctgctggccaccaaggagcagagactgaagttcctgaagcagcaggaccagagacagcagcagcaggtggccgagcaggagaagctgaagagactgaaggagatcgccgagaaccaggaggccaagctgaagaaggtgagagccctgaagggccacgtggagcagaagagactgagcaacggcaagctggtggaggagatcgagcagatgaacaacctgttccagcagaagcagagagagctggtgctggccgtgagcaaggtggaggagctgaccagacagctggagatgctgaagaacggcagaatcgacagccaccacgacaaccagagcgccgtggccgagctggacagactgtacaaggagctgcagctgagaaacaagctgaaccaggagcagaacgccaagctgcagcagcagagagagtgcctgaacaagagaaacagcgaggtggccgtgatggacaagagagtgaacgagctgagagacagactgtggaagaagaaggccgccctgcagcagaaggagaacctgcccgtgagcagcgacggcaacctgccccagcaggccgccagcgcccccagcagagtggccgccgtgggcccctacatccagagcagcaccatgcccagaatgcccagcagacccgagctgctggtgaagcccgccctgcccgacggcagcctggtgatccaggccagcgagggccccatgaagatccagaccctgcccaacatgagaagcggcgccgccagccagaccaagggcagcaagatccaccccgtgggccccgactggagccccagcaacgccgacctgttccccagccagggcagcgccagcgtgccccagagcaccggcaacgccctggaccaggtggacgacggcgaggtgcccctgagagagaaggagaagaaggtgagacccttcagcatgttcgacgccgtggaccagagcaacgccccccccagcttcggcaccctgagaaagaaccagagcagcgaggacatcctgagagacgcccaggtggccaacaagaacgtggccaaggtgcccccccccgtgcccaccaagcccaagcagatcaacctgccctacttcggccagaccaaccagccccccagcgacatcaagcccgacggcagcagccagcagctgagcaccgtggtgcccagcatgggcaccaagcccaagcccgccggccagcagcccagagtgctgctgagccccagcatccccagcgtgggccaggaccagaccctgagccccggcagcaagcaggagagcccccccgccgccgccgtgagacccttcaccccccagcccagcaaggacaccctgctgccccccttcagaaagccccagaccgtggccgccagcagcatctacagcatgtacacccagcagcaggcccccggcaagaacttccagcaggccgtgcagagcgccctgaccaagacccacaccagaggcccccacttcagcagcgtgtacggcaagcccgtgatcgccgccgcccagaaccagcagcagcaccccgagaacatctacagcaacagccagggcaagcccggcagccccgagcccgagaccgagcccgtgagcagcgtgcaggagaaccacgagaacgagagaatccccagacccctgagccccaccaagctgctgcccttcctgagcaacccctacagaaaccagagcgacgccgacctggaggccctgagaaagaagctgagcaacgcccccagacccctgaagaagagaagcagcatcaccgagcccgagggccccaacggccccaacatccagaagctgctgtaccagagaaccaccatcgccgccatggagaccatcagcgtgcccagctaccccagcaagagcgccagcgtgaccgccagcagcgagagccccgtggagatccagaacccctacctgcacgtggagcccgagaaggaggtggtgagcctggtgcccgagagcctgagccccgaggacgtgggcaacgccagcaccgagaacagcgacatgcccgcccccagccccggcctggactacgagcccgagggcgtgcccgacaacagccccaacctgcagaacaaccccgaggagcccaaccccgaggccccccacgtgctggacgtgtacctggaggagtaccccccctaccccccccccccctaccccagcggcgagcccgagggccccggcgaggacagcgtgagcatgagaccccccgagatcaccggccaggtgagcctgccccccggcaagagaaccaacctgagaaagaccggcagcgagagaatcgcccacggcatgagagtgaagttcaaccccctggccctgctgctggacagcagcctggagggcgagttcgacctggtgcagagaatcatctacgaggtggacgaccccagcctgcccaacgacgagggcatcaccgccctgcacaacgccgtgtgcgccggccacaccgagatcgtgaagttcctggtgcagttcggcgtgaacgtgaacgccgccgacagcgacggctggacccccctgcactgcgccgccagctgcaacaacgtgcaggtgtgcaagttcctggtggagagcggcgccgccgtgttcgccatgacctacagcgacatgcagaccgccgccgacaagtgcgaggagatggaggagggctacacccagtgcagccagttcctgtacggcgtgcaggagaagatgggcatcatgaacaagggcgtgatctacgccctgtgggactacgagccccagaacgacgacgagctgcccatgaaggagggcgactgcatgaccatcatccacagagaggacgaggacgagatcgagtggtggtgggccagactgaacgacaaggagggctacgtgcccagaaacctgctgggcctgtaccccagaatcaagcccagacagagaagcctggcctag

SEQ ID NO: 341127 - DNA, 3018 bp, Artificial Sequence
  derived and/or modified sequence
atggacttgacgctggccgagctgcaggagatggcaagcagacagcagcaacagatagaagcccagcagcagctgctggccactaaggagcaacgtttgaaatttttaaaacagcaggatcaacggcagcagcagcaggttgcagagcaagaaaagctcaaacgcctaaaggagatcgccgagaatcaggaggccaaacttaaaaaggtgcgtgcactgaagggacatgtggagcagaagagactaagcaatggcaagctcgtcgaagaaattgagcagatgaacaacttattccagcagaagcaaagggagctggtactcgcggtgagcaaagttgaggagctaacacgccagctcgaaatgcttaaaaatggtcggatcgactcccaccatgacaatcaatctgctgtggctgagctggaccggctgtataaggagctccaactgaggaataaacttaaccaggagcagaatgcaaaactgcagcagcaacgggaatgcctgaacaaacggaacagcgaggtcgccgtgatggacaaacgggtgaacgagctcagggatcgcctgtggaaaaagaaagctgctctgcagcaaaaagaaaacctcccggtgagttcggacggcaacctgccacagcaagccgcaagcgctcccagtcgggtggcagccgtcggaccctatatacagtctagcaccatgccacgcatgccatcccgcccagagctgctggtcaagcctgctcttccggatggctctttggtgattcaggcatctgagggtccaatgaagatacagaccttaccaaatatgaggtccggagctgcttcgcaaaccaagggttctaagatccaccccgtaggtccagactggtccccctctaacgccgatctctttccaagccaaggatcagcgtccgtgccccaaagcaccggaaacgccctggaccaggtggacgatggggaggttcccctcagagaaaaggagaaaaaagtgcggcctttcagcatgtttgacgccgtggaccaaagcaatgcccccccatcctttgggactcttcgcaaaaaccagtcaagtgaggatattctacgcgatgcacaggtagctaacaagaacgtggccaaggtcccaccaccagtcccgactaagcccaaacagattaacctgccctattttggccagacaaaccagcccccatccgatatcaagcccgacggctcctcacagcaactcagcacagtcgtgccttccatgggaactaaacccaagccggccggacagcaaccccgtgtgctgctatcgccttcaattccaagcgtggggcaggatcagaccctatcaccgggctccaagcaggagagtccaccggcagcggcggttcgtccgttcaccccacaaccctccaaagacacactcctgcccccttttcggaaaccccagacggtcgctgccagcagcatttattcaatgtatacacagcaacaagccccaggcaagaactttcaacaggccgtccagtccgcccttacaaaaacgcatacaagaggcccccactttagctccgtgtatgggaaacctgttattgctgctgcccagaaccagcaacagcatcccgaaaatatttattcgaattcacagggaaagcccggatccccggagccggagacagaacctgtgtcctctgtgcaggaaaatcatgagaacgagaggataccccgaccactctctccaaccaagttactgccctttctttctaacccatacagaaatcagtcggatgcagacctggaagctcttagaaaaaaactgtcgaatgccccacgccccttgaagaagaggtccagtattacagaacccgaagggccgaatggaccgaacattcagaaactgttatatcagaggacaactattgcagccatggagacaatctctgtgccctcatacccttccaagtctgctagcgttacagcaagctccgaatctccggtggagatccagaacccctacctccacgtcgagcctgagaaggaagtggtcagcctggtgcccgagagcctgagtcccgaggacgtaggtaatgcaagcacagagaattccgatatgcctgcacctagccccggcctggactacgagcctgagggggtccccgacaattctcccaatctccagaacaatccagaggaacctaaccctgaggcaccacacgtcctcgacgtgtacctggaagaatacccaccctacccacctcccccctatccctccggcgagcccgagggccccggggaggatagtgtcagcatgcgccctcctgagataaccggtcaggttagtctgccaccgggcaaacggacaaatctgcgcaagacagggagcgaacgcatagcccatggaatgcgggtgaagttcaaccccttggcactcctactcgattccagcctggaaggcgaatttgacctagtccagagaataatctatgaagtggacgaccccagtctcccaaacgatgaggggattacagctttacacaacgctgtatgcgctggacataccgagatcgtgaagtttttagtccaattcggggtgaatgtgaacgcggccgacagcgatggatggactcccctgcactgcgcggcctcttgtaacaacgtccaggtgtgcaaatttttggtcgagagcggcgccgccgtctttgcaatgacttactcagatatgcagacggcagccgacaaatgtgaagagatggaagaggggtacacacaatgctcacagttcctttatggcgtgcaagagaaaatggggattatgaataagggggtgatctatgccctgtgggactacgaacctcagaatgacgacgagctcccaatgaaggaaggcgattgtatgaccatcatacatcgtgaggacgaagacgaaatcgaatggtggtgggccaggctgaacgataaggagggatacgtgccacgcaatctcctggggctttaccctaggataaaaccgagacagcgtagtttagcctag

SEQ ID NO: 341128 - DNA, 3018 bp, Artificial Sequence
  derived and/or modified sequence
atggacctgaccctggccgagctgcaggagatggccagccggcagcagcagcagatcgaggcccagcagcagctgctggccaccaaggagcagaggctgaagttcctgaagcagcaggaccagaggcagcagcagcaggtggccgagcaggagaagctgaagaggctgaaggagattgctgagaaccaggaggccaagctgaagaaggtgcgggccctgaagggccacgtggagcagaagaggctgagcaatggcaagctggtggaggagattgagcagatgaacaacctcttccagcagaagcagcgggagctggtgctggccgtgtccaaggtggaggagctgacccggcagctggagatgctgaagaatggaagaattgacagccaccacgacaaccagagcgctgtggccgagctggaccggctgtacaaggagctgcagctgaggaacaagctgaaccaggagcagaatgccaagctgcagcagcagcgggagtgcctgaacaagagaaattctgaggtggccgtgatggacaagagggtgaatgagctgcgggaccggctgtggaagaagaaggccgccctgcagcagaaggagaacctgcctgtgtccagtgatggcaacctgccccagcaggccgccagcgcccccagccgggtggccgctgtgggcccctacatccagagcagcaccatgcccaggatgcccagcaggcctgagctgctggtgaagccagccctgcctgatggcagcctggtgatccaggccagcgagggccccatgaagatccagaccctgcccaacatgaggtctggggccgccagccagaccaagggcagcaagatccaccctgtgggccctgactggagccccagcaatgctgacctcttccccagccagggcagcgcctctgtgccccagagcactggaaatgccctggaccaggtggatgatggagaggtgcccctgcgggagaaggagaagaaggtgcggcccttctccatgtttgatgctgtggaccagagcaatgccccacccagctttggcaccctgaggaagaaccagagcagcgaggacatcctgagagatgcccaggtggccaacaagaatgtggccaaggtgcccccacctgtgcccaccaagcccaagcagatcaacctgccctacttcggccagaccaaccagcccccaagtgacatcaagccagatggcagcagccagcagctgagcacagtggtgcccagcatgggcaccaagcccaagccagctggccagcagccccgggtgctgctgagccccagcatccccagcgtgggccaggaccagaccctgagccctggcagcaagcaggagagccccccagctgctgctgtgcggcccttcaccccccagcccagcaaggacaccctgctgccccccttcaggaagccccagacagtggccgccagcagcatctacagcatgtacacccagcagcaggcccctgggaagaacttccagcaggccgtgcagagcgccctgaccaagacccacacccggggcccccacttcagctctgtgtatggcaagcctgtgattgctgctgcccagaaccagcagcagcaccctgagaacatctacagcaacagccagggcaagccaggcagccctgagcctgagacagagcctgtgtcctctgtgcaggagaaccatgaaaatgaaagaatcccccggcccctgagccccaccaagctgctgcccttcctgagcaacccctacagaaaccagagtgatgctgacctggaggccctgaggaagaagctgagcaatgccccccggcccctgaagaagaggagcagcatcacagagcctgagggccccaacggccccaacatccagaagctgctgtaccagaggaccaccatcgccgccatggagaccatctctgtgcccagctaccccagcaagagcgcctctgtgacagccagcagcgagagccctgtggagatccagaacccctacctgcacgtggagcctgagaaggaggtggtgtccctggtgcctgagagcctgagcccagaagatgtgggcaatgccagcacagagaacagcgacatgcctgcccccagccctggcctggactatgagcctgagggcgtgcctgacaacagccccaacctgcagaacaaccctgaggagcccaaccctgaggccccccacgtgctggatgtgtacctggaggagtacccaccctacccacctccaccctaccccagcggggagcctgagggccctggagaagattctgtgtccatgaggcctcctgagatcaccggccaggtgtccctgcccccaggcaagaggaccaacctgaggaagacaggcagcgagagaattgcccacggcatgagggtgaagttcaaccccctggccctgctgctggacagcagcctggagggggagtttgacctggtgcagaggatcatctatgaggtggatgaccccagcctgcccaatgatgagggcatcacagccctgcacaatgctgtgtgtgccggccacacagaaattgtgaagttcctggtgcagtttggagtgaatgtgaatgctgctgacagtgatggctggacccccctgcactgtgccgccagctgcaacaacgtgcaggtgtgcaagttcctggtggagagcggggctgctgtgtttgccatgacctacagcgacatgcagacagctgctgacaagtgtgaggagatggaggagggctacacccagtgcagccagttcctgtatggagtgcaggagaagatgggcatcatgaacaagggcgtcatctatgccctgtgggactatgagccccagaatgatgatgagctgcccatgaaggagggggactgcatgaccatcatccacagagaagatgaagatgaaattgagtggtggtgggcccggctgaatgacaaggagggctacgtgcccaggaacctgctgggcctgtacccccgcatcaagccccggcagaggagcctggcctag

SEQ ID NO: 341129 - DNA, 3018 bp, Artificial Sequence
  derived and/or modified sequence
atggacctgaccctggccgagctgcaggagatggccagccggcagcaacagcagatcgaggcacagcagcagttgcttgccacaaaggaacagcggctgaagttcctcaagcagcaggaccagagacagcagcagcaggttgccgagcaagagaagctgaaacggcttaaggaaatcgccgaaaatcaggaggccaaattgaaaaaagtgcgtgccttgaagggccacgtggaacagaagaggctgagtaatggaaagctcgtggaagagatagaacagatgaacaaccttttccaacagaagcagcgggagctggtgctggccgtgagcaaggtagaagagctgacacgccagcttgagatgctcaagaacggaaggatcgacagccaccacgacaatcagagcgcagtcgcagaactggaccgtctctataaggagctgcagctcagaaacaaacttaatcaggagcaaaatgcgaagctccaacaacaacgcgagtgcctgaataagcggaacagtgaggtcgccgtgatggacaagcgtgtgaacgagctgcgagaccggctgtggaaaaagaaggccgcattgcagcaaaaagagaatttgccagtgagcagtgatggcaaccttccgcagcaggcagccagcgctccttctcgagtggccgctgtcggtccatacattcagtccagcactatgcctcgaatgccaagcaggcccgaactcctagtaaaacctgccttgcccgatggctccctggtgatccaagcttcagaagggcccatgaagatccagaccttgccaaatatgcgtagcggagctgcttcacagaccaagggatcgaagatccaccccgttggccccgattggagcccttccaacgccgacctgttccctagtcagggtagcgcctcagttcctcagtctaccggcaacgctttagatcaggtcgacgatggcgaggtacccttgagagagaaggagaagaaggttcggcccttctctatgttcgatgcggttgaccagagtaatgctccacccagctttggtactttacggaagaaccaaagctcagaagatattctccgtgatgcacaagtggctaacaagaatgttgcgaaggtgcccccacctgtgcccaccaagccaaaacagattaacttaccatacttcggccaaactaatcagcccccatcagacattaaacccgacggaagctcacagcaactgagcaccgtggtcccatccatggggaccaaacccaagccagccgggcagcaacctcgcgtgctgctgagcccctccatacctagcgtaggccaagaccagacactgtcgcctggctcaaaacaagaatctccgcctgccgctgccgtacggccctttacacctcaaccgtctaaggacacgttgctgcccccatttcgcaaaccacagaccgttgccgcatcatccatctatagcatgtacactcagcagcaggcacctgggaagaattttcagcaagcagtccagagtgccctgactaaaacccacacgaggggtccccatttctcctcagtgtatggaaaaccagtgatcgcagccgcccagaatcagcaacagcaccccgagaacatctacagtaactctcagggcaagcctggaagcccagagcctgagacagaacccgtatcttccgtgcaggagaaccacgaaaatgagagaatccctcgtcccctgagtcccacaaaactcctccccttcttgagcaacccataccgcaatcaaagtgacgccgatctggaggccctacgaaagaagctttcaaacgctccccgccccctgaagaagagatcaagcatcactgagccggaaggtcccaatggaccaaatatacagaaactcctgtatcagagaacaactattgcggctatggagacaattagcgttccttcctacccatctaagagtgcaagcgtgactgcctcctctgagtcccctgttgaaatccagaacccatacctgcacgtggagccggaaaaggaggtcgtaagtttggtaccggagtccttatctccggaggacgtcggcaatgcatctacagaaaactctgacatgccggcgccttctccagggctggactatgaacctgaaggcgtgcccgataactctcccaatctgcagaacaatcccgaggagccaaacccggaagctccgcatgtgctggacgtgtacctggaagaatatccaccctaccctccacctccttacccgagtggcgagcccgagggcccgggggaagattcagtttcaatgaggccacctgagataaccggacaagtctctctaccgcccgggaaaagaacgaatttacggaagaccggtagcgagcgcattgctcatggtatgcgagttaagtttaatccattggccctgttactggacagttccctagaaggagagttcgatctggtccaacggattatctatgaggtggacgacccaagtctccctaacgacgaaggcatcaccgccctgcacaatgccgtctgcgccggccataccgagattgtcaagtttctggtccagtttggggtcaatgtgaacgccgccgacagcgatgggtggacccccttgcactgtgccgcttcatgcaacaacgttcaggtgtgtaagttcctcgtggaatccggagccgcagtgttcgccatgacttatagcgacatgcaaacagccgccgataaatgtgaggagatggaggagggatatactcagtgttcccagttcctttacggggtccaagaaaaaatgggcatcatgaacaaaggcgttatctatgcactgtgggactatgagcctcagaatgatgatgaactgcctatgaaagagggggactgcatgactatcatccacagagaggatgaggatgagatcgaatggtggtgggcgaggctgaacgacaaggaaggatacgtgccacggaatctgcttgggctgtaccctcgaatcaagcccagacagcgaagcctggcctag

SEQ ID NO: 341130 - DNA, 3018 bp, Artificial Sequence
  derived and/or modified sequence
atggacctgactctggctgagcttcaggagatggcgagccgacagcagcagcaaatcgaggcccaacagcagttgttggctaccaaggaacagagacttaaattcttaaaacagcaggaccagagacaacagcagcaagttgcagaacaagaaaagcttaagaggctcaaggaaattgccgagaatcaagaggcaaaattaaagaaagttcgcgcactcaaaggccacgtggaacaaaaaagactgtcgaatggcaaactggtagaagaaatcgagcaaatgaataatctcttccagcagaagcagagagagctggtgcttgcagtgtccaaagtcgaagagttgaccagacagctggaaatgctcaaaaatggccgtattgattcccaccacgacaaccaatctgccgtcgccgagttggatcgactctataaggagctccagctgcgcaataaactcaaccaggaacaaaatgcgaaactgcaacaacagcgtgagtgtcttaataaacgcaacagcgaggttgccgtcatggacaagcgtgtgaacgagctacgtgaccgcctctggaagaaaaaggccgctctgcaacagaaggaaaacctgcctgtatcaagtgacggtaaccttccccagcaggccgcatctgctccttcacgcgtggctgctgtgggaccatacatccagagctcaacgatgccgcgaatgccatctcggcctgaactcctggtgaagcccgcactgcctgacgggagcctggtcatccaagcaagtgagggtcctatgaagatacaaacacttcccaatatgaggtctggagcagctagccaaacaaagggtagcaagatccaccccgtgggcccagactggagcccctcgaacgccgacttgtttcccagccaaggctctgcttcggtgccacagtccacaggcaacgcgcttgaccaggttgatgacggggaggtgccgcttcgggaaaaagagaagaaagttagacctttttcaatgttcgacgccgttgaccaatctaacgcaccgccttccttcggaactctccggaaaaaccaaagttctgaggacatcctgcgtgacgcacaggtggcaaataagaacgttgccaaagtgccaccacctgtgcctaccaagccaaaacagatcaacctgccttattttgggcagacaaatcagccgcctagtgacattaaaccggacggcagctcccaacagctctccacagtcgtgccatctatgggaaccaaaccaaaacctgcgggtcagcagccgagagttctgttgagtcctagcatccccagcgtgggccaagatcagacattgagccccggatcgaaacaagagtctccccctgccgctgccgtgagacccttcacaccgcagccctcaaaagatactttactgccccctttccgaaaaccccagactgtggcagccagttcaatctattcgatgtacacccagcagcaggctcccggtaagaacttccagcaggccgtgcaaagtgcactaactaagacacatacccgtgggcctcacttttcaagtgtgtacggcaaacccgttatagccgctgcccagaatcagcagcagcatcctgagaacatctattcaaacagccagggcaaacctgggagtcccgagccagagaccgaacctgtttcaagcgtacaagagaaccacgagaatgaaaggattcctagacccctgagcccaactaagttacttcccttcctatctaatccataccgcaaccagtcagacgctgacctggaggcattgaggaaaaaactgtctaacgccccacgcccacttaaaaaaagatcaagcattactgaacctgaaggtcccaatggaccgaacattcaaaaactcctctatcagagaactacgatagccgctatggagaccatcagcgtcccttcataccccagcaaatccgcctcagtcacggctagctctgaatcccctgtagagattcagaatccatacctccatgtggagcccgagaaggaggtagtttctttggttcccgagtctttatcccccgaagacgtaggcaatgcgtcaaccgagaattccgacatgcctgccccatcccctgggctggactacgagcctgaaggagtccccgataactccccgaatctccaaaataaccctgaggaaccaaatcccgaggcccctcatgttttggatgtatacctggaggagtacccaccttatcctcctccgccatatccctctggagaacctgaggggcctggagaagatagtgtctctatgcgcccacctgagatcaccggtcaggtgtccctgccgcctggcaaacggaccaacctgcgaaagaccggttctgagcgaatagcccacggcatgagagtgaagttcaatcctttagccctcctgctggatagcagccttgaaggggaattcgatctcgtccagagaatcatttatgaggtggatgacccttcactccctaacgacgaggggataaccgcgctgcataacgcagtctgcgcaggccatacagagatcgttaagtttctagttcagttcggtgtgaatgtgaatgccgctgactcagatggttggacgccactgcactgtgccgcaagctgtaataatgtgcaggtgtgcaaatttctggtggagtcgggcgcagccgtgtttgccatgacctacagcgatatgcagacagcagctgacaaatgtgaagaaatggaggaggggtacacccagtgcagccagttcctttacggggtgcaggagaaaatgggaataatgaacaaaggggttatttacgctctgtgggattatgaacctcaaaatgacgacgagctgcctatgaaagagggcgactgcatgacaataatccatagggaggatgaggatgaaatcgagtggtggtgggctcgtctcaacgacaaggaaggatacgtaccaagaaacttactcggactgtaccctcgcattaaaccaaggcagagatccctcgcatag

SEQ ID NO: 341131 - DNA, 1104 bp, Artificial Sequence
  derived and/or modified sequence
atggagaccatcagcgtgcccagctaccccagcaagagcgccagcgtgaccgccagcagcgagagccccgtggagatccagaacccctacctgcacgtggagcccgagaaggaggtggtgagcctggtgcccgagagcctgagccccgaggacgtgggcaacgccagcaccgagaacagcgacatgcccgcccccagccccggcctggactacgagcccgagggcgtgcccgacaacagccccaacctgcagaacaaccccgaggagcccaaccccgaggccccccacgtgctggacgtgtacctggaggagtaccccccctaccccccccccccctaccccagcggcgagcccgagggccccggcgaggacagcgtgagcatgagaccccccgagatcaccggccaggtgagcctgccccccggcaagagaaccaacctgagaaagaccggcagcgagagaatcgcccacggcatgagagtgaagttcaaccccctggccctgctgctggacagcagcctggagggcgagttcgacctggtgcagagaatcatctacgaggtggacgaccccagcctgcccaacgacgagggcatcaccgccctgcacaacgccgtgtgcgccggccacaccgagatcgtgaagttcctggtgcagttcggcgtgaacgtgaacgccgccgacagcgacggctggacccccctgcactgcgccgccagctgcaacaacgtgcaggtgtgcaagttcctggtggagagcggcgccgccgtgttcgccatgacctacagcgacatgcagaccgccgccgacaagtgcgaggagatggaggagggctacacccagtgcagccagttcctgtacggcgtgcaggagaagatgggcatcatgaacaagggcgtgatctacgccctgtgggactacgagccccagaacgacgacgagctgcccatgaaggagggcgactgcatgaccatcatccacagagaggacgaggacgagatcgagtggtggtgggccagactgaacgacaaggagggctacgtgcccagaaacctgctgggcctgtaccccagaatcaagcccagacagagaagcctggcctag

SEQ ID NO: 341132 - DNA, 1104 bp, Artificial Sequence
  derived and/or modified sequence
atggagaccatttcagttcctagctatccctccaaaagtgcttctgttacagcttccagcgagagccccgtggaaattcagaatccatatctccatgtcgagcccgagaaggaggttgttagcttggtgcccgagtccttatcaccggaggatgtgggcaatgctagtactgagaactcagacatgcccgctccttccccaggcctcgactacgagcccgaaggcgttcctgataattcacctaatctgcaaaacaatcctgaggagcctaacccagaggctcctcatgtattggatgtgtatctagaggaatatcccccataccccccaccaccctatccttccggtgagcctgaaggccccggagaggactcggtgagcatgcggcctccggaaatcacgggtcaggtctcactgccgcccgggaaacggactaaccttcgcaaaacagggagcgagcggattgcgcatggaatgagggtaaagttcaaccccttggctttattgctggacagtagtctagaaggagagttcgacctggtccagcggatcatatatgaggtagatgatccatctctgcccaatgacgaaggcattacagcgctacataatgcggtatgcgccgggcacactgaaattgtgaaattcctggtgcagtttggcgtgaatgtgaacgcggcagactccgatggctggaccccactacactgtgccgcttcttgtaataacgtgcaagtgtgcaagtttctagtcgaatcgggcgctgctgtgtttgctatgacgtatagcgacatgcagactgccgctgataagtgcgaagaaatggaggaaggttacacacagtgctcacagtttctttatggtgtccaagagaaaatgggaattatgaacaaaggcgtgatttacgctctctgggactatgagcctcaaaatgatgatgagctacctatgaaggagggggactgcatgactatcatccatagagaagacgaggatgagatcgaatggtggtgggcacgtctcaacgataaggaggggtacgtgccaagaaacctcctgggtttgtaccccagaattaagcctcggcagcggagcttggcttag

SEQ ID NO: 341133 - DNA, 1104 bp, Artificial Sequence
  derived and/or modified sequence
atggagaccatctctgtgcccagctaccccagcaagagcgcctctgtgacagccagcagcgagagccctgtggagatccagaacccctacctgcacgtggagcctgagaaggaggtggtgtccctggtgcctgagagcctgagcccagaagatgtgggcaatgccagcacagagaacagcgacatgcctgcccccagccctggcctggactatgagcctgagggcgtgcctgacaacagccccaacctgcagaacaaccctgaggagcccaaccctgaggccccccacgtgctggatgtgtacctggaggagtacccaccctacccacctccaccctaccccagcggggagcctgagggccctggagaagattctgtgtccatgaggcctcctgagatcaccggccaggtgtccctgcccccaggcaagaggaccaacctgaggaagacaggcagcgagagaattgcccacggcatgagggtgaagttcaaccccctggccctgctgctggacagcagcctggagggggagtttgacctggtgcagaggatcatctatgaggtggatgaccccagcctgcccaatgatgagggcatcacagccctgcacaatgctgtgtgtgccggccacacagaaattgtgaagttcctggtgcagtttggagtgaatgtgaatgctgctgacagtgatggctggacccccctgcactgtgccgccagctgcaacaacgtgcaggtgtgcaagttcctggtggagagcggggctgctgtgtttgccatgacctacagcgacatgcagacagctgctgacaagtgtgaggagatggaggagggctacacccagtgcagccagttcctgtatggagtgcaggagaagatgggcatcatgaacaagggcgtcatctatgccctgtgggactatgagccccagaatgatgatgagctgcccatgaaggagggggactgcatgaccatcatccacagagaagatgaagatgaaattgagtggtggtgggcccggctgaatgacaaggagggctacgtgcccaggaacctgctgggcctgtacccccgcatcaagccccggcagaggagcctggcctag

SEQ ID NO: 341134 - DNA, 1104 bp, Artificial Sequence
  derived and/or modified sequence
atggagaccatcagcgtgcccagctaccccagcaagagcgccagcgttaccgcctcgagcgaatcacccgtggaaatccaaaatccatacctccatgtcgaacctgagaaagaggtggtgtccttggttcctgaatcactgagcccagaggacgtggggaatgcgtccacagaaaactccgatatgcccgccccgagccctggcttagactacgaaccagaaggggtgccggacaactcccccaacctgcagaacaatccggaggagcctaacccagaagcccctcacgtgctggatgtttaccttgaggaatatcctccttatcccccacctccttatcccagcggagagcccgaggggcccggcgaagacagcgtgtcgatgagacctcctgagataacggggcaggtttctctacccccaggaaagaggaccaacctcaggaaaacaggatcagaacgcatcgcacacggcatgagggtgaagttcaatcctctggctctccttctcgactcaagtcttgaaggggaattcgacctcgtacagcgaattatctatgaagtagatgaccccagcctacctaatgatgagggtataaccgctcttcacaatgctgtgtgtgcggggcacaccgagatcgtgaaatttctggtccagtttggcgtgaacgtgaacgccgctgactctgacgggtggaccccgctgcattgcgccgcttcctgtaacaacgtgcaggtgtgcaaatttttggtggagagcggggcggcagtgttcgctatgacctactcggatatgcaaaccgccgcagataaatgtgaagagatggaagaagggtatacgcagtgtagtcaatttctctacggagttcaggagaagatgggtatcatgaataagggagtgatctacgccctctgggactacgaacctcagaatgacgatgagctacctatgaaggagggcgactgtatgacaatcattcaccgggaggatgaagacgagatcgaatggtggtgggccaggctcaacgataaggagggctacgtgcctcgtaatctcctggggttatatccacgaatcaaaccaagacagcgatcactggcttag

SEQ ID NO: 341135 - DNA, 1104 bp, Artificial Sequence
  derived and/or modified sequence
atggaaacaatcagcgtgccatcctacccaagtaaaagcgctagcgtgaccgcctccagtgagagcccggtggaaatccagaacccttatcttcacgtagaaccagaaaaggaggtagtgtcactggtgcccgaaagtctcagccccgaagatgtgggtaatgcctccacagagaacagtgacatgccagctccctcccccggtctggactacgagccagagggggtccccgataactcacccaatctccagaataaccctgaggagcctaaccctgaggcccctcacgtcctcgacgtttatcttgaagaataccccccttaccctccacccccataccccagcggagagcccgaaggaccaggcgaggactcagtgagcatgaggcccccagagattactggacaggtgtctcttcccccaggaaaaaggactaatctaaggaagacgggcagcgagaggatagcccacgggatgagggttaagttcaaccctctggccctcctcctcgacagcagcctcgagggggagttcgacttagtgcagagaatcatctatgaagtagatgatcccagcctgccgaacgatgagggaatcactgccctccacaatgccgtatgcgccggacacactgagattgtgaaattcctggtgcagttcggggtgaacgtcaacgctgccgattccgatggttggacacccctccattgtgcagcaagctgcaacaatgtgcaggtgtgtaaattcctggttgaatctggggcagctgtgttcgcaatgacctattctgacatgcagactgccgctgacaagtgcgaggaaatggaggagggatacacccagtgtagtcagttcctatatggcgtgcaggaaaaaatgggcatcatgaacaagggtgtaatctacgcactgtgggattatgagccgcaaaatgatgatgaattgccaatgaaggaaggtgattgcatgaccatcatccaccgcgaggacgaagatgagattgagtggtggtgggccaggctgaatgacaaagagggatatgtacctcggaacctattggggctgtaccccaggattaagccaaggcagcgctcccttgcatag

SEQ ID NO: 341136 - DNA, 1841 bp, Artificial Sequence
  derived and/or modified sequence
aaagcactgggaatgctctggatcaagttgatgatggagaggttccgctgagggagaaagagaagaaagtgcgtccgttctcaatgtttgatgcagtagaccagtccaatgccccaccttcctttggtactctgaggaagaaccagagcagtgaagatatcttgcgggatgctcagtatatggtaagcctgtaattgctgctgcccagaatcaacagcagcacccagagaacatttattccaatagccagggcaagcctggcagtccagaacctgaaacagagcctgtttcttcagttcaggagaaccatgaaaacgaaagaattcctcggccactcagcccaactaaattactgcctttcttatctaatccttaccgaaaccagagtgatgctgacctagaagccttacgaaagaaactgtctaacgcaccaaggcctctaaagaaacgtagttctattacagagccagagggtcctaatgggccaaatattcagaagcttttatatcagaggaccaccatagcggccatggagaccatctctgtcccatcatacccatccaagtcagcttctgtgactgccagctcagaaagcccagtagaaatccagaatccatatttacatgtggagcccgaaaaggaggtggtctctctggttcctgaatcattgtccccagaggatgtggggaatgccagtacagagaacagtgacatgccagctccttctccaggccttgattatgagcctgagggagtcccagacaacagcccaaatctccagaataacccagaagaaccaaatccagaggctccacatgtgcttgatgtgtacctggaggagtaccctccatacccacccccaccatacccatctggggagcctgaagggcccggagaagactcggtgagcatgcgcccgcctgaaatcaccgggcaggtctctctgcctcctggtaaaaggacaaacttgcgtaaaactggctcagagcgtatcgctcatggaatgagggtgaaattcaacccccttgctttactgctagattcgtctttggagggagaatttgaccttgtacagagaattatttatgaggttgatgacccaagcctccccaatgatgaaggcatcacggctcttcacaatgctgtgtgtgcaggccacacagaaatcgttaagttcctggtacagtttggtgtaaatgtaaatgctgctgatagtgatggatggactccattacattgtgctgcctcatgtaacaacgtccaagtgtgtaagtttttggtggagtcaggagccgctgtgtttgccatgacctacagtgacatgcagactgctgcagataagtgcgaggaaatggaggaaggctacactcagtgctcccaatttctttatggagttcaggagaagatgggcataatgaataaaggagtcatttatgcgctttgggattatgaacctcagaatgatgatgagctgcccatgaaagaaggagactgcatgacaatcatccacagggaagacgaagatgaaatcgaatggtggtgggcgcgccttaatgataaggagggatatgttccacgtaacttgctgggactgtacccaagaattaaaccaagacaaaggagcttggcctgaaacttccacacagaattttagtcaatgaagaattaatctctgttaagaagaagtaatacgattatttttggcaaaaatttcacaagacttattttaatgacaatgtagcttgaaagcgatgaagaatgtctctagaagagaatgaaggattgaagaattcaccattagaggacatttagcgtgatgaaataaagcatctacgtcagca

SEQ ID NO: 341137 - DNA, 2334 bp, Artificial Sequence
  derived and/or modified sequence
atgaccttctaccccttcgtggccagcagcagcaccagaagagtggacaacagcaacaccagactggccgtgcagatcgagagagaccccggcaacgacgacaacaacctgaacagcatcttctacgagcacctgaccagaaccctgcaggagagcctgtgcggcgacctggtgctgggcagatggggcaactacagcagcggcgactgcttcatcctggccagcgacgacctgaacgccttcgtgcacctgatcgagatcggcaacggcctggtgaccttccagctgagaggcctggagttcagaggcacctactgccagcagagagaggtggaggccatcatggagggcgacgaggaggacagaggctgctgctgctgcaagcccggccacctgccccacctgctgagctgcaacgccgccttccacctgagatggctgacctgggagatcacccagacccagtacatcctggagggctacagcatcctggacaacaacgccgccaccatgctgcaggtgttcgacctgagaagaatcctgatcagatactacatcaagagcatcatctactacatggtgaccagccccaagctgctgagctggatcaagaacgagagcctgctgaagagcctgcagcccttcgccaagtggcactacatcgagagagacctggccatgttcaacatcaacatcgacgacgactacgtgccctgcctgcagggcatcaccagagccagcttctgcaacgtgtacctggagtggatccagcactgcgccagaaagagacaggagcccagcaccaccctggacagcgacgaggacagccccctggtgaccctgagcttcgccctgtgcaccctgggcagaagagccctgggcaccgccgcccacaacatggccatcagcctggacagcttcctgtacggcctgcacgtgctgttcaagggcgacttcagaatcaccgccagagacgagtgggtgttcgccgacatggacctgctgcacaaggtggtggcccccgccatcagaatgagcctgaagctgcaccaggaccagttcacctgccccgacgagtacgaggaccccgccgtgctgtacgaggccatccagagcttcgagaagaaggtggtgatctgccacgagggcgaccccgcctggagaggcgccgtgctgagcaacaaggaggagctgctgaccctgagacacgtggtggacgagggcgccgacgagtacaaggtgatcatgctgcacagaagcttcctgagcttcaaggtgatcaaggtgaacaaggagtgcgtgagaggcctgtgggccggccagcagcaggagctgatcttcctgagaaacagaaaccccgagagaggcagcatccagaacaacaagcaggtgctgagaaacctgatcaacagcagctgcgaccagcccctgggctaccccatgtacgtgagccccctgaccaccagctacctgggcacccacagacagctgaagaacatctggggcggccccatcaccctggacagaatcagaacctggttctggaccaagtgggtgagaatgagaaaggactgcaacgccagacagcacagcggcggcaacatcgaggacgtggacggcggcggcgcccccaccaccggcggcaacaacgcccccagcggcggcagccaggagagcagcgccgagcagcccagaaagggcggcgcccagcacggcgtgagcagctgcgagggcacccagagaaccggcagaagaaagggcagaagccagagcgtgcaggcccacagcgccctgagccagagaccccccatgctgagcagcagcggccccatcctggagagcagacagaccttcctgcagaccagcaccagcgtgcacgagctggcccagagactgagcggcagcagactgagcctgcacgccagcgccaccagcctgcacagccagcccccccccgtgaccaccaccggccacctgagcgtgagagagagagccgaggccctgatcagaagcagcctgggcagcagcaccagcagcaccctgagcttcctgttcggcaagagaagcttcagcagcgccctggtgatcagcggcctgagcgccgccgagggcggcaacaccagcgacacccagagcagcagcagcgtgaacatcgtgatgggccccagcgccagagccgccagccaggccaccagagtgagaggctgggccggcctgaccagaaccggctgggacggcggcaccggcagctggcccgagagaggcacctgcctggccttcccccccttctgcctgcagaaccccatccccttcagcatgggcctgcccgagtag

SEQ ID NO: 341138 - DNA, 2334 bp, Artificial Sequence
  derived and/or modified sequence
atgaccttctatcccttcgtggcgagctcctccaccagacgcgtggacaattcaaatacccggttagcagtgcagatcgagcgggatcccggcaatgatgataacaacttaaattctattttctatgaacaccttacccggacactccaagagagcctctgtggagacctggtcttgggtaggtgggggaattactcctcaggcgactgctttatcctcgccagtgatgacctgaatgcctttgtgcacctgattgaaataggtaacggtcttgtgacattccagctgcgcggcttagaattccgtggaacatattgtcagcagagagaagtcgaggctataatggagggcgatgaggaggaccgcggttgctgttgctgtaaacccggtcatctgcctcacctgctaagctgcaatgctgcttttcacctgaggtggctgacctgggaaattacacagacacagtacatccttgaaggttattcaattctggacaacaatgccgctaccatgctccaggtgtttgatttgcgtagaattctgatcagatactacatcaaaagcatcatttattatatggttacatcgcccaaactattgagttggatcaagaacgagtcccttctgaagtccctacaaccctttgctaagtggcactatattgagcgtgacttggccatgtttaacatcaatatcgacgatgactatgtgccctgccttcaaggcattacccgagcgtccttttgcaacgtctacctggaatggattcaacactgtgctaggaaacgccaggagccatcaacaactttggattccgacgaggactcacccctggtgaccctgtcattcgctctttgcacgcttggcagacgcgctctaggcaccgcggcgcataacatggcaatatccctggactctttcctgtacggtcttcatgtgctgtttaagggagatttccggataactgcccgggacgagtgggtattcgctgacatggacctcctgcacaaggtcgtcgctccagccatcaggatgtccttgaaactgcatcaggaccaatttacttgtcctgatgaatatgaagacccagccgtgttgtacgaggcgattcaatcatttgagaagaaggtggtcatctgccatgagggcgatcctgcctggcgtggagcggtgctttctaacaaggaggaactgttgaccctgaggcacgttgtggacgaaggcgccgacgaatataaggtcatcatgctgcaccgctcattcctgagttttaaggtcattaaagtcaacaaagaatgtgtcagaggtctctgggccggacagcaacaggagcttatcttcttaagaaatcggaacccagagagaggctcaattcagaataataagcaagtgttgcgcaatctgataaatagcagttgtgaccagccattaggctaccctatgtacgtatcaccattaacgacgtcttacttgggcacgcatcggcaactaaagaacatctggggcgggcccattaccttggatcgtatccgtacttggttctggaccaagtgggtgagaatgcggaaagattgcaatgcgagacagcatagtggtggtaacatcgaggacgtggacgggggaggtgcccccaccactggcggcaataacgctccatctggcggctcccaagagtccagcgccgagcagccacggaagggcggagcccaacacggagtcagctcttgcgaaggcacccaaaggacagggagacggaagggaaggtctcaatctgtccaagcccatagcgccctgtcgcagcgtccaccgatgttgtcatcatcaggcccaatcttagaaagccggcaaacctttctgcagacctccacaagcgtgcacgagttagctcagagacttagcggaagccgcctgtccttacatgctagtgccacttcactacacagccagcccccaccagtgacgacaacaggccatttgtcagttagagaaagagccgaagcattaatcagatcatcactgggctccagcacatccagcaccttaagtttcttgtttggaaaacgctccttcagttccgcgctggtgatctcaggtctatctgccgctgagggggggaacacatctgatacgcagtcaagttcaagtgtaaacattgtcatgggcccttcagcccgggccgctagtcaggctaccagggttcgcggatgggccggcttgaccaggacgggctgggacggcggcaccgggagctggccagaacggggaacatgtctggcatttccgccattttgcctgcagaaccctatcccgttcagcatgggcttgccggagtag

SEQ ID NO: 341139 - DNA, 2334 bp, Artificial Sequence
  derived and/or modified sequence
atgaccttctacccctttgtggccagcagcagcaccaggagagtggacaacagcaacacccggctggccgtgcagatcgagcgggaccctggaaatgatgacaacaacctgaacagcatcttctatgagcacctgaccaggaccctgcaggagagcctgtgtggggacctggtgctgggccgctggggcaactacagcagcggggactgcttcatcctggccagtgatgacctgaatgcctttgtgcacctgattgaaattggaaatggcctggtgaccttccagctgcggggcctggagttccggggcacctactgccagcagcgggaggtggaggccatcatggagggagatgaggaggaccggggctgctgctgctgcaagccaggccacctgccccacctgctgagctgcaatgctgccttccacctgcgctggctgacctgggagatcacccagacccagtacatcctggagggctacagcatcctggacaacaatgctgccaccatgctgcaggtgtttgacctgcggcgcatcctgatccgctactacatcaagagcatcatctactacatggtgaccagccccaagctgctgtcctggatcaagaatgaaagcctgctgaagagcctgcagccctttgccaagtggcactacatcgagcgggacctggccatgttcaacatcaacattgatgatgattatgtgccctgcctgcagggcatcacccgggccagcttctgcaatgtgtacctggagtggatccagcactgtgccaggaagaggcaggagcccagcaccaccctggacagtgatgaggacagccccctggtgaccctgagctttgccctgtgcaccctgggccggcgggccctgggcacagctgcccacaacatggccatcagcctggacagcttcctgtatggcctgcacgtgctcttcaagggggacttccgcatcacagccagagatgagtgggtgtttgctgacatggacctgctgcacaaggtggtggccccagccatccgcatgagcctgaagctgcaccaggaccagttcacctgcccagatgaatatgaagatcctgctgtgctgtatgaggccatccagagctttgagaagaaggtggtgatctgccatgaaggagaccctgcctggagaggagctgtgctgagcaacaaggaggagctgctgaccctgcggcacgtggtggatgagggcgcagatgagtacaaggtgatcatgctgcacaggagcttcctgtccttcaaggtgatcaaggtgaacaaggaatgtgtgcggggcctgtgggccggccagcagcaggagctgatcttcctgaggaacagaaatcctgagcggggcagcatccagaacaacaagcaggtgctgaggaacctgatcaacagcagctgtgaccagcccctgggctaccccatgtatgtgagccccctgaccaccagctacctgggcacccaccggcagctgaagaacatctggggcggccccatcaccctggaccgcatccgcacctggttctggaccaagtgggtgaggatgaggaaggactgcaatgcccggcagcacagcggcggcaacattgaagatgtggatggcggcggggcccccaccaccggcggcaacaatgcccccagcggcggcagccaggagagcagcgctgagcagcccaggaagggcggggcccagcacggcgtgagcagctgtgagggcacccagaggacaggccgcaggaagggccgcagccagagcgtgcaggcccacagcgccctgagccagaggcctcccatgctgagcagcagcggccccatcctggagagccggcagaccttcctgcagaccagcacctctgtgcatgagctggcccagaggctgagcggcagccggctgagcctgcacgccagcgccaccagcctgcacagccagcccccacctgtgaccaccaccggccacctgtctgtgcgggagagagctgaggccctgatccgcagcagcctgggcagcagcaccagcagcaccctgtccttcctgtttgggaagaggagcttcagcagcgccctggtgatcagcggcctgtctgctgctgagggcggcaacaccagtgacacccagagcagcagctctgtgaacatcgtgatgggccccagcgcccgggccgccagccaggccaccagggtgcggggctgggccggcctgaccaggacaggctgggatggcggcaccggctcctggccagagcggggcacctgcctggccttcccccccttctgcctgcagaaccccatccccttctccatgggcctgcctgagtag

SEQ ID NO: 341140 - DNA, 2334 bp, Artificial Sequence
  derived and/or modified sequence
atgaccttctaccccttcgtggccagcagcagcacccggcgggtggataactcaaacacacggctcgccgtgcagattgagagggacccaggaaatgatgataacaatcttaactcgatcttctatgagcatctgactagaacgttgcaagaatcgctgtgtggcgatctcgtgctaggacgatggggtaactattcaagcggcgactgcttcatcctagcctcagatgatcttaatgccttcgtgcatttaatcgagatcggcaatggactggtgaccttccagctcagaggcctggagttcagggggacctactgccaacagcgtgaagtcgaggccataatggagggagacgaagaggatcgaggctgctgttgctgtaagccaggccatctccctcatctgctcagttgtaacgccgctttccacttgcgttggctaacatgggagatcactcagactcagtatattctggaggggtacagtatcctggacaacaacgccgccactatgctgcaggtctttgacttgcgccgtattctaatcagatactacatcaaatcaataatctactacatggtcaccagtccgaagttactgtcgtggattaaaaatgagtccttgcttaaatccctccagccctttgccaaatggcactacattgaaagagatctagctatgttcaatattaacatcgatgatgactacgtgccgtgcttgcagggcataacaagagcctccttttgcaacgtgtacctggagtggatccagcactgcgcccgcaaacggcaggagcccagcaccacgttagacagcgatgaagattccccgttggtgacattgagcttcgcgctttgcaccttgggtcgccgtgccttaggaactgcagcccataatatggcaatctccttggacagcttcctttatgggctgcacgtgctgttcaaaggcgacttccggatcactgctagagacgagtgggtgtttgccgacatggatctgctccacaaagtcgtagcacccgcaatccgcatgtcgcttaaactgcaccaagaccaattcacttgccccgacgaatatgaagacccagcagttctctatgaggctatccagtcatttgagaaaaaagtagtgatctgccacgaaggtgatcccgcatggaggggcgccgtactctccaacaaagaagaactcctgacactgagacatgttgtcgatgaaggcgccgatgaatataaggtgatcatgctccacagatccttcctgtctttcaaggtgatcaaggttaacaaagagtgcgtgagggggctctgggcgggtcagcaacaggaactgatctttttgagaaatcggaatcctgaaagggggagtatccagaataataaacaagtactgaggaacctgatcaattcgagttgtgaccaaccactcgggtaccctatgtacgtttcaccactcaccacctcatacctgggaacccatcgccagctgaaaaacatctggggaggtcccataacgctggatcgcatccggacgtggttttggaccaaatgggtgcggatgcgaaaggactgcaatgctagacagcactcgggcggaaatatagaagacgtcgacggaggcggcgccccaaccactggcggtaataacgcaccctctggagggtcgcaagagagtagcgccgagcaacctcggaaggggggcgcccagcacggagtctccagttgcgaggggacccaacggactggacgccgcaaaggtcggagtcagtccgttcaggctcactcagctctgagccaacggcccccaatgctctcgtcttctggccccatcttagagtcacggcaaactttcctccagacctcaacgagtgttcatgaactcgcacaaaggctgagtggaagtcggctttcactgcatgccagcgcaactagtttacacagtcagcctccacccgtgaccacaaccggtcacctgtctgtgcgcgaacgggccgaggccctgattcgttccagcctgggatcttctacatcgtcaacccttagttttttattcgggaagagaagcttcagtagcgccctggtcatttctggcctgtctgctgccgagggcgggaacacatccgacacacaatctagctcaagtgttaatatcgtaatggggccctcggcgcgagccgcaagccaggccacccgggtgcgggggtgggctggtctgacccgcacgggatgggatggcgggactggctcttggccagaacggggtacctgcttggccttcccccccttctgcctgcaaaaccctatccccttttctatgggactccctgaatag

SEQ ID NO: 341141 - DNA, 5348 bp, Artificial Sequence
  derived and/or modified sequence
cgaatatatcagatttaaccatatgaaattgccattttgtaggtgataataaacagttgactatcgtcaatttcataggcctgatgtcaatttcatatttcattctttaaagaccgccactcattgttggaaataaaaggacaaaggtaggctggcatagcctctccaagagagcagatcgctgcacttacaaagggttttggggatgtgtggagttcaaggactggtgaggttttggaggcatacatgggttgatggcatctgtataggtggttacttgaaaagcctgttattcatcagttgcccctcaagtctgcagtgagtcggctaactctcagaagccaggggttgtcatggactggctgccttacaaaagctgtgcactgaggggtgtttacatgatggaataggttcaaagctggttctagtggccacttgttaccatggctgcagatgatccgagagctttcattctcatggttcaacctaagaaaggtctataagagtataccccactcttgaaagcaggtggtggagacgttgactactcaccaccatttcctgaaatcaatttgaagagaaagatacctttgtggacactgttctcaagttctgaaagtgggtagcattacattggcagtttaaacacttgcttttttttttttgagtcttgctctgtcacccaggttggagtgcagtggtgcaatctcggctcactgcgacctcggcctcctggattcaagttcagcctcccaagtagctgagattataggagtgtgccaccacacatggctaatctttttgtatttttagtagagatggagtttcacactgtttgccagactggtaccaagctcctgacttcaaatgatctgcctgcctcagcctccctaagtgttgggattacaggcatgagccaccgtgctcagcctaaatacttgctttgattttgcagatctggtgctccaaattgattaagacacaagaccgttctctccaaatcagagagctactcatctctcccttccatgtgtttcttgtactgctccctctatctcttatcatgagactcctctcttcctgcagtgtggtaaaactacagcaatcgtcttaacctgtgagatctgtcacctttgcattttccactcatgcagctggttctataaaccaactcttctgcttggggggatctaatcatgaccttttacccttttgtggcctcttctagtacaaggcgagtggataattccaacacaagactggcagtccaaattgaaagagatccagggaatgatgacaacaatctcaattccattttttatgaacacttgacaaggaccctccaggagtccctctgtggagacttagttcttggacgttggggcaactacagctctggcgattgctttattttggcttcagatgacctcaatgcctttgttcacctgattgaaattggaaatggtcttgtcacctttcaacttcgaggactggaattccgaggaacctactgccagcagagggaggtagaagccatcatggagggcgacgaggaggacagaggctgctgctgctgcaaaccaggccacttgcctcacctgctgtcctgcaacgctgcctttcacctccgctggctcacctgggaaatcacgcagacccagtacatcctggagggctacagcatcctggacaacaacgcggccaccatgctgcaggtgtttgacctccgaaggatcctcatccgctactacatcaagagtataatatactatatggtaacgtctcccaaactcctctcctggatcaaaaatgaatcacttctgaagtccctgcagccctttgccaagtggcattacattgagcgtgaccttgcaatgttcaacattaacattgatgatgactacgtcccgtgtctccaggggatcacacgagctagcttctgcaatgtttatctagaatggattcaacactgtgcacggaaaagacaagagccttcaacgaccctggacagtgacgaggactctcccttggtgactctgtccttcgccctgtgcaccctggggaggagagctctgggaacagccgctcacaatatggccatcagcctggattctttcctgtatggcctccatgtcctcttcaaaggtgacttcagaataacagcacgtgacgagtgggtatttgctgacatggacctactgcataaagttgtagctccagctatcaggatgtccctgaaacttcaccaggaccagttcacttgccctgacgagtatgaagacccagcagtcctctacgaggccatccagtccttcgagaagaaggtggtcatctgccacgagggcgacccggcctggcggggcgcagtgctgtccaacaaggaagagctgctcaccctgcggcacgtggtggacgagggtgccgacgagtacaaggtcatcatgctccacagaagcttcctgagcttcaaggtgatcaaggttaacaaagaatgcgtccgaggactttgggccgggcagcagcaggagcttatatttcttcgcaaccgcaatccggagcgcggcagtatccagaacaataagcaggtcctgcggaacttgattaactcctcctgcgatcagcccctggggtaccccatgtatgtctccccactaaccacatcctacctagggacacacaggcagctgaagaacatctggggtggacccatcactttggacagaattaggacctggttctggaccaagtgggtaaggatgcggaaggattgcaatgcccgccagcacagtggcggcaacattgaagacgtggacggaggaggggccccgacgacaggtggcaacaatgccccgagtggtggcagccaggagagcagcgcagaacagcccagaaaaggcggtgctcagcacggggtgtcatcctgtgaagggacacagagaacaggcaggaggaaaggcaggagccagtccgtgcaggcacactcagcgctaagccaaaggccgcccatgctgagctcatctggccccatcttagagagccgccaaacattcctccagacgtccacctcagtgcacgagctggcccagaggctctcgggcagccggctctccttgcacgcctcggccacgtccctgcactctcagcccccgcccgtcaccaccaccggccacctgagtgtccgtgagcgggccgaggcgctcatcaggtccagcctgggctcctccaccagctccaccctgagcttcctcttcggcaagaggagcttttccagcgcgctcgtcatttccggactctctgctgcggaggggggcaataccagtgacacccagtcatccagcagcgtcaacatcgtgatgggcccctcagccagggctgccagccaggccactcgggtaaggggctgggcagggctcaccaggacaggctgggatggtggcacgggctcctggcctgagcgtggcacctgccttgcgttcccacccttctgcctgcagaaccccatccccttctctatggggctcccagagtgacaaaggacagtgattagacacgaagtggcttagctgctcttgaaagcagacaagatacagagcagatatcctgtaaacgataatgcccaggcaggcactgaaaggagtcaccggatacagaggttctgcagaactgtggccatctgccctacaccggggcatgacggagaatgccctccacccattcacacagcaggactcttctcacatgattctggcctgagggagaggaaaggacacctgtcaatgctggagttagagcttcactgcttctcagccaatcgatttgactttaaagctgctgagatggcccactgcttttaggtatttaaatactagacaaggagagttctaaggacttcacccaaataagctgttacttgtccagaatcccaaaccagctgagatgaaatgaatacttgagcttcttcagtgagaaaaaagtaaataaatacccagcagtgctcctatgtgacctggtagacagggaaaatcgatggtgtcaaggcaaaaatgggtcaggtttggagagttcccccactccttttgagtgttcaggttttccttaccatggctcatgctttccatcaagcaccagagttgcagtggcttggcctctggttctgggtgaggttatttgcaggtggagacggggggctgcacctgaacatttctagtgtcaccctccctctccttcatgggaaacagctctccagggaagtaccttcctgccaggggaagccaaggctgggccggccgccctacaaggagccacaggattgcagccatgggtgccacctttcatggaaggggagatttatgggctttcctggaacccccaggctgtcctggccaagaggaaagaggtggttacttcaggagtttgaccttagttagataactaaaagaatacatttcccctcccttttctttatttcctcaataaaaatgtacaaagtatcacccttctccatgccccaatctgtgttaaagtcacaatctatgggtgtagttctgggattctgtcaaattctccttcctgctctccaaaatggacaattgtcgtagggaccacatgcccccagaatacaatggcctctgtgttctactggggtcaagcctgctagaactcagcattcatgacaggggctaagtgtgcatgaagtgacactgactacagctagaaagccaggcgcacaaatgccccttccccccagggccgctctttccagcgcagtcatccagaaaggcccacgtgcagagcccctgtgtctcagatgctgcttcagttgcccgtcctgtcctcagaggccactgtgctggccctctatcatttgacctgactttagaacctgacctcaaggatatggcagcgctagcctttagctcccacagcacggatgggggtgatgccagttagaagtgggtagtgaacgtttgctgagctgttcactgtttctctcttctctttggaagcacctctccgagccatgtgagccccctgatgccaccgagcaggggcagcttcatgaccgatgtctggctgaggctgtggcggacactctcggggttgtctgcaggagagcaagccaggaggacatgggcctggacgacacggcctcgcagcaaagtgtgtcagacgagcagtgacgggcgtgcggccgggcggggaggctggctcccccacacctcccacctgcattgctctccctcgtgctccccaaatcaccacaaccaaccaataccgcgatccatgagggactcctcctgtggaaaaggagagctgttccagaacacagaactgatctcaggtttttg

SEQ ID NO: 341142 - DNA, 2334 bp, Artificial Sequence
  derived and/or modified sequence
atgactttttatccatttgtggctagttcaagcacaagaagggtggacaattccaacacgcgactggccgtccagattgaacgggaccccggaaatgatgataacaaccttaattctatattttacgaacatctcaccaggaccctacaggaatcactgtgcggagatctggtgcttggtaggtggggcaattattctagcggggattgttttattctggcctcggatgacctgaacgcttttgttcatctcatcgagattgggaacggattggtgacgtttcagctaaggggccttgagttcagaggaacctattgtcagcagagggaagtagaagccatcatggagggcgatgaagaggatcggggttgttgttgctgtaagcctggccatctgccccatctgttaagctgcaacgccgcatttcatctccgctggctcacgtgggagatcacgcagacccaatacatactggaaggatactctatacttgataacaacgcagctacaatgctccaggtcttcgatttgagaagaattcttatccggtactatataaagtcaatcatctattacatggtgacctcacctaaactgttgtcctggattaaaaatgagtccttgctaaagagtctccagcccttcgctaaatggcactatatagaaagggatctcgcgatgttcaatatcaacatcgacgatgattacgtcccgtgcctgcaaggtattactagagcttccttttgcaacgtgtatcttgagtggatacagcattgcgcacggaagcgccaggaaccatctacgacccttgactcagacgaagactcccccctcgtgactctgtcctttgcactctgtaccctcggccgaagagcgctggggacggcagcacataatatggccatctctctagacagtttcctttacggtctgcatgtgctgtttaagggagactttcgtatcacagccagagacgagtgggtattcgccgacatggatctgctccacaaggtcgtggcgccagccatacgcatgtccctaaaactgcatcaagatcagtttacatgtccagacgaatatgaagacccggctgttctttatgaagctattcagtcatttgaaaagaaagtcgtgatttgtcacgagggagacccagcttggcgcggagctgtcctgagtaacaaggaggaacttctcactctgagacatgtcgtggacgagggagccgatgaatacaaagtgataatgctgcacaggagcttcttgagttttaaagtgatcaaggtgaataaagaatgcgtccgcggtctgtgggccggtcagcaacaagaacttatttttctccgtaatagaaatccagagcggggatctattcaaaacaacaagcaggtgttgaggaatttaatcaacagttcctgcgaccagcccctgggatacccgatgtacgtctcccctctgacaacctcttatctcggcacccaccgccagctgaaaaatatctggggcggaccaattactttggaccggataaggacttggttttggaccaagtgggtgaggatgaggaaagactgcaacgcccgacagcattctggagggaacatcgaagatgtggacggcggtggcgctcccactaccgggggtaacaacgccccatccgggggatcccaggagtccagtgccgagcaaccccgaaaggggggtgcccaacatggggtctctagctgtgaaggaacccagagaaccggtcgacgcaaaggcaggtcacaatcggtgcaggcccactccgcgctgagccagaggcctccaatgctaagctctagcggcccaatcctagagagccggcagacatttcttcagaccagcacatcagtacacgagctggcccaaaggttatcagggtcccgcttaagcttgcacgcttcagccacatccttgcattcccagcctcctcctgttacgactactggtcacctctcagttagagaacgtgccgaggctctgattcggagcagtttggggtcaagcacttcatcaaccctgtccttcttattcgggaagagaagtttttcatcagccctggtgatctccggccttagtgccgctgagggaggaaatacgagcgacacccagtcttctagtagcgtgaatatcgtcatgggcccatctgcccgtgccgcatcacaggccactcgggtcagaggctgggcgggattaacccggaccgggtgggacggtggcactgggtcttggccggaacgtgggacgtgcctcgccttccctcccttctgtttacagaatcccatcccgtttagcatgggcttaccagagtag

SEQ ID NO: 341143 - DNA, 651 bp, Artificial Sequence
  derived and/or modified sequence
atgcaggccaacggcgccggcggcggcggcggcggcggcggcggcggcggcggcggcggcggcggcggcggcggccagggccagacccccgagctggcctgcctgagcgcccagaacggcgagagcagccccagcagcagcagcagcgccggcgacctggcccacgccaacggcctgctgcccagcgcccccagcgccgccagcaacaacagcaacagcctgaacgtgaacaacggcgtgcccggcggcgccgccgccgccagcagcgccaccgtggccgccgccagcgccaccaccgccgccagcagcagcctggccacccccgagctgggcagcagcctgaagaagaagaagagactgagccagagcgacgaggacgtgatcagactgatcggccagcacctgaacggcctgggcctgaaccagaccgtggacctgctgatgcaggagagcggctgcagactggagcaccccagcgccaccaagttcagaaaccacgtgatggagggcgactgggacaaggccgagaacgacctgaacgagctgaagcccctggtgcacagcccccacgccatcgtggcccagaccttcagcgagaccagcatcaacttcttccccctgaccgccgccttctgccacgtgagaggctag

SEQ ID NO: 341144 - DNA, 651 bp, Artificial Sequence
  derived and/or modified sequence
atgcaggccaacggggccggagggggtggaggcggcggaggaggtggggggggcgggggaggcggaggtggcggtcaaggccaaacgcctgagctcgcttgcctctccgcccagaacggagaatcttccccttctagcagcagctcagcaggggaccttgctcatgccaacgggttgctgccgagtgccccctccgctgctagcaacaacagcaattctttgaatgtcaacaacggcgtgcctgggggtgcagcggctgcctccagcgccacagtcgccgccgcctcagctactactgctgcctcctcatccctcgccacaccagaactcggtagtagcctaaaaaagaagaagaggctctctcagtctgatgaagacgtgattaggctcattggccagcatttgaatggtttgggcctgaatcagaccgttgatctgctcatgcaagagagcggatgccgcctagagcatccaagcgctaccaaatttagaaatcacgtgatggaaggtgattgggataaagctgagaatgatctgaatgagcttaaaccacttgttcattccccccacgcgatcgtcgcccagacatttagcgaaactagcatcaacttctttcctctcaccgccgcattttgtcatgtgagaggctag

SEQ ID NO: 341145 - DNA, 651 bp, Artificial Sequence
  derived and/or modified sequence
atgcaggccaacggggccggcggcggcggcggcggcggcggcggcggcggcggcggcggcggcggcggcggcggccagggccagaccccagagctggcctgcctgagcgcccagaatggagagagcagccccagcagcagcagcagcgctggggacctggcccacgccaacggcctgctgcccagcgcccccagcgctgccagcaacaacagcaacagcctgaatgtgaacaacggggtgcctggaggagctgctgctgccagcagcgccaccgtggccgccgccagcgccaccacagctgccagcagcagcctggccaccccagagctgggcagcagcctgaagaagaagaagaggctgagccagagtgatgaagatgtgatccggctgattggccagcacctgaatggcctgggcctgaaccagacagtggacctgctgatgcaggagagcggctgccgcctggagcaccccagcgccaccaagttcaggaaccacgtgatggagggggactgggacaaggccgagaatgacctgaatgagctgaagcccctggtgcacagcccccacgccatcgtggcccagaccttcagcgagaccagcatcaacttcttccccctgacagctgccttctgccacgtgcggggctag

SEQ ID NO: 341146 - DNA, 651 bp, Artificial Sequence
  derived and/or modified sequence
atgcaggccaacggcgccggcggcggcggcggcggcggcggcggcgggggcggtggcggcggaggcggaggcggacaaggacagactccagaattggcctgcctttccgcacagaacggtgaatcttctccatcgagctctagttccgcaggtgatcttgcacacgcgaatggcctccttccctcggccccatctgcggcctctaataactccaacagcctaaacgtgaataacggagtgcccggcggagccgccgcggctagtagcgccactgtcgctgctgcaagcgctaccaccgccgcctcaagtagcctcgccacccccgaattgggcagctccctgaagaaaaagaagcgactctcccagagtgacgaagacgtgatacggctaattggtcagcatcttaacggactgggcctgaatcaaacggtggatctcctgatgcaagagtctggctgtcgactggagcatccgtctgcaacaaagttccggaaccatgtgatggagggcgattgggataaggcagagaacgacttaaacgagttgaagcctctggtgcactccccacacgccattgtagcccagacattttccgaaacttctattaactttttcccactgacggccgctttctgccacgtgcgcggctag

SEQ ID NO: 341147 - DNA, 651 bp, Artificial Sequence
  derived and/or modified sequence
atgcaggcaaatggtgctggtggcggagggggagggggtggcggtggtggaggcggtggcggtggagggggaggccagggtcagaccccggaactggcttgcctatcagcacagaatggggaatcaagcccatcatccagctcgagcgcaggggacctggcacacgccaatggactccttccctctgctccttcggccgcaagcaacaattccaatagcctgaacgtgaacaacggggtgcccggaggcgcagcggctgcgtcctcagctacggtggcagcagcttctgccacaactgccgcttcatcttctctggcaactcccgagctcggctcctctctaaaaaaaaagaagcgcctaagccagtccgacgaagacgttatacggctgatcgggcagcaccttaacggactgggccttaaccagacggtggacttacttatgcaggaatctggctgtcgcctggaacacccgtcggctaccaaattcagaaaccacgtgatggagggtgattgggataaggctgagaatgatctgaacgaactaaaacccctggtgcacagtcctcacgctattgtggcgcagactttctcggaaacctccattaatttttttccgcttacggcagcattttgtcacgtgaggggctag

SEQ ID NO: 341148 - DNA, 888 bp, Artificial Sequence
  derived and/or modified sequence
tgaaccaagctggccaccggcagcaaggacaccaccgtgatcatctggcaggtggaccccgacacccacctgctgaagctgctgaagaccctggagggccacgcctacggcgtgagctacatcgcctggagccccgacgacaactacctggtggcctgcggccccgacgactgcagcgagctgtggctgtggaacgtgcagaccggcgagctgagaaccaagatgagccagagccacgaggacagcctgaccagcgtggcctggaaccccgacggcaagagattcgtgaccggcggccagagaggccagttctaccagtgcgacctggacggcaacctgctggacagctgggagggcgtgagagtgcagtgcctgtggtgcctgagcgacggcaagaccgtgctggccagcgacacccaccagagaatcagaggctacaacttcgaggacctgaccgacagaaacatcgtgcaggaggaccaccccatcatgagcttcaccatcagcaagaacggcagactggccctgctgaacgtggccacccagggcgtgcacctgtgggacctgcaggacagagtgctggtgagaaagtaccagggcgtgacccagggcttctacaccatccacagctgcttcggcggccacaacgaggacttcatcgccagcggcagcgaggaccacaaggtgtacatctggcacaagagaagcgagctgcccatcgccgagctgaccggccacaccagaaccgtgaactgcgtgagctggaacccccagatccccagcatgatggccagcgccagcgacgacggcaccgtgagaatctggggccccgcccccttcatcgaccaccagaacatcgaggaggagtgcagcagcatggacagctag

SEQ ID NO: 341149 - DNA, 888 bp, Artificial Sequence
  derived and/or modified sequence
tgaacgaagctggctacggggtccaaagacaccaccgtgatcatctggcaggtggatcctgacacccacctgttgaagctgctgaaaactttggaaggccatgcatatggcgtgtcctacattgcctggtccccagatgacaactaccttgtagcctgtgggccggacgattgcagcgagttgtggctctggaacgtccaaacgggggaactacggacaaagatgtcccagtctcatgaagattctctgacatcagtagcgtggaatcctgatggtaaaaggttcgttaccggtggccagagggggcaattctaccagtgcgatctggacgggaatctgctcgattcatgggaaggggtccgcgtccagtgtctctggtgtctgtcagatggaaagaccgtcctagcatctgacacacatcaacggatcagggggtacaacttcgaagacctgacggacagaaacatagtgcaggaagaccacccaatcatgtccttcacaataagtaaaaatggtcggctggcacttctcaacgtcgccactcaaggcgtgcacctctgggatctgcaggatcgggtgctcgttagaaaataccagggtgtcacacaaggcttttacacaattcattcttgttttggcggacacaatgaggactttattgcatccgggagcgaagaccacaaggtttatatctggcataagagaagcgaattgccaatcgccgagcttaccggccatacgaggacagtgaactgcgtgtcctggaacccacagattccctcaatgatggcctccgcgtcagacgacggaacagtgcgcatctggggcccagcaccctttattgatcaccaaaatatagaagaggaatgcagctccatggattcttag

SEQ ID NO: 341150 - DNA, 888 bp, Artificial Sequence
  derived and/or modified sequence
tgaaccaagctggccaccggcagcaaggacaccaccgtcatcatctggcaggtggaccctgacacccacctgctgaagctgctgaagaccctggagggccacgcctacggcgtgtcctacatcgcctggagcccagatgacaactacctggtggcctgtggcccagatgactgcagcgagctgtggctgtggaatgtgcagacaggagagctgcggaccaagatgagccagagccatgaggacagcctgacctctgtggcctggaacccagatggcaagagatttgtgactggaggccagaggggccagttctaccagtgtgacctggatggcaacctgctggacagctgggagggcgtgcgggtgcagtgcctgtggtgcctgagtgatggcaagacagtgctggccagtgacacccaccagaggatccggggctacaactttgaggacctgacagacaggaacatcgtgcaggaggaccaccccatcatgtccttcaccatcagcaagaatggccgcctggccctgctgaatgtggccacccagggcgtgcacctgtgggacctgcaggacagagtgctggtgaggaagtaccagggcgtgacccagggcttctacaccatccacagctgcttcggcggccacaatgaagacttcatcgccagcggcagcgaggaccacaaggtgtacatctggcacaagaggtctgagctgcccatcgccgagctgaccggccacaccaggacagtgaactgtgtgtcctggaacccccagatccccagcatgatggccagcgccagtgatgatggcaccgtgcgcatctggggccctgcccccttcatcgaccaccagaacatcgaggaggagtgcagctccatggacagctag

SEQ ID NO: 341151 - DNA, 888 bp, Artificial Sequence
  derived and/or modified sequence
tgaaccaagctggccaccggcagcaaggacaccaccgtgatcatctggcaggtagaccccgacacccatctcctcaagcttttgaagaccctggagggtcacgcctacggggtgagctacattgcctggtccccagatgacaattacctggtcgcctgcggtcccgacgattgtagtgaactgtggctctggaacgtacagacgggagagttgcggacaaagatgtctcagtcacatgaagactctctcaccagcgtggcatggaacccagatgggaaaaggttcgtgacgggcggccaaagaggccagttctaccaatgtgacttggatggcaacctgttggattcatgggagggtgtccgggtgcagtgcctttggtgtctctcagatggtaaaaccgtgctggccagcgatacacaccagcggattagaggctacaatttcgaagacttgacagataggaatatcgtgcaggaagaccatcctattatgagtttcacaatcagtaagaacgggcgcttggcgttactaaatgtggcaactcagggggtacatttgtgggacctgcaggacagagttctggtgcgcaagtaccagggagtgactcaggggttctataccatccacagttgtttcgggggccataacgaggatttcatcgctagtggttccgaggaccataaggtctacatctggcataaacggtcagagcttcctatcgcggaactgacagggcacaccaggaccgtgaattgtgtgtcttggaatccccaaatcccctccatgatggcctccgcaagcgatgacggcacagtaagaatctggggaccggccccatttatcgaccaccagaatattgaggaagagtgttcctccatggactcctag

SEQ ID NO: 341152 - DNA, 888 bp, Artificial Sequence
  derived and/or modified sequence
taaacaaagttggctaccggcagtaaagacaccacagttatcatctggcaggttgatccagatacgcacctgctaaaattgttgaagacgctggagggacacgcttacggcgtgtcctatatagcctggtcacctgacgacaattacctagttgcttgcggacccgatgattgctcagaactctggctctggaacgtgcaaactggtgagctgcgcactaagatgtctcagtctcacgaagacagcttgacttcagtcgcttggaacccagacgggaagcggttcgttactggcggtcagagggggcaattttaccagtgcgatcttgacggaaacctgctggatagttgggaaggagtaagggttcagtgcttatggtgcttatcagatggaaagactgttctggctagtgatacccaccagcgtatacgcggatacaattttgaggatttgactgacagaaatattgtacaggaagatcaccccataatgagcttcaccatctctaagaacgggcgtttagctttgttaaatgttgctactcaaggcgtacatctgtgggatctccaggatcgcgtgctggtccggaagtatcagggggttacacagggcttctacacaatccactcctgtttcggtggccacaatgaggattttattgcatccggctcagaggaccataaagtttatatctggcataaacgttctgagctgcctatcgctgagctgacggggcacaccagaactgtgaattgcgtcagctggaatccacagattccttctatgatggcctcagcatctgacgatgggacagttcgtatatggggcccagcaccattcatcgaccatcagaacatagaagaagagtgctcgagcatggactcttag

SEQ ID NO: 341153 - DNA, 1725 bp, Artificial Sequence
  derived and/or modified sequence
cactaaactagcaacaggatcaaaagatacaacagttatcatatggcaagttgatccggatacacacctgctaaaactgcttaaaacattagaaggacatgcttatggcgtttcttatattgcatggagtccagatgacaactatcttgttgcttgtggcccagatgactgctctgagctttggctttggaatgtacaaacaggagaactaaggacaaaaatgagccagtctcatgaagacagtttgacaagtgtggcttggaatccagatgggaagcgctttgtgactggaggtcagcgtgggcagttctatcagtgtgacttagatggtaatctccttgactcctgggaaggggtaagagtgcaatgcctttggtgcttgagtgatggaaagactgttctggcatcagatacacaccagcgaattcggggctataacttcgaggaccttacagataggaacatagtacaagaagatcatcctattatgtcttttactatttcaaaaaatggccgattagctttgttaaatgtagcaactcagggagttcatttatgggacttgcaagacagagttttagtaagaaagtatcaaggtgttacacaagggttttatacaattcattcatgttttggaggccataatgaagacttcatcgctagtggcagtgaagatcacaaggtttacatctggcacaaacgtagtgaactgccaattgcggagctgacagggcacacacgtacagtaaactgtgtgagctggaacccacagattccatccatgatggccagcgcctcagatgatggcactgttagaatatggggaccagcaccttttatagaccaccagaatattgaagaggaatgcagtagcatggatagttgatggatgttggttcctgcaaacaagaactgaccctatcacctctgcctcacagtgggtaaatatatcatacatctcttgaaagggaaaatatccatgtcagtttctttcacagtagaagaatggctgcttttgaatggggaggaaagaagacatttttcttaatatcctttttgtcccatctctaaaatgtataaatattttgatttggttttactttaatttctcattcataatttcgcaactgtccttttgggttgccctccaacacattacttccatttcagaaaccatatctgatttaatataaactgctaacttaagaagaggtgaatttgcatttacacttagacactttctaaaaacagggtgaacttaattgaaatttttcagtgttgttaagctattgttatagtagctgccctatagttacaaaaataaaaactataaaaacccatcccctatctacttaatccagatagcctggatttaacaaaaccaatagtataaaaatgtgtgtgtgtgttctgtgtgtgtgtgagagagagagtacttgattcattaaaaagtcctggaaacagctgttctaggatcttgtcatttttactgaaagtctcgtgcacatgtgaagtgccctctgagtttaaggtttggttaatactggtatatttttataagattgaaattgtgtccccatctttaacttaaacattttcattatcagggtcaatgtgctagaactgaattgtaacatttttaggcacagatggaaaaaaatgttattggctccttgaaaatgtgtgtgtgtggcgaggggaatagatccacaaaagcatgtatgt

SEQ ID NO: 341154 - DNA, 396 bp, Artificial Sequence
  derived and/or modified sequence
atggagatatgtgctgatccccagttcattataggcggagctacccgtacggacatctgtcagggagcactgggagactgctggcttttagctgccatcgccagtctcacactgaacgaagagattctggcccgcgtagtccctctgaaccagagctttcaggagaattatgctgggatcttccacttccagttctggcaatatggcgagtgggttgaagtcgtcgtcgatgataggctgccaacaaaggatggcgaactgctgttcgttcactcggcagaaggaagtgaattttggagcgcactcttagaaaaggcctacgctaaaatcaacgggtgctacgaggcactgtctggcggagccaccacagaaggctttgaggatttcacaggatag

SEQ ID NO: 341155 - DNA, 396 bp, Artificial Sequence
  derived and/or modified sequence
atggagatctgtgccgacccccagttcatcattggaggagccaccaggacagacatctgccagggcgccctgggggactgctggctgctggccgccatcgccagcctgaccctgaatgaggagatcctggcccgggtggtgcccctgaaccagagcttccaggagaactatgccggcatcttccacttccagttctggcagtacggggagtgggtggaggtggtggtggatgaccggctgcccaccaaggatggagagctgctgtttgtgcacagcgctgagggcagcgagttctggagcgccctgctggagaaggcctatgccaagatcaatggctgctatgaggccctgagcggcggggccaccacagagggctttgaggacttcaccggctag

SEQ ID NO: 341156 - DNA, 396 bp, Artificial Sequence
  derived and/or modified sequence
atggagatctgcgccgacccccagttcatcatcggcggcgccacccgtacagatatttgtcagggtgccttgggagattgttggctgctcgctgctattgcttccctaactctgaatgaggagatactggcacgggtggtacccctcaaccagtcctttcaggaaaactacgctgggatttttcactttcagttctggcagtatggagaatgggtggaggtcgttgtggatgacagactccccacaaaagatggagagctactctttgtgcacagcgccgaggggtctgaattctggtccgccctcctagagaaagcatacgccaaaatcaacgggtgctacgaagccctgagcggtggagctactacagaaggttttgaagattttactggctag

SEQ ID NO: 341157 - DNA, 396 bp, Artificial Sequence
  derived and/or modified sequence
atggagatatgcgctgacccgcagtttattataggaggggctactcgcaccgacatctgtcagggagctctcggcgactgctggcttttggcagccatcgcatcgctgacccttaatgaggagattctagcccgtgtggtgcctttaaaccagtcattccaggagaactatgcgggtatttttcactttcagttctggcagtacggagagtgggtggaagtagttgttgacgaccgactgccaaccaaggatggggagctgctctttgttcactcagctgaaggatctgagttctggtcggcactgctggagaaagcttacgcgaagatcaatggctgctatgaggcccttagcggcggagcgacaaccgaaggatttgaggacttcacgggctag

SEQ ID NO: 341158 - DNA, 577 bp, Artificial Sequence
  derived and/or modified sequence
caaaggaacgaatttccaggatgttcgactatgtggagaaaacaaaaaaaaagcaaagaaaaaaatatttttaaagaaagaaagaaggccaggtgcagtggttcacgcctgtaatcccaacactttgggaggccgaggcagacagatcacctgaggtcaggagttcaagaccagcctggccaacatggagatctgcgctgacccccagtttatcattggaggagccacccgcacagacatctgccaaggagccctgggtgactgctggctgctggcagccattgcctccctcaccttgaatgaagaaatcctggctcgagtcgtccccctaaaccagagcttccaggaaaactatgcagggatctttcacttccagttctggcaatacggcgagtgggtggaggtggtggtggatgacaggctgcccaccaaggacggggagctgctctttgtgcattcagccgaagggagcgagttctggagcgccctgctggagaaggcatacgccaagatcaacggatgctatgaagcgctatcagggggtgccaccactgagggcttcgaagacttcaccgga

SEQ ID NO: 341159 - DNA, 396 bp, Artificial Sequence
  derived and/or modified sequence
atggagatctgcgccgacccccagttcatcatcggcggcgccaccagaaccgacatctgccagggcgccctgggcgactgctggctgctggccgccatcgccagcctgaccctgaacgaggagatcctggccagagtggtgcccctgaaccagagcttccaggagaactacgccggcatcttccacttccagttctggcagtacggcgagtgggtggaggtggtggtggacgacagactgcccaccaaggacggcgagctgctgttcgtgcacagcgccgagggcagcgagttctggagcgccctgctggagaaggcctacgccaagatcaacggctgctacgaggccctgagcggcggcgccaccaccgagggcttcgaggacttcaccggctag

SEQ ID NO: 341160 - DNA, 564 bp, Artificial Sequence
  derived and/or modified sequence
atgaagaagaccctgctgcacgagatgatccacgcctacctgttcgtgaccaacaacgacaaggacagagagggccacggccccgagttctgcaagcacatgcacagaatcaacagcctgaccggcgccaacatcaccgtgtaccacaccttccacgacgaggtggacgagtacagaagacactggtggagatgcaacggcccctgccagcacagacccccctactacggctacgtgaagagagccaccaacagagagcccagcgcccacgactactggtgggccgagcaccagaagacctgcggcggcacctacatcaagatcaaggagcccgagaactacagcaagaagggcaagggcaaggccaagctgggcaaggagcccgtgctggccgccgagaacaaggacaagcccaacagaggcgaggcccagctggtgatccccttcagcggcaagggctacgtgctgggcgagaccagcaacctgcccagccccggcaagctgatcaccagccacgccatcaacaagacccaggacctgctgaaccagaaccacagcgcctag

SEQ ID NO: 341161 - DNA, 564 bp, Artificial Sequence
  derived and/or modified sequence
atgaaaaagaccctactgcacgaaatgattcacgcatacctttttgtgactaacaatgataaagacagggaggggcacggaccagagttttgtaaacatatgcataggatcaactcactaacaggagcgaatattactgtgtaccacactttccacgatgaggtcgatgagtatcgtcggcactggtggagatgcaacggtccttgtcagcataggccaccctactacggatatgttaagagggcaacaaatagagaaccatccgcccacgactactggtgggccgaacatcagaaaacttgtggtggtacctacattaaaataaaagaacccgagaattattccaagaaaggaaaggggaaagccaagcttggaaaggagcctgtgcttgctgctgagaataaagataagccaaatcgaggagaagcacagctggtgattcctttcagcggcaaagggtacgtcctcggcgagacttccaatctacctagtccaggcaaactcatcacaagccatgccattaataagactcaggacctcctgaatcagaatcacagcgcttag

SEQ ID NO: 341162 - DNA, 564 bp, Artificial Sequence
  derived and/or modified sequence
atgaagaagaccctgctgcacgagatgattcatgcctacctgtttgtgaccaacaatgacaaggaccgggagggccacggccctgagttctgcaagcacatgcaccgcatcaacagcctgactggagccaacatcaccgtgtaccacaccttccatgatgaggtggatgagtacagaagacactggtggcgctgcaatggcccctgccagcacaggcctccctactacggctacgtgaagagggccaccaaccgggagcccagcgcccatgactactggtgggccgagcaccagaagacctgtggcggcacctacatcaagatcaaggagcctgagaactacagcaagaagggcaagggcaaggccaagctgggcaaggagcctgtgctggccgctgagaacaaggacaagcccaacagaggagaggcccagctggtgatccccttcagcggcaagggctacgtgctgggggagaccagcaacctgcccagccctgggaagctgatcaccagccacgccatcaacaagacccaggacctgctgaaccagaaccacagcgcctag

SEQ ID NO: 341163 - DNA, 564 bp, Artificial Sequence
  derived and/or modified sequence
atgaagaagaccctgctgcacgagatgatccacgcctacctgttcgtcaccaacaatgacaaggaccgtgagggacatggccccgaattttgcaagcacatgcataggatcaactctctgacgggggcgaacatcacagtgtatcatacattccacgacgaggtcgatgaatatcgacgccactggtggaggtgcaacggaccttgtcagcatcgacctccgtactacggatacgtcaagcgcgccaccaatcgcgagccttccgctcatgactattggtgggcagaacaccagaagacatgcgggggaacatacatcaaaattaaagagcctgaaaactactccaaaaaagggaagggtaaggccaaactgggcaaagaaccagtgctggccgctgaaaataaggataagcctaatcggggagaggcccagctggtgatccctttctccggaaaggggtacgtgttaggcgaaacatccaatctgcccagtccaggcaaattgattaccagccacgcaattaacaagacacaagatttgttgaaccagaaccatagtgcgtag

SEQ ID NO: 341164 - DNA, 564 bp, Artificial Sequence
  derived and/or modified sequence
atgaagaaaaccctgcttcacgaaatgatccatgcctacttgttcgtgacaaacaacgacaaagacagagagggacatgggccagaattctgtaagcatatgcaccgaatcaatagtttgacaggcgctaacattactgtctaccataccttccacgacgaggtggatgaatataggcgccactggtggaggtgtaatggcccttgccagcaccgaccaccctactacggctatgtcaaacgagcaactaatcgagagccgtccgctcacgattactggtgggcggaacaccagaaaacctgtggagggacatacattaaaattaaggaacctgagaactattctaagaagggcaaagggaaagctaagctggggaaagagccagtcctagcagccgagaacaaagacaaaccaaacagaggcgaggcgcagctcgttatcccattttctggcaaaggatatgtgctcggggaaacatcaaatttgccgagccctggtaaactgatcacctctcatgccatcaacaagacccaggacttgctcaaccaaaatcactctgcctag

SEQ ID NO: 341165 - DNA, 795 bp, Artificial Sequence
  derived and/or modified sequence
ttgggccatgtggtccgcatcgtattccactaggtccccgttgtacaccaggtgtgctgggatatgcagctatgaagggaagggtggaatgtgttccatccgtctcagcgaaccccttttgaagttgaggccaagaaaggatcttgtagagcataattttataagactaaaattcattaatgacagtctagttcttctgatggaaattgttttttaaaaaaattatggaggatcatgaaaaagaccctcctgcatgaaatgatacatgcctatttatttgtcactaataacgacaaagaccgagaagggcatggtccagaattttgtaaacatatgcatcgcatcaacagcctgactggagccaatataacggtataccatacttttcacgatgaggtggatgagtatcggcgacactggtggcgctgcaatgggccgtgccagcacaggccaccgtattacggctatgtcaaacgagctactaacagggaaccctctgctcatgactattggtgggctgagcaccagaaaacctgtggaggcacttacataaaaatcaaggaaccagagaattactcaaaaaaaggcaaaggaaaggcaaaactaggaaaggaaccagtattggccgcagagaataaagataaacccaacagaggtgaggcccagctagtaatcccttttagtgggaaaggatatgttctaggagaaacaagcaatttaccttcacctgggaaactgatcacttcacatgccattaataaaacccaagatcttttaaatcaaaaccattcagca

SEQ ID NO: 341166 - DNA, 2130 bp, Artificial Sequence
  derived and/or modified sequence
atggagaagcacagaggcgtgctggagtgccaggtgagcagagccagcgcccaggtgagatggttcaagggcagccaggagctgcagcccggccccaagtacgagctggtgagcgacggcctgtacagaaagctgatcatcagcgacgtgcacgccgaggacgaggacacctacacctgcgacgccggcgacgtgaagaccagcgcccagttcttcgtggaggagcagagcatcaccatcgtgagaggcctgcaggacgtgaccgtgatggagcccgcccccgcctggttcgagtgcgagaccagcatccccagcgtgagaccccccaagtggctgctgggcaagaccgtgctgcaggccggcggcaacgtgggcctggagcaggagggcaccgtgcacagactgatgctgagaagaacctgcagcaccatgaccggccccgtgcacttcaccgtgggcaagagcagaagcagcgccagactggtggtgagcgacatccccgtggtgctgaccagacccctggagcccaagaccggcagagagctgcagagcgtggtgctgagctgcgacttcagacccgcccccaaggccgtgcagtggtacaaggacgacacccccctgagccccagcgagaagttcaagatgagcctggagggccagatggccgagctgagaatcctgagactgatgcccgccgacgccggcgtgtacagatgccaggccggcagcgcccacagcagcaccgaggtgaccgtggaggccagagaggtgaccgtgaccggccccctgcaggacgccgaggccaccgaggagggctgggccagcttcagctgcgagctgagccacgaggacgaggaggtggagtggagcctgaacggcatgcccctgtacaacgacagcttccacgagatcagccacaagggcagaagacacaccctggtgctgaagagcatccagagagccgacgccggcatcgtgagagccagcagcctgaaggtgagcaccagcgccagactggaggtgagagtgaagcccgtggtgttcctgaaggccctggacgacctgagcgccgaggagagaggcaccctggccctgcagtgcgaggtgagcgaccccgaggcccacgtggtgtggagaaaggacggcgtgcagctgggccccagcgacaagtacgacttcctgcacaccgccggcaccagaggcctggtggtgcacgacgtgagccccgaggacgccggcctgtacacctgccacgtgggcagcgaggagaccagagccagagtgagagtgcacgacctgcacgtgggcatcaccaagagactgaagaccatggaggtgctggagggcgagagctgcagcttcgagtgcgtgctgagccacgagagcgccagcgaccccgccatgtggaccgtgggcggcaagaccgtgggcagcagcagcagattccaggccaccagacagggcagaaagtacatcctggtggtgagagaggccgcccccagcgacgccggcgaggtggtgttcagcgtgagaggcctgaccagcaaggccagcctgatcgtgagagagagacccgccgccatcatcaagcccctggaggaccagtgggtggcccccggcgaggacgtggagctgagatgcgagctgagcagagccggcacccccgtgcactggctgaaggacagaaaggccatcagaaagagccagaagtacgacgtggtgtgcgagggcaccatggccatgctggtgatcagaggcgccagcctgaaggacgccggcgagtacacctgcgaggtggaggccagcaagagcaccgccagcctgcacgtggaggagaaggccaactgcttcaccgaggagctgaccaacctgcaggtggaggagaagggcaccgccgtgttcacctgcaagaccgagcaccccgccgccaccgtgacctggagaaagggcctgctggagctgagagccagcggcaagcaccagcccagccaggagggcctgaccctgagactgaccatcagcgccctggagaaggccgacagcgacacctacacctgcgacatcggccaggcccagagcagagcccagctgctggtgcagggcgaggccgccaagtgcgccagagcctag

SEQ ID NO: 341167 - DNA, 2130 bp, Artificial Sequence
  derived and/or modified sequence
atggaaaagcacaggggagttctagagtgtcaggtctccagagcttcggctcaagttaggtggttcaaagggtcccaggagttacaacctggccctaagtatgaactagtgagcgatgggctgtatcgcaagctgatcatatctgacgtacacgcagaggacgaagacacctatacctgcgatgctggtgatgttaaaacatccgcccaattcttcgtggaggaacagtccatcacgatagtgcggggcctgcaggacgttactgtaatggaaccggctcctgcgtggttcgagtgcgagaccagcattcccagtgtgcgtccccctaaatggctgttgggaaaaaccgtgctccaagcaggtggaaacgtgggattggagcaggagggcacggtccacaggctgatgttacgaaggacatgtagtaccatgaccggtcccgttcacttcaccgtcggcaagtcccggtcatccgcccgactggtagtgagcgatatacctgtcgtgttaaccaggccgctcgaaccaaagaccgggcgcgaactgcagagcgtggtgctaagctgcgatttcagacctgctcctaaggctgtgcagtggtacaaggacgatactcctctaagcccatccgaaaagttcaaaatgagtctggaagggcagatggcagaacttcgaatcctgcgacttatgccagcagatgccggagtgtacagatgccaagcagggtccgcccactcgtccacagaggttaccgttgaggctagagaggtgactgttacaggtccactgcaggatgccgaggctacagaggagggctgggcaagtttctcctgtgaactgagccacgaggatgaggaagtggaatggtctctgaatggcatgcctctgtacaacgattcatttcatgaaattagccataaaggtcgacgccacacgcttgtgcttaagtcaatacaacgcgctgatgctggcatcgtccgtgcgtcgtctctcaaagtttctaccagcgctagactggaagtacgggtgaagcctgtagtgttcttgaaggcgttagatgatctgagcgcagaagaacggggcacactagccctgcagtgtgaggtctctgatcccgaggcacacgtggtatggcggaaggacggtgtccaactaggaccttccgacaagtatgattttttgcacacagcaggaactcggggtttggtggttcacgacgtctcacctgaggacgccgggctctacacatgtcacgtgggctcagaggaaactcgggcccgtgtgagagtgcatgatctccacgtgggcattacaaagcgcctcaaaaccatggaagtactagaaggggagagctgtagcttcgagtgtgtgctgagccatgagagcgccagcgatcctgcgatgtggactgtcggggggaaaaccgttgggagctcctcacgttttcaggctacgagacagggacggaagtatatcctggtcgtgagggaggctgctcctagtgatgcaggcgaagtggttttctctgtccgcgggctgacttccaaagcgtccctgatcgtgcgagaacgccccgccgctattattaagccgctcgaggaccaatgggtagcgcctggggaagatgtagagctacgctgtgagctctctagagccggcacccctgtgcactggttgaaagaccggaaggccatccgaaagagtcagaagtacgacgtggtgtgtgagggtacaatggccatgttggtcattcgaggtgcctctctcaaggatgccggagaatatacttgtgaagtggaggcatccaagagcacagcctccctgcacgtcgaggaaaaagcaaactgctttactgaggaactcacgaacctacaggtagaggagaaggggacagccgtatttacctgtaaaactgagcaccccgcggccacagtaacatggaggaagggcttgctggaactgagagcttcagggaaacaccagccatctcaggagggcctaacactccggcttactatctccgctctcgagaaggcggacagcgacacatacacttgtgacatcggacaggcacagtcccgggcccaattgctcgtccagggcgaggccgcaaaatgtgcccgcgcctag

SEQ ID NO: 341168 - DNA, 2712 bp, Artificial Sequence
  derived and/or modified sequence
ctgacaacgtgcgcatccgccaggaaggaaggacatacactctcatctaccggagagtcctggcggaagatgcaggagagatccaatttgtagccgaaaatgcagaatcgcgagcccagctccgagtgaaggagctgccagtgaccctcgtgcgcccgctgcgggacaagattgccatggagaagcaccgcggtgtgctggagtgtcaggtgtcccgggccagcgcccaggtgcggtggttcaagggcagtcaggagctgcagcccgggcccaagtacgagctggtcagtgatggcctctaccgcaagctgatcatcagtgatgtccacgcagaggacgaggacacctacacctgtgacgccggtgatgtcaagaccagtgcacagttcttcgtggaagagcaatccatcaccattgtgcggggtctgcaggacgtgacagtgatggagcccgctcctgcctggtttgagtgtgagacctccatcccctcagtgcggccacctaagtggctcctggggaagacggtgttgcaggctggggggaacgtgggcctggagcaggagggcacggtgcaccggctgatgctgcggcggacctgctccaccatgaccgggcccgtgcacttcaccgttggcaagtcgcgctcctctgcccgcctggtggtctcagacatccccgtagtcctcacacggccgttggagcccaagacagggcgtgagctgcagtcagtggtcctgtcctgcgacttccggccagcccccaaggctgtgcagtggtacaaggatgacacgcccctgtctccctctgagaagtttaagatgagcctggagggtcagatggctgagctgcgcatcctccggctcatgcctgctgatgctggtgtctaccggtgccaggcgggcagtgcccacagcagcactgaggtcactgtggaagcgcgggaggtgacagtgacagggccgctacaggatgcagaggccacggaggagggctgggccagcttctcctgtgagctgtcccacgaggatgaggaggtcgagtggtcgctcaacgggatgcccctgtacaacgacagcttccatgagatctcacacaagggccggcgccacacgctggtactgaagagcatccagcgggctgatgcgggcatagtacgcgcctcctccctgaaggtgtcgacctctgcccgcctggaggtccgagtgaagccggtggtgttcctgaaggcgctggatgacctgtccgcagaggagcgcggcaccctggccctgcagtgtgaagtctctgaccccgaggcccatgtggtgtggcgcaaagatggcgtgcagctgggccccagtgacaagtatgacttcctgcacacggcgggcacgcgggggctcgtggtgcatgacgtgagccctgaagacgccggcctgtacacctgccacgtgggctccgaggagacccgggcccgggtccgcgtgcacgatctgcacgtgggcatcaccaagaggctgaagacaatggaggtgctggaaggggaaagctgcagctttgagtgcgtcctgtcccacgagagtgccagcgacccggccatgtggacagtcggtgggaagacagtgggcagctccagccgcttccaggccacacgtcagggccgaaaatacatcctggtggtccgggaggctgcaccaagtgatgccggggaggtggtcttctctgtgcggggcctcacctccaaggcctcactcattgtcagagagaggccggccgccatcatcaagcccctggaagaccagtgggtggcgccaggggaggacgtggagctgcgctgtgagctgtcacgggcgggaacgcccgtgcactggctgaaggacaggaaggccatccgcaagagccagaagtatgatgtggtctgcgagggcacgatggccatgctggtcatccgcggggcctcgctcaaggacgcgggcgagtacacgtgtgaggtggaggcttccaagagcacagccagcctccatgtggaagaaaaagcaaactgcttcacagaggagctgaccaatctgcaggtggaggagaaaggcacagctgtgttcacgtgcaagacggagcaccccgcggccacagtgacctggcgcaagggcctcttggagctacgggcctcagggaagcaccagcccagccaggagggcctgaccctgcggctcaccatcagtgccctggagaaggcagacagcgacacctatacctgcgacattggccaggcccagtcccgggcccagctcctagtgcaaggtgaggcggccaagtgtgctcgggcctaggctttgaatggcacggagacttggaggtggacaggcccagcctcagtttcttatcatgagggtatagggggtgcaccctgggtggtcactgaggctccccagcatggctgtgaatgagctgctggtgctcacttactcgtgtgtttatttggtcactgtgtgtttctcccacatgccccgtgtgcctggcccccatgcgtaagctcagcgtgtatccgtacataaaacgtgtcacccttatcccagagggacagcctgactcagccgtgccaggcagcctcaggtgctcccagggaagaactgatggtcattagggttgtcattgagagttacagtggcattttagtctttttcttgttgtttacaacagaatacctgaaactgggtaatttataaaggaaataaa

SEQ ID NO: 341169 - DNA, 2130 bp, Artificial Sequence
  derived and/or modified sequence
atggagaagcaccggggcgtgctggagtgccaggtgtcccgggccagcgcccaggtgcgctggttcaagggcagccaggagctgcagcccggccccaagtatgagctggtgtctgatggcctgtacaggaagctgatcatcagtgatgtgcatgctgaagatgaggacacctacacctgtgatgctggagatgtgaagaccagcgcccagttctttgtggaggagcagagcatcaccatcgtgcggggcctgcaggatgtgacagtgatggagcccgccccagcctggtttgaatgtgagaccagcatccccagcgtgcggccccccaagtggctgctgggcaagacagtgctgcaggccggcggcaatgtgggcctggagcaggagggcaccgtgcaccggctgatgctgcggaggacctgcagcaccatgactggacctgtgcacttcaccgtgggcaagagccgcagcagcgcccggctggtggtgtctgacatccctgtggtgctgacccggcccctggagcccaagacaggccgggagctgcagagcgtggtgctgagctgtgacttccggcctgcccccaaggctgtgcagtggtacaaggatgacacccccctgagccccagcgagaagttcaagatgagcctggagggccagatggccgagctgcgcatcctgcggctgatgccagcagatgctggggtgtaccgctgccaggccggcagcgcccacagcagcacagaggtgacagtggaggcccgggaggtgacagtgacaggccccctgcaggatgctgaggccacagaggagggctgggccagcttcagctgtgagctgagccatgaagatgaggaggtggagtggagcctgaatggcatgcccctgtacaatgacagcttccacgagatcagccacaagggcagaagacacaccctggtgctgaagagcatccagagagcagatgctggcatcgtgcgggccagcagcctgaaggtgtccaccagcgcccggctggaggtgcgggtgaagcctgtggtgttcctgaaggccctggatgacctgtctgctgaggagcggggcaccctggccctgcagtgtgaggtgtctgaccctgaggcccacgtggtgtggaggaaggatggagtgcagctgggccccagcgacaagtatgacttcctgcacacagctggcacccggggcctggtggtgcatgatgtgtccccagaagatgctggcctgtacacctgccacgtgggcagcgaggagacccgggcccgggtgcgggtgcatgacctgcacgtgggcatcaccaagaggctgaagaccatggaggtgctggagggggagagctgcagctttgaatgtgtgctgagccatgagagcgccagtgaccctgccatgtggacagtgggcggcaagacagtgggcagcagcagccgcttccaggccacccggcagggcaggaagtacatcctggtggtgcgggaggccgcccccagtgatgctggggaggtggtgttttctgtgcggggcctgaccagcaaggccagcctcatcgtgcgggagaggcctgctgccatcatcaagcccctggaggaccagtgggtggcccctggagaagatgtggagctgcgctgtgagctgagccgggccggcacccctgtgcactggctgaaggacaggaaggccatcaggaagagccagaagtatgatgtggtgtgtgagggcaccatggccatgctggtgatccggggggccagcctgaaggatgctggggagtacacctgtgaggtggaggccagcaagagcacagccagcctgcacgtggaggagaaggccaactgcttcacagaggagctgaccaacctgcaggtggaggagaagggcacagctgtgttcacctgcaagacagagcaccctgctgccaccgtgacctggaggaagggcctgctggagctgcgggccagcggcaagcaccagcccagccaggagggcctgaccctgcggctgaccatcagcgccctggagaaggctgacagcgacacctacacctgtgacatcggccaggcccagagccgggcccagctgctggtgcagggcgaggccgccaagtgtgcccgggcctag

SEQ ID NO: 341170 - DNA, 2130 bp, Artificial Sequence
  derived and/or modified sequence
atggagaagcaccggggcgtgctggagtgccaggtgagccgggcctcagctcaggtgagatggtttaaaggaagccaggaacttcaaccggggcccaaatatgagctggttagtgatggtttgtatagaaagttgattatctctgacgtgcatgcagaggacgaagatacctacacctgcgatgccggcgacgtgaagacaagcgctcagtttttcgttgaggagcagagtattactatcgtcaggggtcttcaggatgtgacggtcatggaaccagcccccgcatggttcgagtgtgagacttcaatcccttcagtccgccctcccaaatggttgttagggaaaaccgtcttacaggcgggcgggaacgttggtctcgaacaagagggcactgtgcatcgcctaatgctgagaaggacctgtagcacaatgacgggtcctgtgcactttactgtaggaaagtctcggtcaagcgcacgactggtggtgagcgacatccccgtggttctcactagacccctggagccaaagacaggcagggagttacagtcggtggtgctgtcatgtgatttcagacctgctcccaaggccgttcagtggtataaggacgacacacctctgtctccctccgagaagtttaaaatgtctctggaggggcagatggctgaactacgcattcttcgcttgatgccggccgatgctggcgtgtatagatgccaggcaggcagtgcacattcatccacagaagttactgtggaagcaagggaagtgaccgttaccggaccccttcaggacgcggaggcgacagaggagggctgggcttctttcagttgcgaactctcacatgaggacgaggaggtcgagtggagtcttaatgggatgccactttataacgattcttttcacgaaattagccacaaaggcaggaggcacactctcgtgctgaagtccatccagcgagcggatgctggaatcgtccgcgcaagctccttgaaagtctccacctccgcacggttagaagtgagggtcaagccggtcgtatttcttaaggctctcgacgacctctctgcagaggaaagaggcacgctcgctctccagtgtgaggtgtccgatcccgaggcacatgtggtgtggaggaaagacggggttcagctgggcccatcagataagtatgatttcctgcacacggcgggcacccggggcctcgtagtccacgacgtgtctcctgaggatgccggtctctatacatgtcacgtaggaagcgaggagaccagggcacgagttcgggtgcacgatctgcacgttggcattaccaagagactcaaaaccatggaagtactggagggagagtcttgcagctttgagtgtgtgctctcgcacgaatcggctagtgacccagccatgtggactgttggaggaaagaccgtgggctcctcctctaggtttcaggctaccaggcagggcaggaagtatattctggtggtacgagaagccgccccctccgatgcgggcgaagttgtcttctcagttagagggctgacatcaaaggccagtctgatcgtgcgcgagcggcccgccgcaattatcaaacctctggaagatcaatgggttgcccctggggaggacgtggagctcaggtgtgagctcagtagagccggcacccccgtgcactggttaaaggacaggaaggccattcggaagtctcagaaatatgacgtggtttgtgaggggaccatggctatgctcgtgattcgcggcgcaagtctgaaagatgccggcgagtacacatgcgaagtcgaagctagtaaatctacggccagtctccacgtcgaggaaaaggcaaattgcttcacggaggagctgaccaacttacaagttgaagagaaagggactgcggtcttcacctgtaaaacagagcatcctgccgccacagtgacttggaggaagggactccttgaattgcgggctagtggcaagcatcaaccctcgcaagagggtttaaccctgagactgacgatttccgcacttgaaaaggctgattcggacacctacacttgcgacatcggccaggcgcagtcgcgcgcccaactcctggtacagggtgaggcagccaagtgtgcacgggcctag

SEQ ID NO: 341171 - DNA, 2130 bp, Artificial Sequence
  derived and/or modified sequence
atggagaaacaccggggagtcctggaatgtcaggtcagccgtgccagcgcccaggtaagatggttcaaaggctcccaagaacttcagcccggtcccaagtacgagttggtgtctgatggcctctataggaaactgatcatatctgatgttcacgccgaggatgaggacacctatacttgtgatgctggtgacgtcaaaacatcagctcagttcttcgtggaggagcaatctatcaccatcgtaagagggctgcaggacgtcaccgtgatggagcccgctcctgcctggttcgaatgtgaaaccagcatcccaagcgtgcgaccacccaaatggttgctcggcaaaacagtgctgcaggcgggaggcaatgtgggcctcgaacaggaaggaactgttcaccgcctgatgctgcgcagaacctgcagtaccatgactggtccggtgcacttcaccgtgggtaagagtcgctcctcagccagactggttgtaagcgatattcccgtggtactgactaggcccttagagcccaagaccggtcgagaactgcagtccgtcgtgctaagctgcgactttcggcctgctcctaaagccgttcaatggtataaggacgacacaccacttagccctagcgagaaatttaagatgtcacttgaggggcagatggcagagctgcggattctcaggctgatgcccgcagacgctggcgtctatcggtgtcaggcagggagtgcgcactcttctaccgaggtgactgtcgaggcaagggaggtgaccgtgaccggtccccttcaggacgccgaggccacggaagagggttgggctagcttttcctgtgaactgagccatgaagacgaagaggtagagtggagtcttaacggaatgcccctatataatgactcttttcacgagatttcccacaaaggtcgaaggcatactctggttttgaagagcattcagagggcagatgctggtattgtgcgcgctagcagcttgaaagtgagcaccagcgccaggctggaagtacgcgttaagccagtcgtgttcctgaaagccctggacgacctgagcgccgaggagagggggaccttggcattacagtgcgaagtgagtgatcccgaggcacacgtcgtgtggcgcaaggatggggttcagctggggccttctgataaatatgattttctacataccgctgggactcgcggactggtggtgcacgatgtaagtcccgaggatgctgggttatatacatgtcatgtaggctccgaggaaactagggccagggttagggtacacgacttacatgtggggatcaccaaaagactgaagactatggaggtactagagggcgagagctgctcgttcgagtgtgttctttcacacgaaagtgctagcgacccagcaatgtggaccgtagggggaaaaaccgtcgggtcgtcaagtcgcttccaggccacccggcaaggacggaaatatattctcgtcgtgcgagaagccgcaccttcagacgcaggtgaggtcgtgttctccgtgagaggcctcacatccaaggcatctctaatcgttcgagagcgacccgcagccattataaagcctttggaggatcaatgggtcgcccctggtgaagacgtggaactgcggtgcgaactctctcgagccggtacacctgtacattggttgaaagaccggaaggcaatcaggaaaagccagaagtacgatgtggtgtgtgaagggaccatggcgatgctcgtgattcgtggggcaagtcttaaggatgcaggtgagtacacctgcgaggtggaggccagtaagtccaccgcatctctgcacgtagaggagaaggcaaactgctttaccgaagagctgaccaacctgcaggttgaggaaaagggaaccgcagtttttacctgcaagactgagcacccagccgcaacagtgacttggcgcaaggggctgctcgagctgagagcctcaggtaaacaccagccctcacaggagggcttgaccctgcggctcacgatcagtgccctggaaaaggccgatagtgatacctatacatgcgatattgggcaagcccagagtcgagcccagctgcttgttcaaggggaggctgccaaatgcgcaagagcttag

SEQ ID NO: 341172 - protein, 416 aa, Artificial Sequence
  derived and/or modified sequence
MPLYNDSFHEISHKGRRHTLVLKSIQRADAGIVRASSLKVSTSARLEVRVKPVVFLKALDDLSAEERGTLALQCEVSDPEAHVVWRKDGVQLGPSDKYDFLHTAGTRGLVVHDVSPEDAGLYTCHVGSEETRARVRVHDLHVGITKRLKTMEVLEGESCSFECVLSHESASDPAMWTVGGKTVGSSSRFQATRQGRKYILVVREAAPSDAGEVVFSVRGLTSKASLIVRERPAAIIKPLEDQWVAPGEDVELRCELSRAGTPVHWLKDRKAIRKSQKYDVVCEGTMAMLVIRGASLKDAGEYTCEVEASKSTASLHVEEKANCFTEELTNLQVEEKGTAVFTCKTEHPAATVTWRKGLLELRASGKHQPSQEGLTLRLTISALEKADSDTYTCDIGQAQSRAQLLVQGEAAKCARA

SEQ ID NO: 341173 - protein, 709 aa, Artificial Sequence
  derived and/or modified sequence
MEKHRGVLECQVSRASAQVRWFKGSQELQPGPKYELVSDGLYRKLIISDVHAEDEDTYTCDAGDVKTSAQFFVEEQSITIVRGLQDVTVMEPAPAWFECETSIPSVRPPKWLLGKTVLQAGGNVGLEQEGTVHRLMLRRTCSTMTGPVHFTVGKSRSSARLVVSDIPVVLTRPLEPKTGRELQSVVLSCDFRPAPKAVQWYKDDTPLSPSEKFKMSLEGQMAELRILRLMPADAGVYRCQAGSAHSSTEVTVEAREVTVTGPLQDAEATEEGWASFSCELSHEDEEVEWSLNGMPLYNDSFHEISHKGRRHTLVLKSIQRADAGIVRASSLKVSTSARLEVRVKPVVFLKALDDLSAEERGTLALQCEVSDPEAHVVWRKDGVQLGPSDKYDFLHTAGTRGLVVHDVSPEDAGLYTCHVGSEETRARVRVHDLHVGITKRLKTMEVLEGESCSFECVLSHESASDPAMWTVGGKTVGSSSRFQATRQGRKYILVVREAAPSDAGEVVFSVRGLTSKASLIVRERPAAIIKPLEDQWVAPGEDVELRCELSRAGTPVHWLKDRKAIRKSQKYDVVCEGTMAMLVIRGASLKDAGEYTCEVEASKSTASLHVEEKANCFTEELTNLQVEEKGTAVFTCKTEHPAATVTWRKGLLELRASGKHQPSQEGLTLRLTISALEKADSDTYTCDIGQAQSRAQLLVQGEAAKCARA

SEQ ID NO: 341174 - DNA, 1713 bp, Artificial Sequence
  derived and/or modified sequence
atggccctgagaggcgccgccggcgccaccgacacccccgtgagcagcgccggcggcgcccccggcggcagcgccagcagcagcagcaccagcagcggcggcagcgccagcgccggcgccggcctgtgggccgccctgtacgactacgaggccagaggcgaggacgagctgagcctgagaagaggccagctggtggaggtgctgagccaggacgccgccgtgagcggcgacgagggctggtgggccggccaggtgcagagaagactgggcatcttccccgccaactacgtggccccctgcagacccgccgccagccccgcccccccccccagcagacccagcagccccgtgcacgtggccttcgagagactggagctgaaggagctgatcggcgccggcggcttcggccaggtgtacagagccacctggcagggccaggaggtggccgtgaaggccgccagacaggaccccgagcaggacgccgccgccgccgccgagagcgtgagaagagaggccagactgttcgccatgctgagacaccccaacatcatcgagctgagaggcgtgtgcctgcagcagccccacctgtgcctggtgctggagttcgccagaggcggcgccctgaacagagccctggccgccgccaacgccgcccccgaccccagagcccccggccccagaagagccagaagaatccccccccacgtgctggtgaactgggccgtgcagatcgccagaggcatgctgtacctgcacgaggaggccttcgtgcccatcctgcacagagacctgaagagcagcaacatcctgctgctggagaagatcgagcacgacgacatctgcaacaagaccctgaagatcaccgacttcggcctggccagagagtggcacagaaccaccaagatgagcaccgccggcacctacgcctggatggcccccgaggtgatcaagagcagcctgttcagcaagggcagcgacatctggagctacggcgtgctgctgtgggagctgctgaccggcgaggtgccctacagaggcatcgacggcctggccgtggcctacggcgtggccgtgaacaagctgaccctgcccatccccagcacctgccccgagcccttcgccaagctgatgaaggagtgctggcagcaggacccccacatcagacccagcttcgccctgatcctggagcagctgaccgccatcgagggcgccgtgatgaccgagatgccccaggagagcttccacagcatgcaggacgactggaagctggagatccagcagatgttcgacgagctgagaaccaaggagaaggagctgagaagcagagaggaggagctgaccagagccgccctgcagcagaagagccaggaggagctgctgaagagaagagagcagcagctggccgagagagagatcgacgtgctggagagagagctgaacatcctgatcttccagctgaaccaggagaagcccaaggtgaagaagagaaagggcaagttcaagagaagcagactgaagctgaaggacggccacagaatcagcctgcccagcgacttccagcacaagatcaccgtgcaggccagccccaacctggacaagagaagaagcctgaacagcagcagcagcagcccccccagcagccccaccatgatgcccagactgagagccatccagtgcgagctgagcgccctgcccagaggcctgctgtgctag

SEQ ID NO: 341175 - DNA, 1713 bp, Artificial Sequence
  derived and/or modified sequence
atggctctgaggggggcagcaggagccactgatacacccgtgtcatcagccggtggagcacctggcggctccgcctcttcatcatctaccagctctggcgggagtgcctccgcgggggccggtctctgggcagccctgtacgattatgaggcacggggtgaagacgaactgtcccttcgcagaggtcaactagtggaagtgctttctcaagacgccgctgtctctggggatgaaggatggtgggctggccaagtgcagagaagactgggcatttttcccgcgaactatgtggctccctgtcgaccagccgcgtctccggctccacccccgtcaagaccttcaagccccgtgcatgttgcctttgagcgcctcgagcttaaggagcttatcggggccggcgggttcggacaagtctaccgggcaacttggcaagggcaggaagtcgcagtgaaggccgctagacaggatcccgaacaggacgctgccgccgctgctgagagcgtgcgacgagaagcccggctgttcgccatgctgcgccaccccaacattatcgaactccgcggggtatgcctgcaacagccgcacctgtgcctggtcttggagtttgccaggggaggcgcactaaacagggcccttgccgccgccaacgcggctcccgaccctcgtgctcccggcccacgacgcgcccgcaggatccctcctcacgttcttgtaaactgggctgtgcaaatcgctaggggaatgctgtacttacacgaagaggccttcgtgcctatactacatcgtgacttaaagtcttccaacatccttctgctggaaaaaatcgagcacgatgacatctgcaataaaaccctcaagattaccgactttggcttggctcgggagtggcataggaccacaaaaatgtcaactgccggaacgtacgcctggatggcccccgaagtgattaagagttccctgttctctaagggcagcgacatctggtcttacggcgttttgttatgggagctactcacaggtgaggttccatatagagggattgacgggttggccgttgcttacggcgtcgccgttaacaagctcacgctgcctataccgagcacatgcccagagccttttgccaagttgatgaaagaatgttggcagcaagaccctcacatcaggccctcttttgcactgatacttgagcaacttaccgcaatagaaggagccgtgatgacggagatgccccaggagtcctttcactctatgcaagatgattggaagctcgagattcagcagatgtttgacgaattaaggaccaaggagaaggagctccgaagccgcgaagaagagctaaccagagccgctttgcagcagaaatcacaagaagagctgttaaaaagaagggagcagcagttagccgagcgtgaaatagacgtgctggagcgggaactgaacatcctgatcttccagctgaaccaagagaaaccaaaggtcaagaagcgcaaggggaaattcaagagatcccggctcaaactgaaggacggccaccggatttccctgcccagtgacttccagcataaaattaccgtgcaagcaagccccaacctagataaacgaaggtccctcaacagctcaagttcttctcctcccagtagtcctactatgatgccccggctcagggccatccagtgcgagctatcagctctgcctcgcggactgctctgctag

SEQ ID NO: 341176 - DNA, 1713 bp, Artificial Sequence
  derived and/or modified sequence
atggccctgcggggagctgctggggccacagacacccctgtgagcagcgctggaggagcccctgggggcagcgccagcagcagcagcaccagcagcggcggcagcgccagcgctggggccggcctgtgggccgccctgtatgactatgaggcccggggggaggatgagctgagcctgcggcggggccagctggtggaggtgctgagccaggatgctgctgtgtctggagatgagggctggtgggccggccaggtgcagaggcggctgggcatcttccctgccaactacgtggccccctgcaggcctgctgccagccctgcccccccacccagccggcccagcagccctgtgcacgtggcctttgagcggctggagctgaaggagctgattggagctgggggcttcggccaggtgtaccgggccacctggcagggccaggaggtggccgtgaaggccgcccggcaggaccctgagcaggatgctgctgctgctgctgagagcgtgagaagagaggcccggctgtttgccatgctgcggcaccccaacatcatcgagctgcggggcgtgtgcctgcagcagccccacctgtgcctggtgctggagtttgcccggggcggggccctgaacagagccctggccgccgccaatgctgccccagacccccgggcccctggcccccggcgggcccggcgcatcccccctcatgtgctggtgaactgggccgtgcagatcgcccggggcatgctgtacctgcacgaggaggcctttgtgcccatcctgcaccgggacctgaagagcagcaacatcctgctgctggagaagattgaacatgatgacatctgcaacaagaccctgaagatcacagactttggcctggcccgggagtggcacaggaccaccaagatgagcacagctggcacctacgcctggatggcccctgaggtgatcaagagcagcctcttcagcaaaggaagtgacatctggagctatggagtgctgctgtgggagctgctgactggagaggtgccctaccggggcattgatggcctggccgtggcctacggcgtggccgtgaacaagctgaccctgcccatccccagcacctgcccagagccctttgccaagctgatgaaggagtgctggcagcaggacccccacatccggcccagctttgccctgatcctggagcagctgacagccattgaaggagctgtgatgacagagatgccccaggagagcttccacagcatgcaggatgactggaagctggagatccagcagatgtttgatgagctgcggaccaaggagaaggagctgcggagccgggaggaggagctgaccagggctgccctgcagcagaagagccaggaggagctgctgaagaggcgggagcagcagctggccgagcgggagattgatgtgctggagcgggagctgaacatcctgatcttccagctgaaccaggagaagcccaaggtgaagaagaggaagggcaagttcaagaggagccggctgaagctgaaggatggccaccgcatcagcctgcccagcgacttccagcacaagatcaccgtgcaggccagccccaacctggacaagaggaggagcctgaacagcagcagcagcagcccccccagcagccccaccatgatgccccggctgcgggccatccagtgtgagctgagcgccctgccccggggcctgctgtgctag

SEQ ID NO: 341177 - DNA, 1713 bp, Artificial Sequence
  derived and/or modified sequence
atggccctgcggggcgccgccggcgccaccgacacccccgtgagctccgctggcggtgcgccaggaggctccgcgagctcttcctccacttcatctggtggctccgccagcgccggcgctggcctgtgggccgcattatatgactatgaggctcgaggtgaagacgaactgtctctccggaggggacagctcgtggaagtgctgagtcaggacgctgccgtgtccggtgacgagggttggtgggccggacaagtgcagcgcagactggggatatttcctgctaactatgtcgccccgtgtagaccagcagcctctcctgctccccccccctcacgtccatcatcccctgttcacgtggcctttgagaggctcgagcttaaggaattaatcggcgctggtggatttggccaagtgtatcgcgcaacatggcaggggcaggaagtagccgttaaagcggctagacaggatccagaacaggacgcagccgctgcagccgagtctgtgaggcgcgaggctagactcttcgccatgctccggcacccaaacattatcgagctgcggggcgtgtgtctgcagcagccacatctttgtctggtactggagttcgcccgcgggggcgcacttaaccgtgccttggccgctgccaatgccgcgcccgacccacgtgctccaggtccccggcgggctaggcggattccccctcacgtgctggtcaattgggccgttcagattgccaggggcatgctgtatcttcatgaggaggctttcgtgccgatcctgcacagagacctgaagtccagtaatatcctgttactggagaagattgagcatgatgacatttgcaacaagactctcaaaatcactgacttcggccttgccagagaatggcacagaacgacgaagatgtcaaccgctggtacttacgcttggatggccccagaggtgatcaagtcatccttgttttccaaagggagcgacatctggtcttatggtgtgttgctatgggagctgttgactggcgaagtgccctatcgcgggatcgacggactggccgtggcctatggagtggctgtgaacaagttaaccctgcccatcccaagcacttgccctgaaccatttgctaagctgatgaaggaatgctggcagcaagatcctcacatccgccctagcttcgcactcatccttgaacagctgaccgccatcgaaggcgccgtcatgactgaaatgcctcaggaatcatttcactcgatgcaggatgactggaaacttgaaatacagcagatgtttgatgaactgcggacaaaggaaaaggaactaaggtcaagagaagaagaactgacaagagcggccctccaacagaagtctcaggaggagcttctgaagcggagggaacagcaactagccgaaagggagattgacgtcctggagcgagagttgaatattctgatttttcagctgaaccaggagaaacctaaagtgaagaaaagaaaaggcaaattcaaacggagccggctgaagttaaaggacggccaccgcatatcactgccatctgacttccagcataagataacagtgcaggccagtcccaacctagataaaagaaggagcctgaactcatccagtagctctccacccagctcccccactatgatgcctagattgcgtgcaattcagtgcgaactgtctgctttaccaaggggtttactttgctag

SEQ ID NO: 341178 - DNA, 3910 bp, Artificial Sequence
  derived and/or modified sequence
cagggcctgggcacgaccatggtgggacgtcgcccgcggcttcggggaccgctgcggcagcagaggcggctggccaggaacgcgggccgaggctggaccctttgggcagctagcccgtgatctctgccgtcaccgatcgcgattcctaccccctcgccttcccccggcgccgacggccacaccgccggacgatgcgcgcccgcggccgcccgggaggctgagcccagcttcccgctccgccttccccgcgcagctgcccccatggctttgcggggcgccgcgggagcgaccgacaccccggtgtcctcggccgggggagcccccggcggctcagcgtcctcgtcgtccacctcctcgggcggctcggcctcggcgggcgcggggctgtgggccgcgctctatgactacgaggctcgcggcgaggacgagctgagcctgcggcgcggccagctggtggaggtgctgtcgcaggacgccgccgtgtcgggcgacgagggctggtgggcaggccaggtgcagcggcgcctcggcatcttccccgccaactacgtggctccctgccgcccggccgccagccccgcgccgccgccctcgcggcccagctccccggtacacgtcgccttcgagcggctggagctgaaggagctcatcggcgctgggggcttcgggcaggtgtaccgcgccacctggcagggccaggaggtggccgtgaaggcggcgcgccaggacccggagcaggacgcggcggcggctgccgagagcgtgcggcgcgaggctcggctcttcgccatgctgcggcaccccaacatcatcgagctgcgcggcgtgtgcctgcagcagccgcacctctgcctggtgctggagttcgcccgcggcggagcgctcaaccgagcgctggccgctgccaacgccgccccggacccgcgcgcgcccggcccccgccgcgcgcgccgcatccctccgcacgtgctggtcaactgggccgtgcagatagcgcggggcatgctctacctgcatgaggaggccttcgtgcccatcctgcaccgggacctcaagtccagcaacattttgctacttgagaagatagaacatgatgacatctgcaataaaactttgaagattacagattttgggttggcgagggaatggcacaggaccaccaaaatgagcacagcaggcacctatgcctggatggcccccgaagtgatcaagtcttccttgttttctaagggaagcgacatctggagctatggagtgctgctgtgggaactgctcaccggagaagtcccctatcggggcattgatggcctcgccgtggcttatggggtagcagtcaataaactcactttgcccattccatccacctgccctgagccgtttgccaagctcatgaaagaatgctggcaacaagaccctcatattcgtccatcgtttgccttaattctcgaacagttgactgctattgaaggggcagtgatgactgagatgcctcaagaatcttttcattccatgcaagatgactggaaactagaaattcaacaaatgtttgatgagttgagaacaaaggaaaaggagctgcgatcccgggaagaggagctgactcgggcggctctgcagcagaagtctcaggaggagctgctaaagcggcgtgagcagcagctggcagagcgcgagatcgacgtgctggagcgggaacttaacattctgatattccagctaaaccaggagaagcccaaggtaaagaagaggaagggcaagtttaagagaagtcgtttaaagctcaaagatggacatcgaatcagtttaccttcagatttccagcacaagataaccgtgcaggcctctcccaacttggacaaacggcggagcctgaacagcagcagttccagtcccccgagcagccccacaatgatgccccgactccgagccatacagtgtgagctttctgcactgccacgggggctcctgtgttgacttctctcctttcacttgacttggattcaaattgagcagatgtgttttcatagcaggttgtagatgagtgtaggacatttcgtaggtgccacaactatttgagaaacaaaacttgagcataggttccttagtctaattttcttctactcacaaaaaatgaattttagatgctatgcagttggtgatgcgacctggccccggagtagaaagtgaaacaccacatctcgagacattctgttaaacacttgcacgcaacgttagcataacctaattctatcatcagccatttgtgtcagggtactttgaaaaatgaaatcaggaattcaggattacttctgtttctttctttgtttcgtgaggggaaaaaatttttgcttttcaggatttaactttaattcactttaggtttgaccaacctaatacttaaaaattccttgtagtgttttggttttagaacaagcattcatcctggaggagacagtacagacagctgattcgcctggcacctttgcattgtgagagtttcagttaggctatgaatcagaatgtagcggatgaaataaaattactaatttttttcaaaggtgagtccagataaacccctaaaagtaggctaagcgaaagaagaatgtgattaatgcgtatgtctgtaagtaatgtggtaattagcctaagtctgtggtaaaccattcatttggatcctctccttcctccaccaaacttaattccctgctgtttactcatccttatttggagaaaaaaaaaatccaaaagaaaattttgtctaatgaggcttgcatggaatctcatttttttttcctcttttgataatgaaaaccttggcaccagcagagatttcttttgcaagttctcggacaccaggatccccacagagaaactggatctaaatgaggctgtagttttagagcttaaaggactgtcatttattataactgatttggttttctgagaatgcattttgcataaaaccgtacctcaaaccttgcctttgcctaggcaaaggcctaattaacggagagagaaagggtcccaggctggtctcccagctccacgaagggatgagcagatgggacaccgtgccacccctgcttttgcctggccactcctctgccctctttcctgtgtcttcaccttctgctctggggaaaaccacctcacagaagccaggaagtggtactgggaaggcctggctgggcccaagatgtgtaccagttaaagtaaataatttgggacttcaaatgaattccaaccctccaaagttgaaatgcagccagcttagggaggcgcatccttggcgctccttctcagaagtaacatggtggaaaggttctaatcgagacagtccacacagggccagctttgtgtgtggcagctgttggctcaagttctccagcctggatgttgctcatcttcattgtgaccctgggtgctccaagaatgcctcttgtcttcatgtgtgtgcacacccccattcaattctgacagcctcattgagtggacccttttatgatccccaaatgcgggacagagaagttaccattaagctgacccaagttggtagctactaactggtgaagctggattcagacacatctgagtgtagatttcaccatccgtttccggcctcttagtacaggaaaagttcaatcaatgtggaaacaaaagagaaaccagaggagcaaatcaagaggggaaggaaagtaggaagggacgaaggtgaggagactaaagccgagagtgtagatagctctgggagtgtagatcagtcagtcagtcatatagccgagatgaacttgggtctaataacccccagctgaaagcttttccggttctgctgccctcacttaaatgaaaactgctgatccgtttatctgtcattctactgtaaaactcttttaataaaaagaatgaacag

SEQ ID NO: 341179 - DNA, 1713 bp, Artificial Sequence
  derived and/or modified sequence
atggctctcaggggagctgccggagctactgataccccagtctcctccgctggcggtgccccaggaggcagcgcgtctagctcttccaccagctctggcggttctgcctccgccggagccggtttgtgggctgcactttatgactacgaagcccgaggtgaagatgagttgagcctgcgcagaggtcagttggtcgaagtcctgtctcaggacgctgccgtcagtggtgatgaagggtggtgggccggacaagttcagaggaggttgggtatttttcccgctaattatgtggcgccatgccggcctgctgcttccccagctccgccaccaagtcggccttcctcacccgtgcatgtggctttcgagaggttggaactgaaggagctaattggcgctggcggattcggccaggtatatcgagcgacatggcaggggcaagaagtcgctgttaaggccgcacgccaggatcctgagcaggatgctgccgcagccgctgagagcgtgcggagggaggcacgcctcttcgccatgcttcggcaccctaacatcatagaacttcgcggtgtttgtctgcagcagccccacctgtgccttgtgcttgagtttgcccgaggaggagcgctgaatagagcacttgcggctgctaacgccgcacctgaccccagggcacccggaccacgaagggctcggaggatacctcctcatgtgctggttaattgggcagttcagatcgccaggggcatgctgtatctgcatgaagaggcttttgtgcccatcttgcaccgggatctgaagagctccaatatcctcctcctcgaaaagatcgaacatgacgatatctgtaataagaccctgaagattaccgattttggcctggcccgagagtggcatcggaccaccaaaatgagtacagccggtacctacgcctggatggctcccgaagtgattaagtcctctctcttcagcaagggctctgatatttggtcatacggagtcctgctctgggaactattgaccggtgaggtcccttatcgtggcattgacggcttggccgttgcttatggcgtcgctgtcaataagctgacactacctataccgagcacatgtccggagccatttgctaagctaatgaaagaatgttggcagcaggatccccacatccgcccaagttttgcgctgattctggagcagctgaccgccattgagggtgctgtgatgacagagatgccccaggaatcctttcactccatgcaagacgactggaagctggagatccaacagatgttcgatgagcttcgtacaaaggagaaagaactccgctcccgagaagaggaactgacccgagcggctctgcaacagaaaagccaagaggagttgctgaagcgcagagagcagcagctggctgagcgcgagattgacgtcctggagcgggagctaaacatcctaattttccagctgaaccaggagaagcccaaagttaaaaagaggaagggaaagtttaagcgttccaggctcaaactcaaggatggtcatagaatttctcttccatcagactttcagcataaaataaccgtgcaggctagcccgaatttagataaacggcgttcattaaatagtagttcttctagcccgccatccagtcccactatgatgcctcgccttagagccattcagtgtgaacttagcgctctgcccaggggcttgctgtgttag

SEQ ID NO: 341180 - protein, 546 aa, Artificial Sequence
  derived and/or modified sequence
  misc_feature (1)..(1): Xaa can be any naturally occurring amino acid
XDIAEGKASQPSVVISQVIDMRDEEFSVSSVLASDVIHASRKDIPCIFRVTASQLSASNNKCSILMLADTENEKNKWVGVLSELHKILKKNKFRDRSVYVPKEAYDSTLPLIKTTQAAAIIDHERIALGNEEGLFVVHVTKDEIIRVGDNKKIHQIELIPNDQLVAVISGRNRHVRLFPMSALDGRETDFYKLSETKGCQTVTSGKVRHGALTCLCVAMKRQVLCYELFQSKTRHRKFKEIQVPYNVQWMAIFSEQLCVGFQSGFLRYPLNGEGNPYSMLHSNDHTLSFIAHQPMDAICAVEISSKEYLLCFNSIGIYTDCQGRRSRQQELMWPANPSSCCYNAPYLSVYSENAVDIFDVNSMEWIQTLPLKKVRPLNNEGSLNLLGLETIRLIYFKNKMAEGDELVVPETSDNSRKQMVRNINNKRRYSFRVPEEERMQQRREMLRDPEMRNKLISNPTNFNHIAHMGPGDGIQILKDLPMNPRPQESRTVFSGSVSIPSITKSRPEPGRSMSASSGLSASKCRGYRKVPLRQGDPQLPPLLSRG

SEQ ID NO: 341181 - protein, 385 aa, Artificial Sequence
  derived and/or modified sequence
MAPLGYFLLLCSLKQALGSYPIWWSLAVGPQYSSLGSQPILCASIPGLVPKQLRFCRNYVEIMPSVAEGIKIGIQECQHQFRGRRWNCTTVHDSLAIFGPVLDKATRESAFVHAIASAGVAFAVTRSCAEGTAAICGCSSRHQGSPGKGWKWGGCSEDIEFGGMVSREFADARENRPDARSAMNRHNNEAGRQAIASHMHLKCKCHGLSGSCEVKTCWWSQPDFRAIGDFLKDKYDSASEMVVEKHRESRGWVETLRPRYTYFKVPTERDLVYYEASPNFCEPNPETGSFGTRDRTCNVSSHGIDGCDLLCCGRGHNARAERRREKCRCVFHWCCYVSCQECTRVYDVHTCKNPGSRAGNSAHQPPHPQPPVRFHPPLRRAGKVP

SEQ ID NO: 341182 - DNA, 1158 bp, Artificial Sequence
  derived and/or modified sequence
atggcccccctgggctacttcctgctgctgtgcagcctgaagcaggccctgggcagctaccccatctggtggagcctggccgtgggcccccagtacagcagcctgggcagccagcccatcctgtgcgccagcatccccggcctggtgcccaagcagctgagattctgcagaaactacgtggagatcatgcccagcgtggccgagggcatcaagatcggcatccaggagtgccagcaccagttcagaggcagaagatggaactgcaccaccgtgcacgacagcctggccatcttcggccccgtgctggacaaggccaccagagagagcgccttcgtgcacgccatcgccagcgccggcgtggccttcgccgtgaccagaagctgcgccgagggcaccgccgccatctgcggctgcagcagcagacaccagggcagccccggcaagggctggaagtggggcggctgcagcgaggacatcgagttcggcggcatggtgagcagagagttcgccgacgccagagagaacagacccgacgccagaagcgccatgaacagacacaacaacgaggccggcagacaggccatcgccagccacatgcacctgaagtgcaagtgccacggcctgagcggcagctgcgaggtgaagacctgctggtggagccagcccgacttcagagccatcggcgacttcctgaaggacaagtacgacagcgccagcgagatggtggtggagaagcacagagagagcagaggctgggtggagaccctgagacccagatacacctacttcaaggtgcccaccgagagagacctggtgtactacgaggccagccccaacttctgcgagcccaaccccgagaccggcagcttcggcaccagagacagaacctgcaacgtgagcagccacggcatcgacggctgcgacctgctgtgctgcggcagaggccacaacgccagagccgagagaagaagagagaagtgcagatgcgtgttccactggtgctgctacgtgagctgccaggagtgcaccagagtgtacgacgtgcacacctgcaagaaccccggcagcagagccggcaacagcgcccaccagcccccccacccccagccccccgtgagattccacccccccctgagaagagccggcaaggtgccctag

SEQ ID NO: 341183 - DNA, 1158 bp, Artificial Sequence
  derived and/or modified sequence
atggcacctcttggttatttcctgcttttgtgctccttgaagcaggctctgggctcctatccaatctggtggtccctggccgttggtccacaatactcttcattggggagtcagccaatactctgtgccagtattcccgggttggtacccaaacagttacgcttctgtcgtaattacgtggaaattatgccatccgtggctgaaggcataaaaatcggcatccaagagtgtcagcaccaattcagaggaagaaggtggaattgtactacggtgcacgacagcctggcaattttcggccccgtcctcgacaaagcgacacgggaatcagctttcgtgcacgctatcgctagcgcgggcgtcgcttttgctgtgacccgcagttgcgccgaaggtactgccgccatttgcggctgcagttctcggcaccaggggagtcctggcaagggctggaaatggggtggctgctctgaagacatcgagttcggaggtatggtatctagagagttcgcagacgctcgcgagaacagaccagatgctcgttccgccatgaaccggcataacaatgaggctggtagacaagccattgcttcacacatgcacctgaaatgtaagtgtcacggactgagtggctcttgcgaggttaaaacatgctggtggtctcagccagactttagagcgatcggagactttcttaaagacaaatatgacagcgcttctgagatggtggtggaaaagcacagggagagccgcgggtgggtcgaaacacttaggccccgttatacgtattttaaagtccccactgaacgggacctggtttactatgaggcctcccccaacttttgcgagcctaaccctgaaacagggagttttggcacccgagatagaacgtgcaatgtctcctcccacggtattgacgggtgcgacctcctctgctgcggcagaggccacaacgcacgcgcagagaggaggcgtgagaagtgcagatgcgtgttccactggtgctgctacgtgtcttgtcaggaatgcactcgagtgtacgatgtgcatacctgcaaaaaccctggctctcgtgccggtaacagcgcacaccagccaccacatccccagcctccagttagatttcaccccccacttaggcgggctggcaaggttccttag

SEQ ID NO: 341184 - DNA, 1158 bp, Artificial Sequence
  derived and/or modified sequence
atggcccccctgggctacttcctgctgctgtgcagcctgaagcaggccctgggcagctaccccatctggtggagcctggccgtgggcccccagtacagcagcctgggcagccagcccatcctgtgtgccagcatccctggcctggtgcccaagcagctgcgcttctgcagaaattatgtggagatcatgcccagcgtggccgagggcatcaagattggcatccaggagtgccagcaccagttccggggccgccgctggaactgcaccaccgtgcatgacagcctggccatcttcggccctgtgctggacaaggccacccgggagagcgcctttgtgcacgccatcgccagcgctggggtggcctttgctgtgaccaggagctgtgccgagggcacagctgccatctgtggctgcagcagccgccaccagggcagccctgggaagggctggaagtggggcggctgcagtgaagatattgaatttggaggcatggtgtcccgggagtttgctgatgcccgggagaacagaccagatgcccggagcgccatgaacagacacaacaatgaggccggccggcaggccatcgccagccacatgcacctgaagtgcaagtgccacggcctgagcggcagctgtgaggtgaagacctgctggtggagccagcctgacttccgggccatcggggacttcctgaaggacaagtatgattctgccagcgagatggtggtggagaagcaccgggagagccggggctgggtggagaccctgcggccccgctacacctacttcaaggtgcccacagagcgggacctggtgtactatgaggccagccccaacttctgtgagcccaaccctgagaccggcagctttggcacccgggacaggacctgcaatgtgagcagccacggcattgatggctgtgacctgctgtgctgcggccggggccacaatgcccgggcagagaggagaagagagaagtgccgctgtgtgttccactggtgctgctacgtgtcctgccaggagtgcaccagggtgtatgatgtgcacacctgcaagaaccctggcagccgggccggcaacagcgcccaccagcccccccacccccagccccctgtgcgcttccacccccccctgcggcgggccggcaaggtgccctag

SEQ ID NO: 341185 - DNA, 1158 bp, Artificial Sequence
  derived and/or modified sequence
atggcccccctgggctacttcctgctgctgtgcagcctgaagcaggcactagggtcctatcccatctggtggagcctcgccgtggggcctcagtattcttccttgggcagccagccgatcctgtgcgcctcgatccctggcctcgtgccgaagcagctcaggttttgcaggaactatgtagaaatcatgccgtcggtagctgagggcatcaaaataggcatccaagagtgtcaacaccagtttcggggaaggcggtggaactgtacaaccgtacacgattctttggcgatcttcggaccggttctggacaaagcaaccagggagtccgcatttgttcacgccattgcctctgctggggtggcttttgcagtgactagatcttgtgcagaaggcacagcggcgatttgcggatgttcgtcaaggcatcaaggctctcccgggaaaggatggaagtggggggggtgcagcgaagatatcgaattcggcggcatggtcagtagagaattcgccgacgcacgtgagaatcgcccggacgcgcggagtgccatgaaccggcataataatgaggcaggcagacaggccattgccagccacatgcacctcaaatgtaagtgccatggtctgagcggatcttgcgaggtgaagacttgttggtggtcacagcccgactttagagctattggggatttcctgaaagataagtacgattctgccagtgagatggtggtcgagaagcacagggaatctcgagggtgggtggaaactctgcggcctcgatatacatatttcaaagtccccacagaacgcgaccttgtctactacgaagccagtcccaacttctgcgaaccaaacccggaaaccggttctttcggaaccagagatagaacttgcaacgtgtcatcccacggtatcgatggatgtgatctgctctgctgtggtaggggtcataacgcaagagcagagcgtagacgggagaagtgccggtgcgtgttccattggtgctgctatgtgtcctgccaggaatgcacgagagtttatgacgtccatacttgcaagaaccctggttctcgcgcaggcaatagtgcgcatcagcctccacacccacagccacccgtcaggttccatcccccactgagaagagctggaaaagtcccatag

SEQ ID NO: 341186 - DNA, 1158 bp, Artificial Sequence
  derived and/or modified sequence
atggccccattgggctactttttactgttgtgctcattgaagcaggcactcgggtcttaccctatttggtggagtctggccgtgggccctcaatactcatcgctggggtcccagccgatactgtgcgcttctatcccagggctggttcccaagcagcttcggttttgtagaaattatgtggagatcatgccttctgtggctgagggcatcaagattggaattcaagagtgtcagcaccagttcagaggccgtaggtggaattgcactacagtgcacgacagcctcgcgatcttcggtcctgtgctagataaggccacccgggaatcagctttcgttcatgctatcgcatccgccggtgttgcctttgccgtcacccggtcctgcgccgagggcaccgccgcaatatgtggttgctcatcccgtcatcaggggagcccaggcaaaggctggaagtggggaggctgtagcgaagacatagagttcggtggaatggttagtcgtgagttcgccgacgccagggagaaccgtcccgacgctagaagcgccatgaataggcacaacaatgaggcagggagacaggctatagcctcacatatgcacctcaagtgtaagtgccatggtctctcgggctcttgtgaagtaaagacttgctggtggtcccagccagatttccgagctataggtgattttttaaaagacaaatatgattcagcgagcgaaatggtagtcgagaaacacagagagtccagaggatgggtcgaaacgctgaggccgcgatacacctattttaaagtgcccaccgaaagggacctcgtgtactacgaagcaagccccaatttttgcgagccgaacccggaaactggaagtttcggaacacgggaccggacctgcaacgtttctagccatggaatagacggatgcgatcttctctgctgcggccgaggccataatgctcgtgctgaaaggaggcgcgagaagtgccggtgtgtgttccactggtgttgttacgtaagctgccaggagtgtaccagagtgtatgatgtgcacacctgcaaaaacccagggagccgcgcaggaaactccgcacaccaacctccccatccacagcctcccgtcagattccatccccctctgaggagggccggaaaggtcccttag

SEQ ID NO: 341187 - DNA, 1368 bp, Artificial Sequence
  derived and/or modified sequence
acgctctcggggcggactcccggccctccgcgccctctcgcgcggcgatggccccactcggatacttcttactcctctgcagcctgaagcaggctctgggcagctacccgatctggtggtcgctggctgttgggccacagtattcctccctgggctcgcagcccatcctgtgtgccagcatcccgggcctggtccccaagcagctccgcttctgcaggaactacgtggagatcatgcccagcgtggccgagggcatcaagattggcatccaggagtgccagcaccagttccgcggccgccggtggaactgcaccaccgtccacgacagcctggccatcttcgggcccgtgctggacaaagctaccagggagtcggcctttgtccacgccattgcctcagccggtgtggcctttgcagtgacacgctcatgtgcagaaggcacggccgccatctgtggctgcagcagccgccaccagggctcaccaggcaagggctggaagtggggtggctgtagcgaggacatcgagtttggtgggatggtgtctcgggagttcgccgacgcccgggagaaccggccagatgcccgctcagccatgaaccgccacaacaacgaggctgggcgccaggccatcgccagccacatgcacctcaagtgcaagtgccacgggctgtcgggcagctgcgaggtgaagacatgctggtggtcgcaacccgacttccgcgccatcggtgacttcctcaaggacaagtacgacagcgcctcggagatggtggtggagaagcaccgggagtcccgcggctgggtggagaccctgcggccgcgctacacctacttcaaggtgcccacggagcgcgacctggtctactacgaggcctcgcccaacttctgcgagcccaaccctgagacgggctccttcggcacgcgcgaccgcacctgcaacgtcagctcgcacggcatcgacggctgcgacctgctgtgctgcggccgcggccacaacgcgcgagcggagcggcgccgggagaagtgccgctgcgtgttccactggtgctgctacgtcagctgccaggagtgcacgcgcgtctacgacgtgcacacctgcaagaatcccggctccagagcaggaaattcagcccaccagccacctcatccccaaccccctgtaaggttccatccacccctgcgtcgagctgggaaggttccatgaagcgagtcgggtccccaacccgtgcccctgggatccgagggcccctctccaagcgcctggctttggaatgctccaggcgcgccgacgcctgtgccaccccttcctcagcctggggtttgaccacccacctgaccaggggccctacctggggaaagcctgaagg

SEQ ID NO: 341188 - protein, 846 aa, Artificial Sequence
  derived and/or modified sequence
MGIQGLLQFIKEASEPIHVRKYKGQVVAVDTYCWLHKGAIACAEKLAKGEPTDRYVGFCMKFVNMLLSHGIKPILVFDGCTLPSKKEVERSRRERRQANLLKGKQLLREGKVSEARECFTRSINITHAMAHKVIKAARSQGVDCLVAPYEADAQLAYLNKAGIVQAIITEDSDLLAFGCKKVILKMDQFGNGLEIDQARLGMCRQLGDVFTEEKFRYMCILSGCDYLSSLRGIGLAKACKVLRLANNPDIVKVIKKIGHYLKMNITVPEDYINGFIRANNTFLYQLVFDPIKRKLIPLNAYEDDVDPETLSYAGQYVDDSIALQIALGNKDINTFEQIDDYNPDTAMPAHSRSHSWDDKTCQKSANVSSIWHRNYSPRPESGTVSDAPQLKENPSTVGVERVISTKGLNLPRKSSIVKRPRSAELSEDDLLSQYSLSFTKKTKKNSSEGNKSLSFSEVFVPDLVNGPTNKKSVSTPPRTRNKFATFLQRKNEESGAVVVPGTRSRFFCSSDSTDCVSNKVSIQPLDETAVTDKENNLHESEYGDQEGKRLVDTDVARNSSDDIPNNHIPGDHIPDKATVFTDEESYSFESSKFTRTISPPTLGTLRSCFSWSGGLGDFSRTPSPSPSTALQQFRRKSDSPTSLPENNMSDVSQLKSEESSDDESHPLREEACSSQSQESGEFSLQSSNASKLSQCSSKDSDSEESDCNIKLLDSQSDQTSKLRLSHFSKKDTPLRNKVPGLYKSSSADSLSTTKIKPLGPARASGLSKKPASIQKRKHHNAENKPGLQIKLNELWKNFGFKKDSEKLPPCKKPLSPVRDNIQLTPEAEEDIFNKPECGRVQRAIFQ

SEQ ID NO: 341189 - DNA, 2541 bp, Artificial Sequence
  derived and/or modified sequence
atgggcatccagggcctgctgcagttcatcaaggaggccagcgagcccatccacgtgagaaagtacaagggccaggtggtggccgtggacacctactgctggctgcacaagggcgccatcgcctgcgccgagaagctggccaagggcgagcccaccgacagatacgtgggcttctgcatgaagttcgtgaacatgctgctgagccacggcatcaagcccatcctggtgttcgacggctgcaccctgcccagcaagaaggaggtggagagaagcagaagagagagaagacaggccaacctgctgaagggcaagcagctgctgagagagggcaaggtgagcgaggccagagagtgcttcaccagaagcatcaacatcacccacgccatggcccacaaggtgatcaaggccgccagaagccagggcgtggactgcctggtggccccctacgaggccgacgcccagctggcctacctgaacaaggccggcatcgtgcaggccatcatcaccgaggacagcgacctgctggccttcggctgcaagaaggtgatcctgaagatggaccagttcggcaacggcctggagatcgaccaggccagactgggcatgtgcagacagctgggcgacgtgttcaccgaggagaagttcagatacatgtgcatcctgagcggctgcgactacctgagcagcctgagaggcatcggcctggccaaggcctgcaaggtgctgagactggccaacaaccccgacatcgtgaaggtgatcaagaagatcggccactacctgaagatgaacatcaccgtgcccgaggactacatcaacggcttcatcagagccaacaacaccttcctgtaccagctggtgttcgaccccatcaagagaaagctgatccccctgaacgcctacgaggacgacgtggaccccgagaccctgagctacgccggccagtacgtggacgacagcatcgccctgcagatcgccctgggcaacaaggacatcaacaccttcgagcagatcgacgactacaaccccgacaccgccatgcccgcccacagcagaagccacagctgggacgacaagacctgccagaagagcgccaacgtgagcagcatctggcacagaaactacagccccagacccgagagcggcaccgtgagcgacgccccccagctgaaggagaaccccagcaccgtgggcgtggagagagtgatcagcaccaagggcctgaacctgcccagaaagagcagcatcgtgaagagacccagaagcgccgagctgagcgaggacgacctgctgagccagtacagcctgagcttcaccaagaagaccaagaagaacagcagcgagggcaacaagagcctgagcttcagcgaggtgttcgtgcccgacctggtgaacggccccaccaacaagaagagcgtgagcaccccccccagaaccagaaacaagttcgccaccttcctgcagagaaagaacgaggagagcggcgccgtggtggtgcccggcaccagaagcagattcttctgcagcagcgacagcaccgactgcgtgagcaacaaggtgagcatccagcccctggacgagaccgccgtgaccgacaaggagaacaacctgcacgagagcgagtacggcgaccaggagggcaagagactggtggacaccgacgtggccagaaacagcagcgacgacatccccaacaaccacatccccggcgaccacatccccgacaaggccaccgtgttcaccgacgaggagagctacagcttcgagagcagcaagttcaccagaaccatcagcccccccaccctgggcaccctgagaagctgcttcagctggagcggcggcctgggcgacttcagcagaacccccagccccagccccagcaccgccctgcagcagttcagaagaaagagcgacagccccaccagcctgcccgagaacaacatgagcgacgtgagccagctgaagagcgaggagagcagcgacgacgagagccaccccctgagagaggaggcctgcagcagccagagccaggagagcggcgagttcagcctgcagagcagcaacgccagcaagctgagccagtgcagcagcaaggacagcgacagcgaggagagcgactgcaacatcaagctgctggacagccagagcgaccagaccagcaagctgagactgagccacttcagcaagaaggacacccccctgagaaacaaggtgcccggcctgtacaagagcagcagcgccgacagcctgagcaccaccaagatcaagcccctgggccccgccagagccagcggcctgagcaagaagcccgccagcatccagaagagaaagcaccacaacgccgagaacaagcccggcctgcagatcaagctgaacgagctgtggaagaacttcggcttcaagaaggacagcgagaagctgcccccctgcaagaagcccctgagccccgtgagagacaacatccagctgacccccgaggccgaggaggacatcttcaacaagcccgagtgcggcagagtgcagagagccatcttccagtag

SEQ ID NO: 341190 - DNA, 36 bp, Artificial Sequence
  derived and/or modified sequence
atgggcatccagggcctgctgcagttcatcaagtag

SEQ ID NO: 341191 - DNA, 2541 bp, Artificial Sequence
  derived and/or modified sequence
atgggcatacaggggttgctgcagtttatcaaggaagcctcagaaccaatacacgtgcgaaagtacaaaggacaggtggtagctgtcgacacctattgttggcttcacaaaggcgccatcgcttgtgcggagaagctggctaagggcgaaccgacggacagatacgtcggcttctgtatgaagtttgtgaatatgttgctttcccacggcatcaaacccatcctagtatttgatgggtgtactctgcccagcaagaaagaggtcgagagaagcagaagggagcgacgccaggccaatctgctgaagggcaagcaactgttgagagagggaaaagtgtcagaggcccgcgagtgtttcactaggagtattaacattacccatgcgatggcacataaagtgataaaggccgcccgatcccagggggtggactgccttgtcgcaccctatgaagccgacgcgcagctcgcgtatctaaacaaagctggtattgtccaggcgatcattacagaagattctgacttgctggcctttgggtgtaaaaaagtcatactgaagatggaccaattcggtaacggactggagattgaccaagcccggctgggaatgtgccgacagttgggcgacgtatttacagaggaaaagtttcgatatatgtgcatccttagtggctgcgactatttgtcgtccttgaggggcattggcctggcaaaggcttgtaaggttctgcggcttgcgaacaaccccgacatcgtgaaggtcattaagaaaatcggtcattatctcaagatgaacattacggtgcctgaggattacataaatggctttatccgggctaacaatacatttctgtatcagcttgtgttcgatcctattaagagaaagctgatccctctgaatgcctacgaagacgatgtagaccccgagaccctatcctacgcaggtcagtatgtcgatgacagcatcgctcttcagatcgccctggggaacaaggatataaacacatttgagcaaatcgacgactataaccccgacaccgctatgccagcacattcgcggtctcactcatgggacgacaagacatgtcagaagtccgcaaacgtaagttccatttggcatcgtaattacagtccgagacccgagagtggtaccgtgtctgacgcccctcagcttaaagagaatccaagcaccgtcggagtagagagggtaatctcaacaaaaggcctcaatcttccacgtaagtcaagcatcgtgaaaaggcccagaagcgccgaactgagcgaagacgatctacttagtcagtattccttgtcgtttacaaagaagactaagaagaactcctccgaagggaacaagtccctgagcttctccgaggtgttcgttccagatctggtaaacggtccgactaacaagaaatcagtgtccacgccgccacgtacacggaataagttcgctactttcttgcagcgcaagaatgaagagtctggtgccgtcgtcgttccagggacaaggtcaagattcttctgctccagcgatagcacagattgcgtgagtaataaagtgtctatacagcctctagacgagaccgcagtcactgacaaggaaaacaacctgcacgagtctgaatatggcgaccaggaaggaaagagacttgtggataccgatgttgccaggaattcctccgatgacatccctaacaaccatatccctggagaccacattcctgacaaagccactgtatttacggacgaggaatcatattcctttgaatcttcaaaatttacccgcaccatctcacctccgacgttgggaacactgagatcttgtttctcctggtcaggagggctgggcgatttctccaggactccaagccctagccccagtaccgcgctgcagcagtttcgtcgcaagagcgatagtccgacatcgctccccgaaaacaatatgtccgatgtctcacaactaaaatccgaggagtccagtgacgatgagtctcaccccctcagagaggaggcctgttccagccaaagccaagagtctggcgagttttccctgcagtctagcaatgcatcaaagctgtcccagtgctcgtccaaagactccgacagcgaagaaagcgactgcaatattaagctgctggactcacaatcagaccaaacctctaagcttaggctgtcgcatttctcaaagaaggataccccactcagaaataaagtgccagggctgtacaaatcctcttccgccgatagtctgagtaccaccaaaatcaagcctctgggtcccgctagagcttccggactgagtaaaaagccagcatctatccagaagcggaagcatcataatgctgagaataagcccggccttcagatcaaactgaatgagttgtggaaaaattttggctttaaaaaggacagcgagaaactcccaccctgcaagaagcccctgtcacccgtccgagataacatccagcttaccccagaggcagaggaggacattttcaacaagcctgagtgcggcagagtgcagcgcgcaatcttccagtag

SEQ ID NO: 341192 - DNA, 2541 bp, Artificial Sequence
  derived and/or modified sequence
atgggtattcaggggctcctgcagttcataaaagaagcgtcagaacctatccatgtgcggaaatataaaggccaggtggtggcggtcgacacctattgttggctccacaagggcgcaatcgcttgtgccgagaagctggctaaaggggaaccgaccgatcggtacgtcggtttttgcatgaagtttgtgaacatgcttctgagtcacggtatcaagcccattttagtcttcgatggttgtactttgcctagtaagaaggaggttgagcggagtaggagagagcgccggcaagccaacttgctcaagggaaagcagctccttagggagggaaaggtgagcgaagccagggagtgctttacacgatctattaacatcactcacgctatggcccacaaagtaattaaagcggcgcggagtcaaggtgttgactgcctggtggcaccctatgaggccgatgcacagctggcatacctaaacaaggcggggatcgtgcaagcgattattactgaggactcagacctgttggcttttggctgtaaaaaagtcattctgaagatggaccaattcgggaacggactggagatcgatcaggcacgtttgggtatgtgtagacagctgggggacgtgtttacggaggaaaagtttagatacatgtgcatcttgtccggctgcgactacctctcctccttgcggggcattggactggctaaagcatgtaaggtcctgaggttggccaacaaccctgatatagtgaaggttatcaagaaaatcggccactacctcaaaatgaatatcaccgtgcctgaggactatattaacggtttcattagggccaataatacttttctgtatcaactcgtgttcgaccccataaagcgcaaactgatccccctcaacgcatacgaagacgatgttgaccctgagactctctcctatgccggccaatatgttgacgactcgattgccctgcagatagctctggggaacaaggacattaacacctttgaacagatcgatgactacaatccagacacggctatgcctgcccattccaggtcacatagctgggatgataagacttgccagaaatctgcgaatgtgagctcaatctggcaccggaactattctccacgaccagagagcggaaccgtgagcgatgctcctcaacttaaggaaaacccatctaccgtgggagtcgagcgcgtgatcagcacgaagggcctcaacctgcctcgcaaatcctctattgtgaagcgcccaagatcagcagagttgagcgaggacgaccttctttcgcagtatagcctttcttttactaagaagacaaaaaaaaacagcagcgagggaaataaatcactttcattcagcgaggtgtttgttcccgatcttgttaacggcccgacaaacaagaagagtgtatccacaccacccaggacgcggaacaagtttgctacttttttgcagcgcaagaacgaagaaagtggcgcagtagtcgttccaggaactcgaagccgctttttttgctcctcagactctaccgactgtgtcagtaataaggtgtcaatacaacctctggacgagaccgctgtgacagataaagagaacaatttacatgaatccgagtacggcgatcaggagggcaaacggttagtcgatactgacgtcgcgaggaactcctcagatgacataccgaataatcatattccaggggaccacattcccgataaggctactgtgtttacagacgaagagtcttatagtttcgaatcgagcaaatttacccggaccatctcacccccaacactggggaccttgaggagctgtttctcgtggtctgggggactgggagatttttcccgtacccccagtccatccccatccactgccttgcagcaattcaggcgcaagtcggatagcccaaccagtctgcccgagaataacatgagcgatgtctcacagctgaagtcggaagaatcttctgatgacgaaagccatcccctgcgtgaggaagcttgctccagccagtcacaggagtcaggagaattttctctgcagtcttctaacgcgtcaaagttgtcgcagtgctctagtaaggacagtgattccgaagaatcagattgtaacatcaaattactggattctcagagtgatcagacgagtaaactgagattgtcgcatttcagcaagaaggatacacccctgcgaaataaggtcccgggcctgtataagtcctccagtgctgattccttgagcaccactaagattaaaccattaggaccggcccgggcctcgggcctttccaagaaacctgcctcgatccagaagagaaagcatcataacgctgagaacaaacccggtctgcagatcaagttgaatgagctgtggaagaattttgggtttaagaaagacagcgagaaactgcccccttgtaaaaaacctctgtcccccgtccgggacaatatacaactcaccccagaagccgaagaggacattttcaacaagccagaatgcggtcgggtccagcgcgcaatattccaatag

SEQ ID NO: 341193 - DNA, 36 bp, Artificial Sequence
  derived and/or modified sequence
atgggcattcaaggccttctacaatttatcaagtag

SEQ ID NO: 341194 - DNA, 3190 bp, Artificial Sequence
  derived and/or modified sequence
gcctaaggaaacgtgtcgtctggaatgggcttgggggccacgcctgcacatctccgcgagacagagggataaagtgaagatggtgctgttattgttacctcgagtgccacatgcgacctctgagatatgtacacagtcattcttactatcgcactcagccattcttactacgctaaagaagaaataattattcgaggatatttgcctggcccagaagaaacttatgtaaatttcatgaactattatatccgttttcctcggagtgagagaaaactctttttagatatcatctgagaggtagttaatttggcaccatggggatacagggattgctacaatttatcaaagaagcttcagaacccatccatgtgaggaagtataaagggcaggtagtagctgtggatacatattgctggcttcacaaaggagctattgcttgtgctgaaaaactagccaaaggtgaacctactgataggtatgtaggattttgtatgaaatttgtaaatatgttactatctcatgggatcaagcctattctcgtatttgatggatgtactttaccttctaaaaaggaagtagagagatctagaagagaaagacgacaagccaatcttcttaagggaaagcaacttcttcgtgaggggaaagtctcggaagctcgagagtgtttcacccggtctatcaatatcacacatgccatggcccacaaagtaattaaagctgcccggtctcagggggtagattgcctcgtggctccctatgaagctgatgcgcagttggcctatcttaacaaagcgggaattgtgcaagccataattacagaggactcggatctcctagcttttggctgtaaaaaggtaattttaaagatggaccagtttggaaatggacttgaaattgatcaagctcggctaggaatgtgcagacagcttggggatgtattcacggaagagaagtttcgttacatgtgtattctttcaggttgtgactacctgtcatcactgcgtgggattggattagcaaaggcatgcaaagtcctaagactagccaataatccagatatagtaaaggttatcaagaaaattggacattatctcaagatgaatatcacggtaccagaggattacatcaacgggtttattcgggccaacaataccttcctctatcagctagtttttgatcccatcaaaaggaaacttattcctctgaacgcctatgaagatgatgttgatcctgaaacactaagctacgctgggcaatatgttgatgattccatagctcttcaaatagcacttggaaataaagatataaatacttttgaacagatcgatgactacaatccagacactgctatgcctgcccattcaagaagtcatagttgggatgacaaaacatgtcaaaagtcagctaatgttagcagcatttggcataggaattactctcccagaccagagtcgggtactgtttcagatgccccacaattgaaggaaaatccaagtactgtgggagtggaacgagtgattagtactaaagggttaaatctcccaaggaaatcatccattgtgaaaagaccaagaagtgcagagctgtcagaagatgacctgttgagtcagtattctctttcatttacgaagaagaccaagaaaaatagctctgaaggcaataaatcattgagcttttctgaagtgtttgtgcctgacctggtaaatggacctactaacaaaaagagtgtaagcactccacctaggacgagaaataaatttgcaacatttttacaaaggaaaaatgaagaaagtggtgcagttgtggttccagggaccagaagcaggtttttttgcagttcagattctactgactgtgtatcaaacaaagtgagcatccagcctctggatgaaactgctgtcacagataaagagaacaatctgcatgaatcagagtatggagaccaagaaggcaagagactggttgacacagatgtagcacgtaattcaagtgatgacattccgaataatcatattccaggtgatcatattccagacaaggcaacagtgtttacagatgaagagtcctactcttttgagagcagcaaatttacaaggaccatttcaccacccactttgggaacactaagaagttgttttagttggtctggaggtcttggagatttttcaagaacgccgagcccctctccaagcacagcattgcagcagttccgaagaaagagcgattcccccacctctttgcctgagaataatatgtctgatgtgtcgcagttaaagagcgaggagtccagtgacgatgagtctcatcccttacgagaagaggcatgttcttcacagtcccaggaaagtggagaattctcactgcagagttcaaatgcatcaaagctttctcagtgctctagtaaggactctgattcagaggaatctgattgcaatattaagttacttgacagtcaaagtgaccagacctccaagctacgtttatctcatttctcaaaaaaagacacacctctaaggaacaaggttcctgggctatataagtccagttctgcagactctctttctacaaccaagatcaaacctctaggacctgccagagccagtgggctgagcaagaagccggcaagcatccagaagagaaagcatcataatgccgagaacaagccggggttacagatcaaactcaatgagctctggaaaaactttggatttaaaaaagattctgaaaagcttcctccttgtaagaaacccctgtccccagtcagagataacatccaactaactccagaagcggaagaggatatatttaacaaacctgaatgtggccgtgttcaaagagcaatattccagtaaatgcagactgctgcaaagcttttgcctgcaagagaatctgatcaatttgaagtccctgtttgggaatgaggcacttatcagcatgaagaattttttctcattctgtgccattttaaaaatagaatacattttgtatattaactttataattgggttgtggtttttttgctcagctttttatatttttataagaagctaaatagaagaataattgtatctctgacaggtttttggaggttttagtgttaattgggaaaatcctctggagtttataaaagtctactctaaatatttctgtaatgttgtcaagtagaaagatagtaaatggagaaact

SEQ ID NO: 341195 - DNA, 3473 bp, Artificial Sequence
  derived and/or modified sequence
ggaacccgcgcaaattgaaaggtcagcctttcgcgcgctgtgtaggcaagttacccgtgttctgcgttgccggccgtgggtgctctggccacagtgagttaggggcgtcggagcgggtttctccaaccgcaatcggctccgctcaaggggaggaggagagtcccttctcggaaggcctaaggaaacgtgtcgtctggaatgggcttgggggccacgcctgcacatctccgcgagacagagggataaagtgaagatggtgctgttattgttacctcgagtgccacatgcgacctctgagatatgtacacagtcattcttactatcgcactcagccattcttactacgctaaagaagaaataattattcgaggatatttgcctggcccagaagaaacttatgtaaatttcatgaactattatatccgttttcctcggagtgagagaaaactctttttagatatcatctgagagaactagtgaatcccagtcactgagtggagttgagagtctaagaacctctgaaatttgagaactgctggaccagagcctttagagctctgataaggtgtcaacagggtagttaatttggcaccatggggatacagggattgctacaatttatcaaagaagcttcagaacccatccatgtgaggaagtataaagggcaggtagtagctgtggatacatattgctggcttcacaaaggagctattgcttgtgctgaaaaactagccaaaggtgaacctactgataggtatgtaggattttgtatgaaatttgtaaatatgttactatctcatgggatcaagcctattctcgtatttgatggatgtactttaccttctaaaaaggaagtagagagatctagaagagaaagacgacaagccaatcttcttaagggaaagcaacttcttcgtgaggggaaagtctcggaagctcgagagtgtttcacccggtctatcaatatcacacatgccatggcccacaaagtaattaaagctgcccggtctcagggggtagattgcctcgtggctccctatgaagctgatgcgcagttggcctatcttaacaaagcgggaattgtgcaagccataattacagaggactcggatctcctagcttttggctgtaaaaaggtaattttaaagatggaccagtttggaaatggacttgaaattgatcaagctcggctaggaatgtgcagacagcttggggatgtattcacggaagagaagtttcgttacatgtgtattctttcaggttgtgactacctgtcatcactgcgtgggattggattagcaaaggcatgcaaagtcctaagactagccaataatccagatatagtaaaggttatcaagaaaattggacattatctcaagatgaatatcacggtaccagaggattacatcaacgggtttattcgggccaacaataccttcctctatcagctagtttttgatcccatcaaaaggaaacttattcctctgaacgcctatgaagatgatgttgatcctgaaacactaagctacgctgggcaatatgttgatgattccatagctcttcaaatagcacttggaaataaagatataaatacttttgaacagatcgatgactacaatccagacactgctatgcctgcccattcaagaagtcatagttgggatgacaaaacatgtcaaaagtcagctaatgttagcagcatttggcataggaattactctcccagaccagagtcgggtactgtttcagatgccccacaattgaaggaaaatccaagtactgtgggagtggaacgagtgattagtactaaagggttaaatctcccaaggaaatcatccattgtgaaaagaccaagaagtgcagagctgtcagaagatgacctgttgagtcagtattctctttcatttacgaagaagaccaagaaaaatagctctgaaggcaataaatcattgagcttttctgaagtgtttgtgcctgacctggtaaatggacctactaacaaaaagagtgtaagcactccacctaggacgagaaataaatttgcaacatttttacaaaggaaaaatgaagaaagtggtgcagttgtggttccagggaccagaagcaggtttttttgcagttcagattctactgactgtgtatcaaacaaagtgagcatccagcctctggatgaaactgctgtcacagataaagagaacaatctgcatgaatcagagtatggagaccaagaaggcaagagactggttgacacagatgtagcacgtaattcaagtgatgacattccgaataatcatattccaggtgatcatattccagacaaggcaacagtgtttacagatgaagagtcctactcttttgagagcagcaaatttacaaggaccatttcaccacccactttgggaacactaagaagttgttttagttggtctggaggtcttggagatttttcaagaacgccgagcccctctccaagcacagcattgcagcagttccgaagaaagagcgattcccccacctctttgcctgagaataatatgtctgatgtgtcgcagttaaagagcgaggagtccagtgacgatgagtctcatcccttacgagaagaggcatgttcttcacagtcccaggaaagtggagaattctcactgcagagttcaaatgcatcaaagctttctcagtgctctagtaaggactctgattcagaggaatctgattgcaatattaagttacttgacagtcaaagtgaccagacctccaagctacgtttatctcatttctcaaaaaaagacacacctctaaggaacaaggttcctgggctatataagtccagttctgcagactctctttctacaaccaagatcaaacctctaggacctgccagagccagtgggctgagcaagaagccggcaagcatccagaagagaaagcatcataatgccgagaacaagccggggttacagatcaaactcaatgagctctggaaaaactttggatttaaaaaagattctgaaaagcttcctccttgtaagaaacccctgtccccagtcagagataacatccaactaactccagaagcggaagaggatatatttaacaaacctgaatgtggccgtgttcaaagagcaatattccagtaaatgcagactgctgcaaagcttttgcctgcaagagaatctgatcaatttgaagtccctgtttgggaatgaggcacttatcagcatgaagaattttttctcattctgtgccattttaaaaatagaatacattttgtatattaactttataattgggttgtggtttttttgctcagctttttatatttttataagaagctaaatagaagaataattgtatctctgacaggtttttggaggttttagtgttaattgggaaaatcctctggagtttataaaagtctactctaaatatttctgtaatgttgtcaagtagaaagatagtaaatggagaaactacaa

SEQ ID NO: 341196 - DNA, 2541 bp, Artificial Sequence
  derived and/or modified sequence
atgggcatccagggcctgctgcagttcatcaaggaggccagcgagcccatccacgtgaggaagtacaagggccaggtggtggccgtggacacctactgctggctgcacaagggggccatcgcctgtgccgagaagctggccaagggggagcccacagacagatatgtgggcttctgcatgaagtttgtgaacatgctgctgagccacggcatcaagcccatcctggtgtttgatggctgcaccctgcccagcaagaaggaggtggagaggagccggcgggagcggcggcaggccaacctgctgaagggcaagcagctgctgcgggagggcaaggtgtctgaggcccgggagtgcttcaccaggagcatcaacatcacccacgccatggcccacaaggtgatcaaggccgcccggagccagggcgtggactgcctggtggccccctatgaagcagatgcccagctggcctacctgaacaaggccggcatcgtgcaggccatcatcacagaggacagcgacctgctggccttcggctgcaagaaggtgatcctgaagatggaccagtttggaaatggcctggagattgaccaggcccggctgggcatgtgccggcagctgggagatgtgttcacagaggagaagttccgctacatgtgcatcctgagcggctgtgactacctgagcagcctgcggggcatcggcctggccaaggcctgcaaggtgctgcggctggccaacaacccagacatcgtgaaggtgatcaagaagattggccactacctgaagatgaacatcaccgtgcctgaggactacatcaatggcttcatccgggccaacaacaccttcctgtaccagctggtgtttgaccccatcaagaggaagctgatccccctgaatgcctatgaagatgatgtggaccctgagaccctgtcctatgccggccagtatgtggatgacagcatcgccctgcagatcgccctgggcaacaaggacatcaacacctttgagcagattgatgactacaacccagacacagccatgcctgcccacagccgcagccacagctgggatgacaagacctgccagaagagcgccaacgtgagcagcatctggcacaggaactacagccccaggcctgagagcggcaccgtgtctgatgccccccagctgaaggagaaccccagcacagtgggcgtggagagggtcatcagcaccaagggcctgaacctgcccaggaagagcagcatcgtgaagaggcccaggtctgctgagctgtctgaagatgacctgctgagccagtacagcctgtccttcaccaagaagaccaagaagaacagcagcgagggcaacaagagcctgtccttcagcgaggtgtttgtgcctgacctggtgaatggccccaccaacaagaagtctgtgtccaccccacccaggaccaggaacaagtttgccaccttcctgcagaggaagaatgaggagagcggggctgtggtggtgcccggcaccaggagccgcttcttctgcagcagtgacagcacagactgtgtgagcaacaaggtgtccatccagcccctggatgaaacagctgtgacagacaaggagaacaacctgcacgagagtgaatatggagaccaggagggcaagaggctggtggacacagatgtggccaggaacagcagtgatgacatccccaacaaccacatccctggggaccacatcccagacaaggccaccgtcttcacagatgaggagagctacagctttgagagcagcaagttcaccaggaccatcagcccccccaccctgggcaccctgcggagctgcttctcctggagcggcggcctgggggacttcagcaggacccccagccccagccccagcacagccctgcagcagttccggaggaagagtgacagccccaccagcctgcctgagaacaacatgtctgatgtgtcccagctgaagtctgaggagagcagtgatgatgagagccaccccctgcgggaggaggcctgcagcagccagagccaggagagcggggagttcagcctgcagagcagcaatgccagcaagctgagccagtgcagcagcaaggacagcgacagcgaggagagtgactgcaacatcaagctgctggacagccagagcgaccagaccagcaagctgcggctgagccacttcagcaagaaggacacccccctgaggaacaaggtgcccggcctgtacaagagcagcagcgctgacagcctgagcaccaccaagatcaagcccctgggccctgcccgggccagcggcctgagcaagaagccagccagcatccagaagaggaagcaccacaatgctgagaacaagccaggcctgcagatcaagctgaatgagctgtggaagaactttggcttcaagaaggacagcgagaagctgcccccctgcaagaagcccctgagccctgtgcgggacaacatccagctgaccccagaggccgaggaggacatcttcaacaagccagaatgtggccgggtgcagagggccatcttccagtag

SEQ ID NO: 341197 - DNA, 2541 bp, Artificial Sequence
  derived and/or modified sequence
atgggcatccagggcctgctgcagttcatcaaggaggccagcgagcccatccatgtgagaaagtacaaaggtcaagttgtcgctgtcgatacgtattgttggctgcataaaggagccatagcatgcgcagagaagctagccaaaggagaacctaccgatcggtatgtggggttttgcatgaaattcgtgaatatgctactgtctcacggtattaaacccatacttgtgttcgacggatgtacgttgcccagcaagaaggaagttgagcgttcccgccgagaaaggagacaggccaatctgctgaagggtaagcagctgctgcgggaaggcaaagtcagtgaggctcgggagtgttttaccagaagcatcaacattactcacgctatggcccacaaggtaattaaggcagcccgcagccagggagttgattgcctcgtggccccctacgaggctgatgcccagctcgcatacctgaataaggctggcattgtgcaggctatcatcacagaggattcagacctgctggccttcgggtgtaaaaaagtgatcctaaaaatggaccagttcgggaatgggctggagatcgatcaagcaaggctgggaatgtgccgccagctgggcgatgtattcacagaggagaaatttcggtacatgtgcatcctaagcggctgtgattatctctcatccctcagaggaatcggtctcgccaaggcatgcaaggtgctgcggttagccaataaccctgatattgtaaaggtcatcaaaaagattggtcattacctaaagatgaacatcaccgtgcctgaagattacattaatggcttcattagagcgaacaacacctttctttaccaactggttttcgatccaatcaagcgaaaattaatacccctgaacgcctacgaagatgacgtagatcccgaaaccttgagctacgccgggcagtatgttgacgatagcattgcgttgcagatagctctgggcaacaaagacatcaacaccttcgagcagatcgatgattataacccggatacggcaatgcccgctcactcacggagccacagctgggatgataagacatgtcaaaagtctgcaaatgtcagcagcatctggcaccggaactactcgccacggcccgagagtgggactgtgagcgatgccccacagctgaaggaaaatcctagcaccgtgggtgtggagagggtaattagtaccaaaggtttgaatctccccagaaagtctagcatcgtgaagagacctcgttccgccgagttatccgaggatgatcttttgagccagtatagcctgtctttcaccaagaagactaagaagaactcatccgaggggaacaagagcttaagcttctccgaggttttcgtccccgatctcgtgaatggaccaacaaataaaaagtcggtgtcaacacccccacggacgaggaataaattcgctacctttctccagaggaaaaatgaggagtccggcgccgtggttgtgcctggcactagatcgagatttttctgttcttcagatagcacagactgtgtatcgaataaggttagcattcagccacttgatgagacggctgtcaccgacaaggaaaataacctccatgaaagcgagtacggggatcaagaggggaaacgcttggttgataccgacgttgctagaaattcatccgatgacattcccaacaaccatattcccggggaccacataccagataaagctactgtgttcaccgatgaggagtcatattcctttgagagctcgaaatttacaaggacgatcagccctcctaccttagggactttgaggtcttgcttcagctggagcggtggactgggagatttctctcggacaccatcaccaagtcctagcaccgctctgcaacaatttcggcgaaaatctgacagcccaaccagtcttcccgagaacaacatgtcagatgtttcccagctgaagtccgaagagtcgagcgacgatgaaagccacccactgagagaggaagcatgttcatcgcaaagtcaggaatcaggcgagttctccctgcagagtagcaatgcctctaagctatcccaatgtagttccaaagatagtgactcagaggaatctgactgcaacattaagctgctggacagtcagagtgatcagacatcgaagctgcgcctgtcacatttttccaagaaagatacacccctcaggaataaggtgccaggactgtataagagctcttccgcggactccctgagtacaaccaaaataaagcccctaggaccggctagagccagtggtctgtcgaaaaaacccgccagcattcaaaagcgtaagcaccacaacgccgagaataagcccggactgcagattaaactcaatgaactgtggaaaaattttggatttaagaaagactccgagaaattgccaccttgcaagaaacccctgtcccctgtacgagataacattcagttgactcccgaagcagaggaagacatcttcaataagcccgagtgcggacgcgtgcagcgggctattttccagtag

SEQ ID NO: 341198 - DNA, 2541 bp, Artificial Sequence
  derived and/or modified sequence
atgggcatccagggcctgctgcagttcatcaaggaggccagcgagccaatccacgtgcgcaaatacaaaggccaggtggtggcagtggatacctattgctggctgcacaagggggcaatcgcttgtgccgagaagctcgctaagggcgaacccactgaccgatacgtgggattttgcatgaagttcgttaatatgctactctcgcacggcatcaagccaattcttgtgttcgacggatgtactctaccttccaaaaaggaggtggagcggtctcggagggagcgcagacaagccaatttgttaaaggggaagcagctgcttcgtgagggcaaggtgagcgaagcgagggagtgctttacccggagcattaacataacgcacgccatggcacataaggtcattaaagctgctaggtcccagggcgtagactgtttagtcgctccctacgaggcagatgcccaactggcttacctgaacaaggcagggatcgtgcaggcgatcatcacggaggactccgaccttctggcgtttggatgcaaaaaggtaattctgaaaatggaccagtttgggaacggccttgaaatcgaccaggcacgactcgggatgtgccgccagctcggtgacgtgtttacggaggagaaatttaggtatatgtgtattctttccggctgtgactatctgagctccctgcgcgggatcgggctcgcgaaagcctgtaaggtgctgcgattggccaataacccggatattgtaaaggtgatcaagaagataggccattatttgaagatgaacatcacagtgccagaggactacatcaatggttttatccgggctaataataccttcttataccagctggtcttcgacccgatcaagagaaagctcatccccctgaacgcgtatgaggatgatgtggacccagaaaccctgtcctacgcaggacaatacgtcgacgattctatcgccctgcaaatcgcattgggaaataaggacataaacacgttcgagcagattgatgattataatcctgacaccgccatgcccgcacattcaaggagccactcttgggatgacaaaacctgccagaagagtgcgaacgtgagttccatctggcaccggaactacagccctaggccagagtctggcaccgtctcagatgcaccccagcttaaagagaacccttccacggttggcgtagagcgcgttatcagcacaaagggtctcaacctaccccgcaagtctagcattgtcaagcgccctcggagcgccgaattgtctgaagacgatctgctgagccagtatagtctttcttttacgaagaagaccaagaaaaattcttccgaaggcaacaaatcactctccttctccgaagtattcgttcctgacctggttaacggtccaactaacaagaagagtgtgtccacccccccacggactaggaataaattcgccacatttctgcaacggaaaaacgaagagagtggtgccgtagtggtgcctgggacccgatcacggtttttctgttcttctgatagcaccgactgtgtctctaacaaggtttcaattcagcccctggatgagacagccgtgacagacaaggagaataatttacacgaatcagaatacggcgaccaggaggggaagcgactggtagacaccgatgtggcacggaattccagcgacgacataccaaataaccacatcccaggcgaccatatcccggacaaggccacggtgtttaccgatgaggagtcctattctttcgaaagctccaagtttacaagaactatcagccctcctactcttggaacacttcggtcctgcttctcctggtctgggggtcttggagatttcagtaggactccgtcaccttcccctagtacagcactccaacaattccgaagaaagagtgacagccctacctcacttccagagaacaacatgtccgatgtctctcagttaaagagcgaggaatcatccgacgacgagtcccatcccctacgagaggaggcttgctcttcacagtcccaggaatcaggagaattctccttgcagtcatctaacgcatctaaactgtcccagtgtagctctaaggactcggatagtgaggagtcagattgtaacattaagctgttggattcccagtccgatcaaacatctaagctccgactctcccatttttcgaagaaggatacgccactgcgaaataaggtgcctggactttataagagctcctcagcggacagcctgtccactacaaaaattaaacccctcgggccggccagagcttctggactgagcaaaaaaccagcaagtattcagaagcgcaagcaccacaacgcagagaacaagcccggacttcagatcaagctgaatgaactatggaagaactttgggttcaagaaggatagcgagaaacttcccccatgcaagaaacccctgagtcccgtgagagacaacatccagttgacccccgaggcggaggaagatatttttaacaaacccgaatgcggccgggtgcagagagctatcttccagtag

SEQ ID NO: 341199 - DNA, 2541 bp, Artificial Sequence
  derived and/or modified sequence
atgggaatacaaggcctcctccagttcattaaagaggcatcagagccaattcacgtgcgtaaatacaagggacaggtggtcgccgtggacacatattgttggctgcacaaaggggctattgcatgtgcagagaaactggccaagggcgagcctactgatcgctatgtcggcttctgtatgaagtttgtcaatatgctgctttcccatgggatcaaacccattctagtctttgacgggtgcaccctgccgtccaagaaggaagtcgaacggagcaggagagaacgcaggcaggccaacttactaaagggcaagcagctcctacgcgagggtaaagtgagtgaggccagggaatgttttactaggagcattaatataactcacgcaatggctcataaagtcattaaggccgcaaggagtcagggcgtcgactgcctggtggcaccttacgaggccgacgcacagctcgcgtacctaaacaaggccggtattgtgcaggcaataattaccgaggattccgatctgttggcttttggttgtaaaaaggtgattcttaaaatggatcagttcggcaacggtctggagattgatcaggcaagactgggtatgtgccggcaactgggagatgtgtttacagaagagaaattcaggtatatgtgcatcctttctggatgcgattatttatcttctcttcgaggtattgggcttgcaaaggcatgtaaggttctgcgtctcgctaacaacccggatatcgtgaaggtaattaagaaaataggccattatctgaagatgaacattaccgtgcctgaagactatataaacgggtttattcgcgctaataatacatttctgtatcaactcgtgttcgacccaatcaaaagaaagctcataccgctgaacgcgtacgaggatgatgtcgacccagaaacattgtcctacgcgggtcagtacgttgatgacagcatcgcactgcagattgctctgggaaacaaagatatcaatacctttgaacagatagatgattacaatcccgacaccgccatgcctgctcattccaggagccattcgtgggatgataagacttgccagaagtcagccaatgttagctcgatctggcatagaaattacagccccagacctgagagcggcaccgtctctgatgcaccccagctgaaagagaacccctcaacggtgggtgtggagcgtgtgatctcaactaagggcctgaacctgcctcgcaaatccagcattgtaaagaggcccagaagtgctgagctatctgaggatgatctattgagccaatactccctttctttcactaagaagacaaagaaaaacagcagtgaggggaacaagagcctgagtttcagtgaggttttcgtgcctgatcttgtgaatggaccaactaacaagaagtctgtctccaccccacccaggacgaggaataaatttgcaacctttctacagagaaagaatgaagagagtggcgcagtggttgtgccaggcacccgctctcggttcttctgctcatccgatagcacagactgcgtgtcaaacaaggtgagtattcagccacttgatgagaccgccgtgacagataaggagaataacctgcacgagtcggagtacggagaccaagagggcaagaggctcgtcgataccgacgtcgccagaaacagctcagatgatatacccaacaatcacatccccggtgaccatattcccgacaaagccaccgtctttaccgacgaggaatcctattctttcgaaagttcaaaatttaccagaaccattagcccacccactcttggtaccctgcgcagttgcttttcttggtccggtggactgggtgatttttcgcggaccccttccccaagcccatctaccgctctacagcagtttcgccgtaaaagtgacagccctacatcgcttccagaaaacaacatgtccgatgtgtcccaattgaaatctgaggaaagctcggatgacgagtcgcaccctctgagggaggaagcctgttcgagtcagtctcaggagtcaggcgaattcagcctgcagagctctaatgcaagcaaactgagtcagtgctccagcaaggattccgacagtgaggaatctgactgtaacattaagctcttggattcccagtcagatcagacatcgaagctgcggctgtcacacttttccaaaaaggatacacccttaagaaacaaggtgccagggctatacaaatcatcaagcgctgattcactctcaacaactaagatcaaacccttaggcccagccagggcaagtggcctgtctaaaaaacccgcttcaatacagaagcgcaagcaccacaatgcagaaaacaaacccggactgcagattaagctcaacgagctctggaaaaactttgggtttaaaaaggactccgagaagctacccccttgtaagaagccgctctcccctgtaagagacaacattcagctaacacctgaagcagaggaggatatcttcaataagccagaatgtgggagagtgcaacgcgcaattttccaatag

SEQ ID NO: 341200 - DNA, 2541 bp, Artificial Sequence
  derived and/or modified sequence
atgggcattcaagggctgctccagttcatcaaggaagcttcagagcctattcatgtgcggaagtataagggccaggttgtggcggtcgacacatattgctggctacacaagggggcaattgcctgcgccgaaaagctagccaaaggggaacctactgatcggtacgtcggattttgcatgaagttcgtgaacatgctgcttagtcatgggatcaagcctattctggtgttcgacggatgtacgctgcccagcaagaaagaagtcgaacggtcaaggcgggagaggcgccaagctaatctccttaagggcaaacagttattgagggagggaaaggtgtcagaagctagagaatgttttactcgatccataaatattacccatgcgatggcccacaaggtcattaaagccgcacggagccagggagttgactgtctagtggcaccatacgaagccgacgcacagctggcctatctgaataaggctggcatagtccaagctatcattacagaggactctgacctcctggccttcgggtgcaagaaggtgatactgaagatggaccagtttgggaacggtcttgagatcgaccaggccaggcttggaatgtgcagacaacttggggatgtttttaccgaagaaaagttcaggtatatgtgcattctttcagggtgtgattatttatcctctctgaggggcattggacttgctaaagcctgcaaggtattgcgcctcgcaaataaccctgatatcgtaaaagtcatcaagaagattggccattatctgaaaatgaacattacagttcccgaagactacattaacggcttcataagagcaaataatacattcctgtaccaactcgtgttcgaccccatcaagagaaaattaatcccactgaacgcatatgaagatgacgtggacccagagactttgagctacgccggtcagtacgtggacgactccattgcgctccagattgctttgggcaacaaagacattaacaccttcgagcagattgatgattataatcctgatacggcaatgccagcccactccaggagccattcctgggacgataagacttgccagaaatccgccaatgtgagctctatatggcataggaattatagcccaaggccggagtccggcaccgtttctgatgcccctcagttgaaagaaaatcccagtactgtcggggtggaaagggttataagcactaaaggactgaatctgccaaggaagagttcaatcgtgaagcggcctcgctctgctgaactaagtgaggacgatttgctgagccagtactccctaagttttaccaaaaaaacaaaaaagaattcatccgagggcaacaagagcttgtcatttagtgaagtgttcgtgccggacttagtaaatgggccaacgaataagaaatcagtgtccacccctccaagaacaaggaacaaatttgccacttttctgcagcggaagaatgaagagtctggcgctgtggtggtcccaggtacaagatcccggtttttctgctcatccgatagcacggattgtgtcagtaataaggtttccattcagcctctggacgaaacggcagtgacagataaggagaataacctccatgagtctgaatacggcgatcaggagggaaagagacttgtcgacaccgatgtcgcacgaaactcatccgatgatatcccgaataaccatataccaggcgaccacatcccagataaagccactgttttcacggacgaagagagttactctttcgagtcatctaaatttactcgaaccatctccccacccaccctcgggacactgcgctcatgcttttcttggagcggaggcctcggcgattttagcaggacaccaagccccagcccaagtacagcactacagcaatttcgcagaaaatctgatagtcctacttcccttcccgaaaacaatatgagcgacgtctcccagttgaaatctgaagaatcaagcgacgacgagagtcatcccctccgagaggaagcgtgttcttctcagtctcaggagtccggagaattctccctgcagagtagcaacgcctctaagttgagccagtgtagcagcaaagatagcgactcagaagagtctgactgcaacatcaaactcctagactcacagtccgaccagacatccaagctgcgcctttctcatttctccaaaaaggatacccccctgcgcaacaaagtacccggactgtataagtcttcttcggccgactccctgagtaccacaaaaatcaagcccctcggaccagcgagagcttccggcctgagcaagaagccagcatctatacaaaaacggaagcaccacaacgctgagaacaaacctggactgcagattaaacttaatgaactgtggaagaatttcggatttaagaaggattccgaaaaactacctccctgcaaaaagccccttagccctgtccgagacaatatccaattgaccccggaggcagaggaagatatattcaataaacccgagtgcggcagggtgcagcgtgccatctttcagtag

SEQ ID NO: 341201 - DNA, 36 bp, Artificial Sequence
  derived and/or modified sequence
atgggcattcagggcctcctgcaatttatcaaatag

SEQ ID NO: 341202 - protein, 169 aa, Artificial Sequence
  derived and/or modified sequence
MGIQGLLQFIKEASEPIHVRKYKGQVVAVDTYCWLHKGAIACAEKLAKGEPTDRRRQANLLKGKQLLREGKVSEARECFTRSINITHAMAHKVIKAARSQGVDCLVAPYEADAQLAYLNKAGIVQAIITEDSDLLAFGCKKVILKMDQFGNGLEIDQARLGMCRQLGDV

SEQ ID NO: 341203 - DNA, 510 bp, Artificial Sequence
  derived and/or modified sequence
atgggcatccagggcctgctgcagttcatcaaggaggccagcgagcccatccacgtgagaaagtacaagggccaggtggtggccgtggacacctactgctggctgcacaagggcgccatcgcctgcgccgagaagctggccaagggcgagcccaccgacagaagaagacaggccaacctgctgaagggcaagcagctgctgagagagggcaaggtgagcgaggccagagagtgcttcaccagaagcatcaacatcacccacgccatggcccacaaggtgatcaaggccgccagaagccagggcgtggactgcctggtggccccctacgaggccgacgcccagctggcctacctgaacaaggccggcatcgtgcaggccatcatcaccgaggacagcgacctgctggccttcggctgcaagaaggtgatcctgaagatggaccagttcggcaacggcctggagatcgaccaggccagactgggcatgtgcagacagctgggcgacgtgtag

SEQ ID NO: 341204 - DNA, 510 bp, Artificial Sequence
  derived and/or modified sequence
atgggaatacagggactgttgcaattcataaaggaagctagcgagcccattcatgttcgaaagtacaaggggcaggtggtggcagtcgacacctattgttggctgcataaaggggcaatagcttgcgccgagaaactagccaaaggggagcccaccgatcgaaggagacaagctaacctacttaagggcaagcagctactgcgggagggaaaagtgagcgaagccagggaatgtttcactcggagtatcaatatcactcatgccatggcacacaaagttattaaggccgcgagaagccagggcgttgactgtctggtggcgccctacgaggccgacgcacaactggcctatttgaacaaggcagggattgtgcaggctatcataaccgaagatagtgacctgctggcatttggatgcaagaaggtgatccttaaaatggaccagttcggtaacggcctagagatcgaccaggctcgactcggaatgtgtcgtcaactgggggatgtgtag

SEQ ID NO: 341205 - DNA, 3070 bp, Artificial Sequence
  derived and/or modified sequence
gcctaaggaaacgtgtcgtctggaatgggcttgggggccacgcctgcacatctccgcgagacagagggataaagtgaagatggtgctgttattgttacctcgagtgccacatgcgacctctgagatatgtacacagtcattcttactatcgcactcagccattcttactacgctaaagaagaaataattattcgaggatatttgcctggcccagaagaaacttatgtaaatttcatgaactattatatccgttttcctcggagtgagagaaaactctttttagatatcatctgagaggtagttaatttggcaccatggggatacagggattgctacaatttatcaaagaagcttcagaacccatccatgtgaggaagtataaagggcaggtagtagctgtggatacatattgctggcttcacaaaggagctattgcttgtgctgaaaaactagccaaaggtgaacctactgatagaagacgacaagccaatcttcttaagggaaagcaacttcttcgtgaggggaaagtctcggaagctcgagagtgtttcacccggtctatcaatatcacacatgccatggcccacaaagtaattaaagctgcccggtctcagggggtagattgcctcgtggctccctatgaagctgatgcgcagttggcctatcttaacaaagcgggaattgtgcaagccataattacagaggactcggatctcctagcttttggctgtaaaaaggtaattttaaagatggaccagtttggaaatggacttgaaattgatcaagctcggctaggaatgtgcagacagcttggggatgtattcacggaagagaagtttcgttacatgtgtattctttcaggttgtgactacctgtcatcactgcgtgggattggattagcaaaggcatgcaaagtcctaagactagccaataatccagatatagtaaaggttatcaagaaaattggacattatctcaagatgaatatcacggtaccagaggattacatcaacgggtttattcgggccaacaataccttcctctatcagctagtttttgatcccatcaaaaggaaacttattcctctgaacgcctatgaagatgatgttgatcctgaaacactaagctacgctgggcaatatgttgatgattccatagctcttcaaatagcacttggaaataaagatataaatacttttgaacagatcgatgactacaatccagacactgctatgcctgcccattcaagaagtcatagttgggatgacaaaacatgtcaaaagtcagctaatgttagcagcatttggcataggaattactctcccagaccagagtcgggtactgtttcagatgccccacaattgaaggaaaatccaagtactgtgggagtggaacgagtgattagtactaaagggttaaatctcccaaggaaatcatccattgtgaaaagaccaagaagtgcagagctgtcagaagatgacctgttgagtcagtattctctttcatttacgaagaagaccaagaaaaatagctctgaaggcaataaatcattgagcttttctgaagtgtttgtgcctgacctggtaaatggacctactaacaaaaagagtgtaagcactccacctaggacgagaaataaatttgcaacatttttacaaaggaaaaatgaagaaagtggtgcagttgtggttccagggaccagaagcaggtttttttgcagttcagattctactgactgtgtatcaaacaaagtgagcatccagcctctggatgaaactgctgtcacagataaagagaacaatctgcatgaatcagagtatggagaccaagaaggcaagagactggttgacacagatgtagcacgtaattcaagtgatgacattccgaataatcatattccaggtgatcatattccagacaaggcaacagtgtttacagatgaagagtcctactcttttgagagcagcaaatttacaaggaccatttcaccacccactttgggaacactaagaagttgttttagttggtctggaggtcttggagatttttcaagaacgccgagcccctctccaagcacagcattgcagcagttccgaagaaagagcgattcccccacctctttgcctgagaataatatgtctgatgtgtcgcagttaaagagcgaggagtccagtgacgatgagtctcatcccttacgagaagaggcatgttcttcacagtcccaggaaagtggagaattctcactgcagagttcaaatgcatcaaagctttctcagtgctctagtaaggactctgattcagaggaatctgattgcaatattaagttacttgacagtcaaagtgaccagacctccaagctacgtttatctcatttctcaaaaaaagacacacctctaaggaacaaggttcctgggctatataagtccagttctgcagactctctttctacaaccaagatcaaacctctaggacctgccagagccagtgggctgagcaagaagccggcaagcatccagaagagaaagcatcataatgccgagaacaagccggggttacagatcaaactcaatgagctctggaaaaactttggatttaaaaaagattctgaaaagcttcctccttgtaagaaacccctgtccccagtcagagataacatccaactaactccagaagcggaagaggatatatttaacaaacctgaatgtggccgtgttcaaagagcaatattccagtaaatgcagactgctgcaaagcttttgcctgcaagagaatctgatcaatttgaagtccctgtttgggaatgaggcacttatcagcatgaagaattttttctcattctgtgccattttaaaaatagaatacattttgtatattaactttataattgggttgtggtttttttgctcagctttttatatttttataagaagctaaatagaagaataattgtatctctgacaggtttttggaggttttagtgttaattgggaaaatcctctggagtttataaaagtctactctaaatatttctgtaatgttgtcaagtagaaagatagtaaatggagaaact

SEQ ID NO: 341206 - DNA, 510 bp, Artificial Sequence
  derived and/or modified sequence
atgggcatccagggcctgctgcagttcatcaaggaggccagcgagcccatccacgtgaggaagtacaagggccaggtggtggccgtggacacctactgctggctgcacaagggggccatcgcctgtgccgagaagctggccaagggggagcccacagacagaagacggcaggccaacctgctgaagggcaagcagctgctgcgggagggcaaggtgtctgaggcccgggagtgcttcaccaggagcatcaacatcacccacgccatggcccacaaggtgatcaaggccgcccggagccagggcgtggactgcctggtggccccctatgaagcagatgcccagctggcctacctgaacaaggccggcatcgtgcaggccatcatcacagaggacagcgacctgctggccttcggctgcaagaaggtgatcctgaagatggaccagtttggaaatggcctggagattgaccaggcccggctgggcatgtgccggcagctgggagatgtgtag

SEQ ID NO: 341207 - DNA, 510 bp, Artificial Sequence
  derived and/or modified sequence
atgggcatccagggcctgctgcagttcatcaaggaggccagcgagcccattcacgtgagaaaatataagggccaggtagtggcagtagatacttactgctggttacataaaggtgcaatagcctgtgctgaaaagctcgccaaaggtgaaccgacagatagacggcgacaggccaacctcttgaagggcaaacagctgcttagagagggcaaagtgagcgaagcccgcgagtgctttacccgatccatcaacataacccatgccatggcccataaagtcattaaggcagcgcgatcacagggagtcgattgcctcgtggctccctatgaggctgatgcccaactggcctatctcaacaaggctggaatcgtgcaggccattatcaccgaagactcagacctgctagccttcggttgtaaaaaagtgatcctcaagatggaccagttcgggaatggacttgagatagatcaggctaggttaggaatgtgtcgccagcttggggacgtgtag

SEQ ID NO: 341208 - DNA, 510 bp, Artificial Sequence
  derived and/or modified sequence
atggggattcagggcttactgcagttcatcaaagaggcctcagagcccatacatgttcggaagtacaagggccaagtggtcgcagtcgatacctactgctggctgcataaaggcgctatcgcctgcgcagagaagttggccaaaggcgaacctacagatcgccgacgtcaggcaaatcttctaaaaggcaagcagctgctgcgcgagggtaaagtatccgaagccagggaatgcttcacaagaagcataaacatcacgcacgccatggctcacaaagttatcaaggcagcacgctctcaaggggtcgactgcttggtggccccatacgaagccgacgctcagctggcctacctgaataaggctggtatcgtgcaggctatcattaccgaagacagtgaccttcttgcgttcggatgcaagaaggtgattttaaagatggaccagttcggcaatggtctcgagatcgaccaggcccgattagggatgtgtcgccagttgggggacgtgtag

SEQ ID NO: 341209 - DNA, 408 bp, Artificial Sequence
  derived and/or modified sequence
atgggcatccagggcctgctgcagttcatcaaggaggccagcgagcccatccacgtgagaaagtacaagggccaggtggtggccgtggacacctactgctggctgcacaagggcgccatcgcctgcgccgagaagctggccaagggcgagcccaccgacagatacgtgggcttctgcatgaagttcgtgaacatgctgctgagccacggcatcaagcccatcctggtgttcgacggctgcaccctgcccagcaagaaggaggtggagagaagcagaagagagagaagacaggccaacctgctgaagggcaagcagctgctgagagagggcaaggtgagcgaggccagagagtgcttcaccagaagcatcaacatcacccacgccatggcccacaaggtgatcaagtag

SEQ ID NO: 341210 - DNA, 408 bp, Artificial Sequence
  derived and/or modified sequence
atggggatccagggcctgttgcagttcatcaaggaagcttccgaacctatccatgtccggaaatataaggggcaggttgttgctgtggatacctactgttggttgcataagggtgctatcgcatgcgcagaaaagctggcgaaaggcgaacccacagacagatacgtcggcttttgtatgaaattcgttaacatgttactgtctcacggcatcaaaccgatcctcgtgtttgacggatgcaccctaccgtctaaaaaggaggtggagagaagccggagggaacgaaggcaggccaaccttttaaagggaaagcaactcctgagggagggcaaggtcagcgaggccagggagtgctttacacgctctattaacattactcatgccatggctcacaaagtgattaagtag

SEQ ID NO: 341211 - DNA, 607 bp, Artificial Sequence
  derived and/or modified sequence
cttatgtaaatttcatgaactattatatccgttttcctcggagtgagagaaaactctttttagatatcatctgagagcagaactagtgaatcccagtcactgagtggagttgagagtctaagaacctctgaaatttgagaactgctggaccagagcctttagagctctgataaggtgtcaacagggtagttaatttggcaccatggggatacagggattgctacaatttatcaaagaagcttcagaacccatccatgtgaggaagtataaagggcaggtagtagctgtggatacatattgctggcttcacaaaggagctattgcttgtgctgaaaaactagccaaaggtgaacctactgataggtatgtaggattttgtatgaaatttgtaaatatgttactatctcatgggatcaagcctattctcgtatttgatggatgtactttaccttctaaaaaggaagtagagagatctagaagagaaagacgacaagccaatcttcttaagggaaagcaacttcttcgtgaggggaaagtctcggaagctcgagagtgtttcacccggtctatcaatatcacacatgccatggcccacaaagtaattaaa

SEQ ID NO: 341212 - DNA, 408 bp, Artificial Sequence
  derived and/or modified sequence
atgggcatccagggcctgctgcagttcatcaaggaggccagcgagcccatccacgtgaggaagtacaagggccaggtggtggccgtggacacctactgctggctgcacaagggggccatcgcctgtgccgagaagctggccaagggggagcccacagacagatatgtgggcttctgcatgaagtttgtgaacatgctgctgagccacggcatcaagcccatcctggtgtttgatggctgcaccctgcccagcaagaaggaggtggagaggagccggcgggagcggcggcaggccaacctgctgaagggcaagcagctgctgcgggagggcaaggtgtctgaggcccgggagtgcttcaccaggagcatcaacatcacccacgccatggcccacaaggtgatcaagtag

SEQ ID NO: 341213 - DNA, 408 bp, Artificial Sequence
  derived and/or modified sequence
atgggcatccagggcctgctgcagttcatcaaggaggccagcgagcctatccacgtgaggaagtacaaaggacaggtcgttgctgttgacacgtactgctggctgcataagggggcaattgcctgtgcggagaaattggccaaaggcgagccgacagacaggtatgttgggttctgcatgaagtttgtcaacatgctgctttcacatggtattaagcccatcctagtcttcgatggctgcactttgccgagcaaaaaagaggtggagcgttcacgcagggaaagaagacaagcgaacctgttaaaggggaagcagctactcagagaagggaaagtgagtgaggccagagagtgcttcactcgaagcattaatattacgcatgcaatggctcacaaggtgattaagtag

SEQ ID NO: 341214 - DNA, 408 bp, Artificial Sequence
  derived and/or modified sequence
atgggtatccagggactgttacagttcattaaggaagcttccgaacccattcacgttaggaagtacaaggggcaggttgtggctgtcgatacttactgttggctgcataaaggagctattgcatgtgccgagaaactagcaaagggagaacccacagacaggtatgttgggttctgtatgaagttcgtgaacatgctgctgtcccacggaatcaagcctatcctagtctttgatggatgcaccctgccatccaaaaaagaggtggagcgctccagaagagagaggcgccaggcaaacctactaaagggtaaacagttgctccgggaaggcaaagtctccgaggctagagaatgtttcacccggtctattaatattacacacgccatggcacacaaggtgatcaaatag

SEQ ID NO: 341215 - protein, 290 aa, Artificial Sequence
  derived and/or modified sequence
MDIEAYFERIGYKNSRNKLDLETLTDILEHQIRAVPFENLNMHCGQAMELGLEAIFDHIVRRNRGGWCLQVNQLLYWALTTIGFQTTMLGGYFYIPPVNKYSTGMVHLLLQVTIDGRNYIVDAGSGSSSQMWQPLELISGKDQPQVPCIFCLTEERGIWYLDQIRREQYITNKEFLNSHLLPKKKHQKIYLFTLEPRTIEDFESMNTYLQTSPTSSFITTSFCSLQTPEGVYCLVGFILTYRKFNYKDNTDLVEFKTLTEEEVEEVLRNIFKISLGRNLVPKPGDGSLTI

SEQ ID NO: 341216 - DNA, 873 bp, Artificial Sequence
  derived and/or modified sequence
atggacatagaagcatactttgagaggataggctacaagaatagccgtaataaattagatctggaaaccctaacggacattctggagcaccagattcgcgctgtgcctttcgagaatttaaacatgcactgtggccaggccatggaactggggttagaggccatcttcgaccatatcgtgcgacggaaccgcggaggctggtgcctgcaggttaaccaacttctatactgggcactgacgaccatcgggttccaaacgacaatgcttggaggatatttctatatcccaccagtgaataagtactcaacaggcatggtgcatctactgttgcaggttaccatcgacggtagaaattacatcgttgatgcagggtccggaagttcctctcagatgtggcagccacttgagctaattagcgggaaggatcagccgcaggttccttgtatcttctgtttaactgaagaaaggggcatatggtaccttgaccagatacgccgagagcagtacattaccaataaggaatttctgaacagtcacctactcccaaaaaaaaagcatcagaagatctacctatttactctcgagcccaggacgattgaagatttcgagtcgatgaatacttacttacagacgtctccaacaagctcgttcattactaccagcttctgcagcttacagacaccagaaggagtatattgcttagtgggattcatcctgacatacagaaagttcaattataaagacaatacagatctggttgaattcaaaacactgactgaggaggaagtggaagaggtcttaaggaacatatttaaaatctccctgggcagaaacctggtccccaaaccgggcgacggaagtctgactatctag

SEQ ID NO: 341217 - DNA, 873 bp, Artificial Sequence
  derived and/or modified sequence
atggacatcgaggcctactttgagcgcatcggctacaagaacagcaggaacaagctggacctggagaccctgacagacatcctggagcaccagatccgggctgtgccctttgagaacctgaacatgcactgcggccaggccatggagctgggcctggaggccatctttgaccacatcgtgagaagaaacagaggaggctggtgcctgcaggtgaaccagctgctgtactgggccctgaccaccatcggcttccagaccaccatgctgggcggctacttctacatcccccctgtgaacaagtacagcacaggcatggtgcacctgctgctgcaggtgaccattgatggaagaaactacatcgtggatgctggcagcggcagcagcagccagatgtggcagcccctggagctgatcagcggcaaggaccagccccaggtgccctgcatcttctgcctgacagaggagcggggcatctggtacctggaccagatcagaagagagcagtacatcaccaacaaggagttcctgaacagccacctgctgcccaagaagaagcaccagaagatctacctgttcaccctggagcccaggaccatcgaggactttgagagcatgaacacctacctgcagaccagccccaccagcagcttcatcaccaccagcttctgcagcctgcagaccccagagggcgtgtactgcctggtgggcttcatcctgacctacaggaagttcaactacaaggacaacacagacctggtggagttcaagaccctgacagaggaggaggtggaggaggtgctgaggaacatcttcaagatcagcctgggcaggaacctggtgcccaagccaggagatggcagcctgaccatctag

SEQ ID NO: 341218 - DNA, 1322 bp, Artificial Sequence
  derived and/or modified sequence
tgagatcacttcccttgcagactttggaagggagagcactttattacagaccttggaagcaagaggattgcattcagcctagttcctggttgctggccaaagggatcatggacattgaagcatattttgaaagaattggctataagaactctaggaacaaattggacttggaaacattaactgacattcttgagcaccagatccgggctgttccctttgagaaccttaacatgcattgtgggcaagccatggagttgggcttagaggctatttttgatcacattgtaagaagaaaccggggtgggtggtgtctccaggtcaatcaacttctgtactgggctctgaccacaatcggttttcagaccacaatgttaggagggtatttttacatccctccagttaacaaatacagcactggcatggttcaccttctcctgcaggtgaccattgacggcaggaattacattgtcgatgctgggtctggaagctcctcccagatgtggcagcctctagaattaatttctgggaaggatcagcctcaggtgccttgcattttctgcttgacagaagagagaggaatctggtacctggaccaaatcaggagagagcagtatattacaaacaaagaatttcttaattctcatctcctgccaaagaagaaacaccaaaaaatatacttatttacgcttgaacctcgaacaattgaagattttgagtctatgaatacatacctgcagacgtctccaacatcttcatttataaccacatcattttgttccttgcagaccccagaaggggtttactgtttggtgggcttcatcctcacctatagaaaattcaattataaagacaatacagatctggtcgagtttaaaactctcactgaggaagaggttgaagaagtgctgagaaatatatttaagatttccttggggagaaatctcgtgcccaaacctggtgatggatcccttactatttagaataaggaacaaaataaacccttgtgtatgtatcacccaactcactaattatcaacttatgtgctatcagatatcctctctaccctcacgttattttgaagaaaatcctaaacatcaaatactttcatccataaaaatgtcagcatttattaaaaaacaataactttttaaagaaacataaggacacattttcaaattaataaaaataaaggcattttaaggatggcctgtgattatcttgggaagcagagtgattcatgctagaaaacatttaatattgatttattgttgaattcatagtaaatttttactggtaaatgaataaagaatattgtggaaaaa

SEQ ID NO: 341219 - DNA, 873 bp, Artificial Sequence
  derived and/or modified sequence
atggacatcgaggcctacttcgagcggatcggctacaagaacagcagaaataaactagatcttgaaacactgacagacatcctggagcaccagatccgggctgtaccttttgagaatctgaacatgcactgcggtcaagctatggaactgggactggaagctatattcgaccacattgtcaggagaaacagggggggctggtgtcttcaagtgaaccagttgttatattgggcactcacaaccatcggctttcaaactacaatgttgggaggctacttctacatcccccctgtcaataagtatagcaccggtatggtacacctccttctgcaagtgactatcgacggccggaattacatcgtcgacgcaggaagtggctcgagcagccaaatgtggcagcctctggagctaattagtggcaaggaccagccccaggtgccgtgcatcttttgcctgactgaggagagaggcatctggtatcttgaccagattcgtagggaacagtacattactaacaaggaatttctgaattcacaccttctgcctaagaagaaacatcagaaaatttatctgtttacattggagccacggactattgaggatttcgaaagcatgaatacttatctgcagacctctcccacctcatcatttattacaacatctttctgctccctccagaccccagagggagtgtattgcctggtcgggttcattctcacttacagaaaattcaattacaaggacaacaccgatctagtggaattcaagacgctcacggaagaggaagttgaggaagtgctcagaaacatctttaagatctcattgggaaggaatctcgtgcccaagcctggggacggttcgttgaccatatag

SEQ ID NO: 341220 - DNA, 873 bp, Artificial Sequence
  derived and/or modified sequence
atggacattgaggcttactttgagcgcattgggtataaaaattctagaaataagctcgacctcgagacgcttaccgacatccttgaacaccagatcagagccgtcccattcgaaaatctaaacatgcattgtggtcaggctatggagctcggcctagaagctatcttcgatcatatcgtgaggagaaatagggggggatggtgcctgcaggtgaatcagctgttgtactgggccttgacaactattggctttcagaccactatgctcggaggttacttttacatacctccagtaaacaaatatagtacgggaatggtgcatctcctactccaggtaaccatagacggaagaaattatatcgtggacgccggatctggatcgtccagtcaaatgtggcagcctcttgaactcataagtggcaaggaccagccccaggtgccatgtatcttctgccttactgaggaacgtggcatctggtacctcgatcaaattagacgtgagcaatacattaccaataaagaatttctgaattctcatttgctgccgaaaaaaaaacaccagaagatatacctgtttactctggaaccccgtaccatcgaggactttgagtcaatgaatacatatctgcagaccagccccactagtagctttataaccacgtcattttgctcattgcaaacccctgagggagtgtattgcttggtaggcttcatcctgacgtatcgtaaattcaactataaagacaataccgacctggttgagtttaaaacccttaccgaagaagaggtggaggaagttctgagaaacatttttaaaatatcccttgggcgtaatctcgtcccaaaacctggcgatggctcgctgaccatctag

SEQ ID NO: 341221 - DNA, 873 bp, Artificial Sequence
  derived and/or modified sequence
atggacatcgaggcctacttcgagagaatcggctacaagaacagcagaaacaagctggacctggagaccctgaccgacatcctggagcaccagatcagagccgtgcccttcgagaacctgaacatgcactgcggccaggccatggagctgggcctggaggccatcttcgaccacatcgtgagaagaaacagaggcggctggtgcctgcaggtgaaccagctgctgtactgggccctgaccaccatcggcttccagaccaccatgctgggcggctacttctacatcccccccgtgaacaagtacagcaccggcatggtgcacctgctgctgcaggtgaccatcgacggcagaaactacatcgtggacgccggcagcggcagcagcagccagatgtggcagcccctggagctgatcagcggcaaggaccagccccaggtgccctgcatcttctgcctgaccgaggagagaggcatctggtacctggaccagatcagaagagagcagtacatcaccaacaaggagttcctgaacagccacctgctgcccaagaagaagcaccagaagatctacctgttcaccctggagcccagaaccatcgaggacttcgagagcatgaacacctacctgcagaccagccccaccagcagcttcatcaccaccagcttctgcagcctgcagacccccgagggcgtgtactgcctggtgggcttcatcctgacctacagaaagttcaactacaaggacaacaccgacctggtggagttcaagaccctgaccgaggaggaggtggaggaggtgctgagaaacatcttcaagatcagcctgggcagaaacctggtgcccaagcccggcgacggcagcctgaccatctag

SEQ ID NO: 341222 - DNA, 1100 bp, Artificial Sequence
  derived and/or modified sequence
ggggggagctgggacctaagccgcgcgcacacccctttctctgcgtctggtggaggtgcacagaggcttttgagtcaggcccaagcgcagccaggtgacctccccgcggcctttcaagcctgagctcggtggacagctccctctcccgtgagtcccgctgtcctgtacgcgcccggtcgagccccgggctgcgcaccccgctaggagctgcccggccagcccgcttctctgcccggagccatgaatctcagtagcgccagtagcacggaggaaaaggcagtgacgaccgtgctctggggctgcgagctcagtcaggagaggcggacttggaccttcagaccccagctggaggggaagcagagctgcaggctgttgcttcatacgatttgcttgggggagaaagccaaagaggagatgcatcgcgtggagatcctgcccccagcaaaccaggaggacaagaagatgcagccggtcaccattgcctcactccaggcctcagtcctccccatggtctccatggtaggagtgcagctttctcccccagttactttccagctccgggctggctcaggacccgtgttcctcagtggccaggaacgttatgaagcatcagacctaacctgggaggaggaggaggaagaagaaggggaggaggaggaagaggaagaggaagatgatgaggatgaggatgcagatatatctctggaggagcaaagccctgtcaaacaagtcaaaaggctggtgccccagaagcaggcgagcgtggctaagaaaaaaaagctggaaaaagaagaagaggaaataagagccagcgttagagacaagagccctgtgaaaaaggccaaagccacagccagagccaagaagccaggattcaagaaatgaggagccacgccttggggggcacggtgcaaagtgggccttccctgggctgtgctgcaggcacagggtgcccctgtccagcccctccacctgtgtctgaatgcaacaggggtgttgcgggggcaacatgagagcccctcacccccaactctccactttcaggaggcccccagtgaagagccccacctcggggtcacaataaagttgcctggtcagga

SEQ ID NO: 341223 - DNA, 1874 bp, Artificial Sequence
  derived and/or modified sequence
agtgtgctccccgccccctgccgcggcgcctcgcctcccggctcacctccccaccccacctgcccgctgcggctctccgcgggagatctcaccgttctggagacagggctcgctcgctctcacggtaggctggaagaacgggctgtctgggccttaggaaaggcccatgctgtataaggcatggggaaaggaaaggaagaaaggcaacgaacaagaaggagggcttccaactgcagcttcctgccggctgcaggcctcccttcctaagctgagctgaggcttcctctccatgggctggggagggggcgccaggaggcctcggcgggtccgcaattggccgggacagcttctcacgaaaggtcctgggccggcatcatcagcctcacctgggaactggttagaactacaaattccctcggccccacccagaccgacgccaagggcagctgtggagtggggcgcggcaatgcgccccttaacagccctccaggcttcttagcccgggcttggacagccgccttccggccagaggggatgaggttgcgctgcgctccgggagcgccgatggcgtgactggccccgcgcggagcagcgacagtaaggctgtgtggggggagctgggacctaagccgcgcgcacacccctttctctgcgtctggtggaggtgcacagaggcttttgagtcaggcccaagcgcagccaggtgacctccccgcggcctttcaagcctgagctcggtggacagctccctctcccgtgagtcccgctgtcctgtacgcgcccggtcgagccccgggctgcgcaccccgctaggaggtgggtactcgtcctccaggagttgccggtgagcccttgaccgtggcaggtcccctccagccgcgagcgacccctcagtacctgccgatgcctgctggtctctggcatcctccagtcgagggtcagggtcagggagcaaggcctcacgcgggcgccctccttgcagctgcccggccagcccgcttctctgcccggagccatgaatctcagtagcgccagtagcacggaggaaaaggcagtgacgaccgtgctctggggctgcgagctcagtcaggagaggcggacttggaccttcagaccccagctggaggggaagcagagctgcaggctgttgcttcatacgatttgcttgggggagaaagccaaagaggagatgcatcgcgtggagatcctgcccccagcaaaccaggaggacaagaagatgcagccggtcaccattgcctcactccaggcctcagtcctccccatggtctccatggtaggagtgcagctttctcccccagttactttccagctccgggctggctcaggacccgtgttcctcagtggccaggaacgttatgaagcatcagacctaacctgggaggaggaggaggaagaagaaggggaggaggaggaagaggaagaggaagatgatgaggatgaggatgcagatatatctctggaggagcaaagccctgtcaaacaagtcaaaaggctggtgccccagaagcaggcgagcgtggctaagaaaaaaaagctggaaaaagaagaagaggaaataagagccagcgttagagacaagagccctgtgaaaaaggccaaagccacagccagagccaagaagccaggattcaagaaatgaggagccacgccttggggggcacggtgcaaagtgggccttccctgggctgtgctgcaggcacagggtgcccctgtccagcccctccacctgtgtctgaatgcaacaggggtgttgcgggggcaacatgagagcccctcacccccaactctccactttcaggaggcccccagtgaagagccccacctcggggtcacaataaagttgcctggtcagg

SEQ ID NO: 341224 - DNA, 1190 bp, Artificial Sequence
  derived and/or modified sequence
agggggcgccaggaggcctcggcgggtccgcaattggccgggacagcttctcacgaaaggtcctgggccggcatcatcagcctcacctgggaactggttagaactacaaattccctcggccccacccagaccgacgccaagggcagctgtggagtggggcgcggcaatgcgccccttaacagccctccaggcttcttagcccgggcttggacagccgccttccggccagaggggatgaggttgcgctgcgctccgggagcgccgatggcgtgactggccccgcgcggagcagcgacactgcccggccagcccgcttctctgcccggagccatgaatctcagtagcgccagtagcacggaggaaaaggcagtgacgaccgtgctctggggctgcgagctcagtcaggagaggcggacttggaccttcagaccccagctggaggggaagcagagctgcaggctgttgcttcatacgatttgcttgggggagaaagccaaagaggagatgcatcgcgtggagatcctgcccccagcaaaccaggaggacaagaagatgcagccggtcaccattgcctcactccaggcctcagtcctccccatggtctccatggtaggagtgcagctttctcccccagttactttccagctccgggctggctcaggacccgtgttcctcagtggccaggaacgttatgaagcatcagacctaacctgggaggaggaggaggaagaagaaggggaggaggaggaagaggaagaggaagatgatgaggatgaggatgcagatatatctctggaggagcaaagccctgtcaaacaagtcaaaaggctggtgccccagaagcaggcgagcgtggctaagaaaaaaaagctggaaaaagaagaagaggaaataagagccagcgttagagacaagagccctgtgaaaaaggccaaagccacagccagagccaagaagccaggattcaagaaatgaggagccacgccttggggggcacggtgcaaagtgggccttccctgggctgtgctgcaggcacagggtgcccctgtccagcccctccacctgtgtctgaatgcaacaggggtgttgcgggggcaacatgagagcccctcacccccaactctccactttcaggaggcccccagtgaagagccccacctcggggtcacaataaagttgcctggtcagga

SEQ ID NO: 341225 - DNA, 1484 bp, Artificial Sequence
  derived and/or modified sequence
gtgctcctcagtgtgctccccgccccctgccgcggcgcctcgcctcccggctcacctccccaccccacctgcccgctgcggctctccgcgggagatctcaccgttctggagacagggctcgctcgctctcacggcttcttagcccgggcttggacagccgccttccggccagaggggatgaggttgcgctgcgctccgggagcgccgatggcgtgactggccccgcgcggagcagcgacagtaaggctgtgtggggggagctgggacctaagccgcgcgcacacccctttctctgcgtctggtggaggtgcacagaggcttttgagtcaggcccaagcgcagccaggtgacctccccgcggcctttcaagcctgagctcggtggacagctccctctcccgtgagtcccgctgtcctgtacgcgcccggtcgagccccgggctgcgcaccccgctaggaggtgggtactcgtcctccaggagttgccggtgagcccttgaccgtggcaggtcccctccagccgcgagcgacccctcagtacctgccgatgcctgctggtctctggcatcctccagtcgagggtcagggtcagggagcaaggcctcacgcgggcgccctccttgcagctgcccggccagcccgcttctctgcccggagccatgaatctcagtagcgccagtagcacggaggaaaaggcagtgacgaccgtgctctggggctgcgagctcagtcaggagaggcggacttggaccttcagaccccagctggaggggaagcagagctgcaggctgttgcttcatacgatttgcttgggggagaaagccaaagaggagatgcatcgcgtggagatcctgcccccagcaaaccaggaggacaagaagatgcagccggtcaccattgcctcactccaggcctcagtcctccccatggtctccatggtaggagtgcagctttctcccccagttactttccagctccgggctggctcaggacccgtgttcctcagtggccaggaacgttatgaagcatcagacctaacctgggaggaggaggaggaagaagaaggggaggaggaggaagaggaagaggaagatgatgaggatgaggatgcagatatatctctggaggagcaaagccctgtcaaacaagtcaaaaggctggtgccccagaagcaggcgagcgtggctaagaaaaaaaagctggaaaaagaagaagaggaaataagagccagcgttagagacaagagccctgtgaaaaaggccaaagccacagccagagccaagaagccaggattcaagaaatgaggagccacgccttggggggcacggtgcaaagtgggccttccctgggctgtgctgcaggcacagggtgcccctgtccagcccctccacctgtgtctgaatgcaacaggggtgttgcgggggcaacatgagagcccctcacccccaactctccactttcaggaggcccccagtgaagagcccc

SEQ ID NO: 341226 - protein, 414 aa, Artificial Sequence
  derived and/or modified sequence
EQQKFPYRYVEIVVVVDRRMVTKYNGDLKKIRKWVYELVNIVNNIYRSLNVHVALVGLEIWSKGDKITVQPDSDYTLNSFGEWRERDLLPRKKHDNAQLLTAVVFDGPTIGRAYIAGMCDPRHSVGVVMDHSKENLQVAVTMAHELGHNLGMEHDENQCHCDAPSCVMASVLSVVLSYEFSDCSQNQYQTYLTKHNPQCILNEPLLTVSGNELLEAGEECDCGAPENPCCDAATCKLRPGAQCAEGLCCDQCRFKGAGKICRRARGDNPDDRCTGQSADCPRNRFHRNGQPCLYNHGYCYNGKCPIMFYQCYFLFGSNATVAEDDCFNNNKKGDKYFYCRKENEKYIPCAQEDVKCGRLFCDNKKYPCHYNYSEDLDFGMVDHGTKCADGKVCSNRQCVDVNEAYKSTTVFSLI

SEQ ID NO: 341227 - protein, 596 aa, Artificial Sequence
  derived and/or modified sequence
MGSVSSLISGHSFHSKHCRASQYKLRKSSHLKKLNRYSDGLLRFGFSQDSGHGKSSSKMGKSEDFFYIKVSQKARGSHHPDYTALSSGDLGGQAGVDFDPSTPPKLMPFSNQLEMGSEKGAVRPTAFKPVLPRSGAILHSSPESASHQLHPAPPDKPKEQELKPGLCSGALSDSGRNSMSSLPTHSTSSSYQLDPLVTPVGPTSRFGGSAHNITQGIVLQDSNMMSLKALSFSDGGSKLGHSNKADKGPSCVRSPISTDECSIQELEQKLLEREGALQKLQRSFEEKELASSLAYEERPRRCRDELEGPEPKGGNKLKQASQKSQRAQQVLHLQVLQLQQEKRQLRQELESLMKEQDLLETKLRSYEREKTSFGPALEETQWEVCQKSGEISLLKQQLKESQTEVNAKASEILGLKAQLKDTRGKLEGLELRTQDLEGALRTKGLELEVCENELQRKKNEAELLREKVNLLEQELQELRAQAALARDMGPPTFPEDVPALQRELERLRAELREERQGHDQMSSGFQHERLVWKEEKEKVIQYQKQLQQSYVAMYQRNQRLEKALQQLARGDSAGEPLEVDLEGADIPYEDIIATEI

SEQ ID NO: 341228 - protein, 76 aa, Artificial Sequence
  derived and/or modified sequence
MGSVSSLISGHSFHSKHCRASQYKLRKSSHLKKLNRYSDGLLRFGFSQDSGHGKAMTRCPRASSMSGSCGRRRRRR

SEQ ID NO: 341229 - protein, 573 aa, Artificial Sequence
  derived and/or modified sequence
MGSVSSLISGHSFHSKHCRASQYKLRKSSHLKKLNRYSDGLLRFGFSQDSGHGKSSSKMGKSEDFFYIKVSQKARGSHHPDYTALSSGDLGGQAGVDFDPSTPPKLMPFSNQLEMGSEKGAVRPTAFKPVLPRSGAILHSSPESASHQLHPAPPDKPKEQELKPGLCSGALSDSGRNSMSSLPTHSTSSSYQLDPLVTPVGPTSRFGGSAHNITQGIVLQDSNMMSLKALSFSDGGSKLGHSNKADKGPSCVRSPISTDECSIQELEQKLLEREGALQKLQRSFEEKELASSLAYEERPRRCRDELEGPEPKGGNKLKQASQKSQRAQQVLHLQVLQLQQEKRQLRQELESLMKEQDLLETKLRSYEREKTSFGPALEETQWEVCQKSGEISLLKQQLKESQTEVNAKASEILGLKAQLKDTRGKLEGLELRTQDLEGALRTKGLELEVCENELQRKKNEAELLREKVNLLEQELQELRAQAALARDMGPPTFPEDVPALQRELERLVWKEEKEKVIQYQKQLQQSYVAMYQRNQRLEKALQQLARGDSAGEPLEVDLEGADIPYEDIIATEI

SEQ ID NO: 341230 - protein, 537 aa, Artificial Sequence
  derived and/or modified sequence
MGSVSSLISGHSFHSKHCRASQYKLRKSSHLKKLNRYSDGLLRFGFSQDSGHGKSSSKMGKSEDFFYIKVSQKARGSHHPDYTALSSGDLGGQAGVDFDPSTPPKLMPFSNQLEMGSEKGAVRPTAFKPVLPRSGAILHSSPESASHQLHPAPPDKPKEQELKPGLCSGALSDSGRNSMSSLPTHSTSSSYQLDPLVTPVGPTSRFGGSAHNITQGIVLQDSNMMSLKALSFSDGGSKLGHSNKADKGPSCVRSPISTDECSIQELEQKLLEREGALQKLQRSFEEKELASSLAYEERPRRCRDELEGPEPKGGNKLKQASQKSQRAQQVLHLQVLQLQQEKRQLRQELESLMKEQDLLETKLRSYEREKTSFGPALEETQWEVCQKSGEISLLKQQLKESQTEVNAKASEILGLKAQLKDTRGKLEGLELRTQDLEGALRTKGLELEVCENELQRKKNEAELLREKHERLVWKEEKEKVIQYQKQLQQSYVAMYQRNQRLEKALQQLARGDSAGEPLEVDLEGADIPYEDIIATEI

SEQ ID NO: 341231 - DNA, 1791 bp, Artificial Sequence
  derived and/or modified sequence
atgggcagcgtgagcagcctgatcagcggccacagcttccacagcaagcactgcagagccagccagtacaagctgagaaagagcagccacctgaagaagctgaacagatacagcgacggcctgctgagattcggcttcagccaggacagcggccacggcaagagcagcagcaagatgggcaagagcgaggacttcttctacatcaaggtgagccagaaggccagaggcagccaccaccccgactacaccgccctgagcagcggcgacctgggcggccaggccggcgtggacttcgaccccagcaccccccccaagctgatgcccttcagcaaccagctggagatgggcagcgagaagggcgccgtgagacccaccgccttcaagcccgtgctgcccagaagcggcgccatcctgcacagcagccccgagagcgccagccaccagctgcaccccgccccccccgacaagcccaaggagcaggagctgaagcccggcctgtgcagcggcgccctgagcgacagcggcagaaacagcatgagcagcctgcccacccacagcaccagcagcagctaccagctggaccccctggtgacccccgtgggccccaccagcagattcggcggcagcgcccacaacatcacccagggcatcgtgctgcaggacagcaacatgatgagcctgaaggccctgagcttcagcgacggcggcagcaagctgggccacagcaacaaggccgacaagggccccagctgcgtgagaagccccatcagcaccgacgagtgcagcatccaggagctggagcagaagctgctggagagagagggcgccctgcagaagctgcagagaagcttcgaggagaaggagctggccagcagcctggcctacgaggagagacccagaagatgcagagacgagctggagggccccgagcccaagggcggcaacaagctgaagcaggccagccagaagagccagagagcccagcaggtgctgcacctgcaggtgctgcagctgcagcaggagaagagacagctgagacaggagctggagagcctgatgaaggagcaggacctgctggagaccaagctgagaagctacgagagagagaagaccagcttcggccccgccctggaggagacccagtgggaggtgtgccagaagagcggcgagatcagcctgctgaagcagcagctgaaggagagccagaccgaggtgaacgccaaggccagcgagatcctgggcctgaaggcccagctgaaggacaccagaggcaagctggagggcctggagctgagaacccaggacctggagggcgccctgagaaccaagggcctggagctggaggtgtgcgagaacgagctgcagagaaagaagaacgaggccgagctgctgagagagaaggtgaacctgctggagcaggagctgcaggagctgagagcccaggccgccctggccagagacatgggcccccccaccttccccgaggacgtgcccgccctgcagagagagctggagagactgagagccgagctgagagaggagagacagggccacgaccagatgagcagcggcttccagcacgagagactggtgtggaaggaggagaaggagaaggtgatccagtaccagaagcagctgcagcagagctacgtggccatgtaccagagaaaccagagactggagaaggccctgcagcagctggccagaggcgacagcgccggcgagcccctggaggtggacctggagggcgccgacatcccctacgaggacatcatcgccaccgagatctag

SEQ ID NO: 341232 - DNA, 231 bp, Artificial Sequence
  derived and/or modified sequence
atgggcagcgtgagcagcctgatcagcggccacagcttccacagcaagcactgcagagccagccagtacaagctgagaaagagcagccacctgaagaagctgaacagatacagcgacggcctgctgagattcggcttcagccaggacagcggccacggcaaggccatgaccagatgccccagagccagcagcatgagcggcagctgcggcagaagaagaagaagaagatag

SEQ ID NO: 341233 - DNA, 1722 bp, Artificial Sequence
  derived and/or modified sequence
atgggcagcgtgagcagcctgatcagcggccacagcttccacagcaagcactgcagagccagccagtacaagctgagaaagagcagccacctgaagaagctgaacagatacagcgacggcctgctgagattcggcttcagccaggacagcggccacggcaagagcagcagcaagatgggcaagagcgaggacttcttctacatcaaggtgagccagaaggccagaggcagccaccaccccgactacaccgccctgagcagcggcgacctgggcggccaggccggcgtggacttcgaccccagcaccccccccaagctgatgcccttcagcaaccagctggagatgggcagcgagaagggcgccgtgagacccaccgccttcaagcccgtgctgcccagaagcggcgccatcctgcacagcagccccgagagcgccagccaccagctgcaccccgccccccccgacaagcccaaggagcaggagctgaagcccggcctgtgcagcggcgccctgagcgacagcggcagaaacagcatgagcagcctgcccacccacagcaccagcagcagctaccagctggaccccctggtgacccccgtgggccccaccagcagattcggcggcagcgcccacaacatcacccagggcatcgtgctgcaggacagcaacatgatgagcctgaaggccctgagcttcagcgacggcggcagcaagctgggccacagcaacaaggccgacaagggccccagctgcgtgagaagccccatcagcaccgacgagtgcagcatccaggagctggagcagaagctgctggagagagagggcgccctgcagaagctgcagagaagcttcgaggagaaggagctggccagcagcctggcctacgaggagagacccagaagatgcagagacgagctggagggccccgagcccaagggcggcaacaagctgaagcaggccagccagaagagccagagagcccagcaggtgctgcacctgcaggtgctgcagctgcagcaggagaagagacagctgagacaggagctggagagcctgatgaaggagcaggacctgctggagaccaagctgagaagctacgagagagagaagaccagcttcggccccgccctggaggagacccagtgggaggtgtgccagaagagcggcgagatcagcctgctgaagcagcagctgaaggagagccagaccgaggtgaacgccaaggccagcgagatcctgggcctgaaggcccagctgaaggacaccagaggcaagctggagggcctggagctgagaacccaggacctggagggcgccctgagaaccaagggcctggagctggaggtgtgcgagaacgagctgcagagaaagaagaacgaggccgagctgctgagagagaaggtgaacctgctggagcaggagctgcaggagctgagagcccaggccgccctggccagagacatgggcccccccaccttccccgaggacgtgcccgccctgcagagagagctggagagactggtgtggaaggaggagaaggagaaggtgatccagtaccagaagcagctgcagcagagctacgtggccatgtaccagagaaaccagagactggagaaggccctgcagcagctggccagaggcgacagcgccggcgagcccctggaggtggacctggagggcgccgacatcccctacgaggacatcatcgccaccgagatctag

SEQ ID NO: 341234 - DNA, 1614 bp, Artificial Sequence
  derived and/or modified sequence
atgggcagcgtgagcagcctgatcagcggccacagcttccacagcaagcactgcagagccagccagtacaagctgagaaagagcagccacctgaagaagctgaacagatacagcgacggcctgctgagattcggcttcagccaggacagcggccacggcaagagcagcagcaagatgggcaagagcgaggacttcttctacatcaaggtgagccagaaggccagaggcagccaccaccccgactacaccgccctgagcagcggcgacctgggcggccaggccggcgtggacttcgaccccagcaccccccccaagctgatgcccttcagcaaccagctggagatgggcagcgagaagggcgccgtgagacccaccgccttcaagcccgtgctgcccagaagcggcgccatcctgcacagcagccccgagagcgccagccaccagctgcaccccgccccccccgacaagcccaaggagcaggagctgaagcccggcctgtgcagcggcgccctgagcgacagcggcagaaacagcatgagcagcctgcccacccacagcaccagcagcagctaccagctggaccccctggtgacccccgtgggccccaccagcagattcggcggcagcgcccacaacatcacccagggcatcgtgctgcaggacagcaacatgatgagcctgaaggccctgagcttcagcgacggcggcagcaagctgggccacagcaacaaggccgacaagggccccagctgcgtgagaagccccatcagcaccgacgagtgcagcatccaggagctggagcagaagctgctggagagagagggcgccctgcagaagctgcagagaagcttcgaggagaaggagctggccagcagcctggcctacgaggagagacccagaagatgcagagacgagctggagggccccgagcccaagggcggcaacaagctgaagcaggccagccagaagagccagagagcccagcaggtgctgcacctgcaggtgctgcagctgcagcaggagaagagacagctgagacaggagctggagagcctgatgaaggagcaggacctgctggagaccaagctgagaagctacgagagagagaagaccagcttcggccccgccctggaggagacccagtgggaggtgtgccagaagagcggcgagatcagcctgctgaagcagcagctgaaggagagccagaccgaggtgaacgccaaggccagcgagatcctgggcctgaaggcccagctgaaggacaccagaggcaagctggagggcctggagctgagaacccaggacctggagggcgccctgagaaccaagggcctggagctggaggtgtgcgagaacgagctgcagagaaagaagaacgaggccgagctgctgagagagaagcacgagagactggtgtggaaggaggagaaggagaaggtgatccagtaccagaagcagctgcagcagagctacgtggccatgtaccagagaaaccagagactggagaaggccctgcagcagctggccagaggcgacagcgccggcgagcccctggaggtggacctggagggcgccgacatcccctacgaggacatcatcgccaccgagatctag

SEQ ID NO: 341235 - DNA, 1791 bp, Artificial Sequence
  derived and/or modified sequence
atgggatcagtgagctcattgatttccgggcattcattccactccaaacattgtagagctagtcaatacaagctcagaaaaagctcccacctgaagaaacttaatcggtattcagatggcctgctgaggtttggcttctcgcaagattcaggtcacgggaaatcctcctccaaaatgggaaagtccgaagactttttctatatcaaggtgagccaaaaggcgaggggatcacaccatccagactataccgccctttcctcaggagacctgggaggccaggcgggggtggacttcgatccctctaccccccccaagctcatgccgttttcaaaccaattagaaatgggatctgagaagggtgcagttcgccctactgcattcaaacccgtgctgccccgatccggcgccatcctgcacagctcacccgagagtgcatcccaccagttgcatccagccccacctgataagcccaaagaacaggagctgaaacctgggctctgctctggggctttatccgacagtggccgcaactctatgagtagtctgcctacccatagcaccagttcctcgtaccagctagacccactcgttaccccagtgggccctacttcccgattcggcgggtctgcccacaacattactcaaggcattgtcttgcaagattccaacatgatgtcattgaaggcactgtcgttcagtgatggtggctctaagcttggccactctaacaaagccgataagggacctagttgcgtccgtagcccgatctccacagacgaatgtagtattcaggagctggagcagaaactgcttgagcgagaaggagctctgcagaagctgcagcggtcgttcgaggagaaagaactggcgtcctccctcgcctacgaggagagacctcggcgttgtagagatgaactcgagggccccgaacctaagggtggtaacaagttgaagcaagcctcgcagaagagtcagcgagcccagcaggttctccacctgcaggtccttcagcttcagcaggagaaacgtcagctgcgccaggagttggagtccttaatgaaggagcaggatctgctggagactaagcttagatcatacgaacgagagaaaactagtttcggccccgccttggaggagactcagtgggaggtttgccagaagagtggggagatcagtctgctgaaacagcagctcaaagagagccagacagaagtaaatgcaaaagcatccgagatcctggggctcaaagcacaactcaaagacactcgcggcaagctagaaggcctagagcttcggacacaggacctcgaaggtgcactccgcacgaaaggtctcgagttggaagtttgtgagaacgagctgcagcgtaaaaaaaatgaggcggaactgctccgcgagaaggttaacctgctcgagcaggagctgcaggagttgcgcgcccaggcagctctggctcgcgatatgggcccgcctacattcccagaggacgtccctgccttacagcgagaattggagagactgcgcgcagagctgagggaggagagacagggccacgaccagatgtcaagcggctttcagcatgagcgcctggtctggaaggaagaaaaggagaaggtgattcaatatcaaaaacagctacagcaatcatacgtcgccatgtatcaacggaatcagcgcctggaaaaggcactgcagcaattggcaaggggggactctgccggagagcccctggaggtagatctggagggggcagacataccctacgaggacatcatcgcaacagaaatatag

SEQ ID NO: 341236 - DNA, 231 bp, Artificial Sequence
  derived and/or modified sequence
atgggaagtgtgagctctctgatcagtggccactcattccattccaaacattgtagagccagtcaatacaagctgagaaagtcttctcacctgaagaagcttaaccgctacagtgacggcctgctgcgtttcggattctcccaagacagtgggcacggtaaagctatgacacgctgtcctagagcctctagtatgtctggttcatgtggacgccgacgacggaggaggtag

SEQ ID NO: 341237 - DNA, 1722 bp, Artificial Sequence
  derived and/or modified sequence
atggggtcagtgtccagcctgattagcggtcatagctttcattccaagcactgtcgggcttctcagtataagcttcggaagtcaagtcaccttaagaagttgaacaggtactccgatggtctgttgcggttcggtttcagtcaggattctggccacgggaagtccagctctaagatgggcaagagcgaagatttcttctacatcaaggtatcccagaaagctaggggttcgcatcatccagattacaccgccctttcatcaggagacctgggaggtcaagccggggtcgattttgatccaagcacccctcctaaactgatgccatttagcaaccagctggagatgggctccgagaaaggggccgtccggccaactgcctttaaaccagttttgcctcgctccggggctatcctgcattcatctcctgaaagcgcttctcaccagctgcatccggccccaccggataagccaaaggaacaggagctgaagccaggactctgttctggcgctctgtcggacagtggacgcaattctatgagtagcctgccaacacactccacctctagttcataccagctcgaccccttggtaacacctgttggtcctacctcccggtttggcggatccgcacataatattacccagggaatcgtgctgcaggatagtaacatgatgagtttgaaggcactatctttcagcgacggtggctctaaactcggccactcaaacaaggccgataaaggcccatcttgtgttagatcacctatttccaccgacgagtgctctatccaggagctcgagcagaagctgctggagagagagggggctctacagaagcttcagaggtcgtttgaggagaaggagctggctagctcactggcatatgaggagcggcctcgccggtgcagggacgagctggagggccccgagccaaagggcggcaacaagttgaagcaggcaagccagaagtcccaaagggctcagcaggtgctgcatctgcaggtgctgcagttgcagcaggaaaagcgacagcttcggcaggaactcgagtccctgatgaaagagcaagacctccttgagacaaaattaaggagctatgaaagagaaaagacgtctttcggacccgccctagaagagactcagtgggaggtgtgtcagaagagcggcgagatctccctcctgaaacagcagctcaaggaaagccagactgaggttaatgcaaaggcttccgaaattttagggctcaaagcacagctgaaagatacaaggggtaagctggagggcctagaacttagaactcaggacctggagggagccctacgaactaaaggtctggaacttgaggtatgcgagaatgaattgcagagaaagaaaaacgaggccgaactattgcgagaaaaagtgaacctcctcgaacaagagctgcaggaacttagagcccaggctgcgctcgctagagacatgggccctccaacctttccagaggacgtcccagccttgcagagagaattggagagactggtctggaaagaggagaaagagaaggtaattcaataccagaagcagctgcagcagtcttatgtggcaatgtatcagcggaatcaaaggctggaaaaggccctccagcaattagccaggggcgatagcgcaggggagcccttggaagtggatctggaaggcgcagacatcccctatgaggacattatcgccaccgagatatag

SEQ ID NO: 341238 - DNA, 1791 bp, Artificial Sequence
  derived and/or modified sequence
atgggttctgtttcctctttgatttcggggcattcatttcactcaaaacactgccgcgcctcacagtacaagctgcggaaatcatctcaccttaaaaagctcaatcggtacagtgatgggctgctccggtttggcttttcgcaagatagcggtcacgggaaaagctctagcaaaatgggcaagtccgaagattttttttatatcaaggttagccagaaggcgcgggggagtcatcaccctgattataccgctcttagcagcggtgacctcggtgggcaagccggcgtggattttgatccctcgactccccccaaactcatgcctttttccaaccagttggagatgggaagcgagaaaggagccgtccgaccgacagcatttaagcctgtgctgccccggtcaggtgccatccttcactcttctcctgagagcgcgtcgcatcagctgcatcctgctcctcctgataaaccaaaagagcaggaactgaagcccggtctatgttcaggagccctgtctgattctgggaggaattccatgtcttccttgccaacccattcaacctcgtccagttatcaacttgatcccctagttaccccagtcgggcctaccagtcgctttgggggaagcgctcataatattacacagggcatcgtgctgcaagatagcaacatgatgtccctgaaggctctctcgtttagcgacgggggtagtaagttgggtcacagcaataaagccgataagggtccctcctgtgtgaggagccccatctctactgatgaatgttcgatccaagaactggagcagaagcttttggaaagggaaggcgccctgcagaagctacaacggtcctttgaagaaaaggaactggcgagctctctggcttacgaagagcggcctcgccgttgtagagatgaactagaaggtcctgagcccaagggcggaaacaagctaaagcaagcaagccagaaatctcagcgcgctcagcaggtgctacatcttcaggtgctgcagttgcagcaggaaaagaggcaactacggcaggaactggagtcactgatgaaggagcaggatctcctggagactaagctgaggtcgtatgagcgcgagaagacctccttcgggcccgccctcgaggagactcagtgggaggtgtgtcagaaatctggcgaaatctcactgctgaagcagcagctgaaggagagccagacagaagttaatgccaaagctagtgagattcttggactgaaggcccagttgaaggataccaggggtaaactggaaggactggagctgagaactcaggatcttgagggcgctctccggacgaaaggcttagagttagaggtgtgtgagaacgaactgcagagaaagaaaaacgaagcagagctgctccgcgaaaaggtcaaccttttagagcaggagctgcaggagctgcgcgctcaggcggcacttgccagggatatgggccccccaaccttccctgaagacgtgcctgccttacaacgggaacttgaaagactacgcgctgagctgagagaagaacggcagggtcatgatcagatgtcaagcgggttccagcacgaacgactggtgtggaaggaggaaaaggaaaaagtgattcaatatcagaaacagcttcagcagtcctatgtagccatgtatcagcggaaccagcgcctggagaaggcgctccagcagctggctaggggcgattcagctggagaaccactggaggtggacttggaaggggccgacataccttacgaagacataatcgccaccgaaatctag

SEQ ID NO: 341239 - DNA, 1614 bp, Artificial Sequence
  derived and/or modified sequence
atgggaagcgtcagcagcctcatatccggccactcgttccatagcaagcactgtagagcttcccagtataagctgaggaaaagctcccatcttaagaaacttaaccgctattctgacggattgcttcggtttggattcagccaagactccggacacggaaagagttcctcaaaaatgggaaaaagtgaggattttttttacatcaaagtgtctcagaaagcccgagggagccaccatcccgactacacagctctgtcctcgggagacttgggagggcaggcgggagtggactttgatcctagtacaccccctaaactgatgccgttctccaaccaactggaaatgggctcagagaaaggcgcggtgagacccacggcattcaagcctgtgctacccagatcaggagccatcctgcattcctcccctgaatcagcgtctcatcagctgcaccccgctcctcccgataaacccaaggagcaggagctgaagcccggcctctgcagtggggctctttccgacagcggacgtaactccatgtcttccctacccactcacagcacctcctcttcctatcagctcgatcctctcgtgaccccggtcggcccaacttctcgtttcggcggatctgctcacaacatcacgcagggaattgttctgcaggatagcaatatgatgtcacttaaggctctctctttcagtgacgggggctccaaattgggtcacagtaacaaggccgataaagggccctcctgtgtccgatctccaatcagcacagacgaatgcagtattcaggagcttgagcagaaactgctggagcgggagggggcactgcagaaactccagcgatccttcgaagagaaggagcttgctagcagtcttgcttatgaagagcgcccccggcgatgtcgagatgaactggaaggacctgagcccaagggcggaaacaagttgaagcaggcctcccagaaaagccagagagcgcagcaggtgcttcacctgcaggtacttcagcttcagcaggagaagagacaactgcggcaggagttggaaagcctcatgaaggagcaggacctcctggagacaaagctgcgctcctatgaacgggaaaagaccagcttcgggcccgctctcgaggagacccagtgggaggtgtgccaaaagagtggcgaaatcagcctgctcaagcagcaattgaaggagtcccagaccgaagttaatgccaaggcctccgagatattggggctgaaggcacagttgaaggacacccgcggcaagcttgagggacttgaacttaggactcaggacctggaaggcgctctgcgaaccaagggcctggagctggaggtgtgcgaaaatgaactgcaacgaaagaaaaatgaggcggaactgctccgcgagaagcatgaacggctggtgtggaaagaggaaaaagaaaaagtcatccagtatcaaaagcagctacagcagagctatgtggcaatgtaccagcgcaatcagcggttggagaaggccctgcagcaactggcccgtggagattccgccggggagccacttgaggtggatttggaaggcgccgacattccgtatgaagacatcatcgcaactgagatctag

SEQ ID NO: 341240 - DNA, 1791 bp, Artificial Sequence
  derived and/or modified sequence
atgggctctgtgagcagcctcatcagcggccacagcttccacagcaagcactgccgggccagccagtacaagctgaggaagagcagccacctgaagaagctgaaccgctacagtgatggcctgctgcgcttcggcttcagccaggacagcggccacggcaagagcagcagcaagatgggcaagtctgaggacttcttctacatcaaggtgtcccagaaggcccggggcagccaccacccagactacacagccctgagcagcggggacctgggcggccaggccggcgtggactttgaccccagcaccccacccaagctgatgcccttcagcaaccagctggagatgggcagcgagaagggagctgtgcggcccacagccttcaagcctgtgctgcccaggtctggggccatcctgcacagcagccctgagagcgccagccaccagctgcacccagcccccccagacaagcccaaggagcaggagctgaagccaggcctgtgcagcggggccctgagtgacagcggcaggaacagcatgagcagcctgcccacccacagcaccagcagcagctaccagctggaccccctggtgacccctgtgggccccaccagcagatttggaggcagcgcccacaacatcacccagggcatcgtgctgcaggacagcaacatgatgagcctgaaggccctgtccttcagtgatggcggcagcaagctgggccacagcaacaaggctgacaagggccccagctgtgtgcgcagccccatcagcacagatgagtgcagcatccaggagctggagcagaagctgctggagcgggagggcgccctgcagaagctgcagaggagctttgaggagaaggagctggccagcagcctggcctatgaggagcggccccggcgctgcagagatgagctggagggccctgagcccaagggcggcaacaagctgaagcaggccagccagaagagccagagggcccagcaggtgctgcacctgcaggtgctgcagctgcagcaggagaagaggcagctgcggcaggagctggagagcctgatgaaggagcaggacctgctggagaccaagctgcggagctatgaaagagagaagaccagctttggacctgccctggaggagacccagtgggaggtgtgccagaagagcggggagatcagcctgctgaagcagcagctgaaggagagccagacagaggtgaatgccaaggccagcgagatcctgggcctgaaggcccagctgaaggacacccggggcaagctggagggcctggagctgcggacccaggacctggagggcgccctgcggaccaagggcctggagctggaggtgtgtgaaaatgagctgcagaggaagaagaatgaagctgagctgctgcgggagaaggtgaacctgctggagcaggagctgcaggagctgcgggcccaggccgccctggcccgggacatgggcccccccaccttcccagaagatgtgcctgccctgcagcgggagctggagcggctgcgggcagagctgcgggaggagcggcagggccatgaccagatgagcagcggcttccagcacgagcggctggtgtggaaggaggagaaggagaaggtgatccagtaccagaagcagctgcagcagagctatgtggccatgtaccagaggaaccagaggctggagaaggccctgcagcagctggcccggggggacagcgctggggagcccctggaggtggacctggagggcgctgacatcccctatgaggacatcatcgccacagagatctag

SEQ ID NO: 341241 - DNA, 231 bp, Artificial Sequence
  derived and/or modified sequence
atgggctctgtgagcagcctcatcagcggccacagcttccacagcaagcactgccgggccagccagtacaagctgaggaagagcagccacctgaagaagctgaaccgctacagtgatggcctgctgcgcttcggcttcagccaggacagcggccacggcaaggccatgacccgctgcccccgggccagctccatgagcggcagctgtggcagaagaagaagaagaagatag

SEQ ID NO: 341242 - DNA, 1722 bp, Artificial Sequence
  derived and/or modified sequence
atgggctctgtgagcagcctcatcagcggccacagcttccacagcaagcactgccgggccagccagtacaagctgaggaagagcagccacctgaagaagctgaaccgctacagtgatggcctgctgcgcttcggcttcagccaggacagcggccacggcaagagcagcagcaagatgggcaagtctgaggacttcttctacatcaaggtgtcccagaaggcccggggcagccaccacccagactacacagccctgagcagcggggacctgggcggccaggccggcgtggactttgaccccagcaccccacccaagctgatgcccttcagcaaccagctggagatgggcagcgagaagggagctgtgcggcccacagccttcaagcctgtgctgcccaggtctggggccatcctgcacagcagccctgagagcgccagccaccagctgcacccagcccccccagacaagcccaaggagcaggagctgaagccaggcctgtgcagcggggccctgagtgacagcggcaggaacagcatgagcagcctgcccacccacagcaccagcagcagctaccagctggaccccctggtgacccctgtgggccccaccagcagatttggaggcagcgcccacaacatcacccagggcatcgtgctgcaggacagcaacatgatgagcctgaaggccctgtccttcagtgatggcggcagcaagctgggccacagcaacaaggctgacaagggccccagctgtgtgcgcagccccatcagcacagatgagtgcagcatccaggagctggagcagaagctgctggagcgggagggcgccctgcagaagctgcagaggagctttgaggagaaggagctggccagcagcctggcctatgaggagcggccccggcgctgcagagatgagctggagggccctgagcccaagggcggcaacaagctgaagcaggccagccagaagagccagagggcccagcaggtgctgcacctgcaggtgctgcagctgcagcaggagaagaggcagctgcggcaggagctggagagcctgatgaaggagcaggacctgctggagaccaagctgcggagctatgaaagagagaagaccagctttggacctgccctggaggagacccagtgggaggtgtgccagaagagcggggagatcagcctgctgaagcagcagctgaaggagagccagacagaggtgaatgccaaggccagcgagatcctgggcctgaaggcccagctgaaggacacccggggcaagctggagggcctggagctgcggacccaggacctggagggcgccctgcggaccaagggcctggagctggaggtgtgtgaaaatgagctgcagaggaagaagaatgaagctgagctgctgcgggagaaggtgaacctgctggagcaggagctgcaggagctgcgggcccaggccgccctggcccgggacatgggcccccccaccttcccagaagatgtgcctgccctgcagcgggagctggagcggctggtgtggaaggaggagaaggagaaggtgatccagtaccagaagcagctgcagcagagctatgtggccatgtaccagaggaaccagaggctggagaaggccctgcagcagctggcccggggggacagcgctggggagcccctggaggtggacctggagggcgctgacatcccctatgaggacatcatcgccacagagatctag

SEQ ID NO: 341243 - DNA, 1614 bp, Artificial Sequence
  derived and/or modified sequence
atgggctctgtgagcagcctcatcagcggccacagcttccacagcaagcactgccgggccagccagtacaagctgaggaagagcagccacctgaagaagctgaaccgctacagtgatggcctgctgcgcttcggcttcagccaggacagcggccacggcaagagcagcagcaagatgggcaagtctgaggacttcttctacatcaaggtgtcccagaaggcccggggcagccaccacccagactacacagccctgagcagcggggacctgggcggccaggccggcgtggactttgaccccagcaccccacccaagctgatgcccttcagcaaccagctggagatgggcagcgagaagggagctgtgcggcccacagccttcaagcctgtgctgcccaggtctggggccatcctgcacagcagccctgagagcgccagccaccagctgcacccagcccccccagacaagcccaaggagcaggagctgaagccaggcctgtgcagcggggccctgagtgacagcggcaggaacagcatgagcagcctgcccacccacagcaccagcagcagctaccagctggaccccctggtgacccctgtgggccccaccagcagatttggaggcagcgcccacaacatcacccagggcatcgtgctgcaggacagcaacatgatgagcctgaaggccctgtccttcagtgatggcggcagcaagctgggccacagcaacaaggctgacaagggccccagctgtgtgcgcagccccatcagcacagatgagtgcagcatccaggagctggagcagaagctgctggagcgggagggcgccctgcagaagctgcagaggagctttgaggagaaggagctggccagcagcctggcctatgaggagcggccccggcgctgcagagatgagctggagggccctgagcccaagggcggcaacaagctgaagcaggccagccagaagagccagagggcccagcaggtgctgcacctgcaggtgctgcagctgcagcaggagaagaggcagctgcggcaggagctggagagcctgatgaaggagcaggacctgctggagaccaagctgcggagctatgaaagagagaagaccagctttggacctgccctggaggagacccagtgggaggtgtgccagaagagcggggagatcagcctgctgaagcagcagctgaaggagagccagacagaggtgaatgccaaggccagcgagatcctgggcctgaaggcccagctgaaggacacccggggcaagctggagggcctggagctgcggacccaggacctggagggcgccctgcggaccaagggcctggagctggaggtgtgtgaaaatgagctgcagaggaagaagaatgaagctgagctgctgcgggagaagcatgagcggctggtgtggaaggaggagaaggagaaggtgatccagtaccagaagcagctgcagcagagctatgtggccatgtaccagaggaaccagaggctggagaaggccctgcagcagctggcccggggggacagcgctggggagcccctggaggtggacctggagggcgctgacatcccctatgaggacatcatcgccacagagatctag

SEQ ID NO: 341244 - DNA, 5459 bp, Artificial Sequence
  derived and/or modified sequence
tgagggctttgctatgacctcagtcccctcacggagccacgactgccccttgctgccacagcctttccaagaccctgcccggccctgccccatcctcagccccgagtcaccatgggcagcgtcagtagcctcatctccggccacagcttccacagcaagcactgccgggcttcgcagtacaagctgcgcaagtcctcccacctcaagaagctcaaccggtattccgacgggctgctgaggtttggcttctcccaggactccggtcacggcaagtccagctccaaaatgggcaagagcgaagacttcttctacatcaaggtcagccagaaagcccggggctcccatcacccagattacacggcactgtccagcggggatttagggggccaggctggggtggactttgacccgtccacaccccccaagctcatgcccttctccaatcagctagaaatgggctccgagaagggtgcagtgaggcccacagccttcaagcctgtgctgccacggtcaggagccatcctgcactcctccccggagagtgccagccaccagctgcaccccgcccctccagacaagcccaaggagcaggagctgaagcctggcctgtgctctggggcgctgtcagactccggccggaactccatgtccagcctgcccacacacagcaccagcagcagctaccagctggacccgctggtcacacccgtgggacccacaagccgttttgggggctccgcccacaacatcacccagggcatcgtcctccaggacagcaacatgatgagcctgaaggctctgtccttctccgacggaggtagcaagctgggccactcgaacaaggcagacaagggcccctcgtgtgtccgctcccccatctccacggacgagtgcagcatccaggagctggagcagaagctgttggagagggagggcgccctccagaagctgcagcgcagctttgaggagaaggagcttgcctccagcctggcctacgaggagcggccgcggcgctgcagggacgagctggagggcccggagcccaaaggcggcaacaagctcaagcaggcctcgcagaagagccagcgcgcgcagcaggtcctgcacctgcaggtactgcagcttcagcaggagaagcggcagctccggcaggagctcgagagcctcatgaaggagcaggacctgctggagaccaagctcaggtcctacgagagggagaagaccagcttcggccccgcgctggaggagacccagtgggaggtgtgccagaagtcaggcgagatctccctcctgaagcagcagctgaaggagtcccagacggaggtgaacgccaaggctagcgagatcctgggtctcaaggcacagctgaaggacacgcggggcaagctggagggcctggagctgaggacccaggacctggagggcgccctgcgcaccaagggcctggagctggaggtctgtgagaatgagctgcagcgcaagaagaacgaggcggagctgctgcgggagaaggtgaacctgctggagcaggagctgcaggagctgcgggcccaggccgccctggcccgcgacatggggccgcccaccttccccgaggacgtccctgccctgcagcgggagctggagcggctgcgggccgagctgcgggaggagcggcaaggccatgaccagatgtcctcgggcttccagcatgagcggctcgtgtggaaggaggagaaggagaaggtgattcagtaccagaaacagctgcagcagagctacgtggccatgtaccagcggaaccagcgcctggagaaggccctgcagcagctggcacgtggggacagcgccggggagcccttggaggttgacctggaaggggctgacatcccctacgaggacatcatagccactgagatctgaggggctgcctgggaaggcgagtctggggacctggcactgggaggcagggctctcccgtgcatcccccctgctcagcaattcagacccctttgagagacgccactccctgggacacagacccaggacccccgaggggagggcaggatggcctttccttccctctctgatgtcccagtgctcaccagccctgcagcccaccagacgtcaggccctgactcctctggctttcccaggagatgggtccaggggtctgtctgctttggttaagggctccctaaactttggcctttgttcgaaatagatatcctctccccctcctccagggaaggtggccacagcaagtacagcggctcccctctgcttctcatcccaacctctttttcctcctggacacattggaatgccttggaaatagaaagaagccatatatgaccagaagccttggaaccagccccatcagaacctgagctattttcctctggccgcagaggtgtaggggtggaatgagccgcggggaagctggctttgaaacctcagggctgtcccagccccggcaagccacaggaaggaggggagagacaggcagcccagcagtgtggagaccctgccacagccagaggagggcagagggagaatccaagggttgagagccagtggcgggtgatggccagcccctggggcccagcccctgtttactggttcttgcaaatgggagctgagcagcctctggacagccagtgacctttgacctcggtgaccactcttctttaagccatagaccctgaggccctgggctgggtgctgggaagggagggttgaaaccaccgtgaaccagagggtgtggctttccaggcaccctcagggagcctccccatctgtccagctggggccagaggctgggagtccctacctgcttcacgttggccggcggctactctggaatgtttttccctccccagaatcaagcttttgcttgatccagaagagcccatatcactaagatggcatatatgtgatctgggcattttcctcctctgcctacagccaggtttagcggcaaacctttcccccttagcaccttcagggctgagttctgggtttctagaggtcaggacggctcctcagagcgccaggaagccagagccccaagcaggacgaaaaagaggcatacacacagcagtgtgaatagcctggccaccagccatcctccctccacctcaagacccccatttgtcccagactaaaggatccagagagcagctccctttctcaggagcttgggcagtgccccagggagtccagggtttctctgcagatgtgcggagcgggaggcggtggtagagagagataaaaggtggagtttctctgttgtttggttcagggattttatttttaattttatgagacagggtcttgctctgtcccccaggctggagtgcagtggcatgatcatagctcactgcagcctcatactcctgggctcaagcaatcctcctgcctcagccttccaactagctgggactacaggtgcgcgccaccgtgcctggctaacttttcattttttttgtagggacggggtctcgttttgttgccaaagctggtctcaaacttgtggcctcaagcaatccacctgccttggcctcccaaagtgctgagattgcagatgtgagccaccgtgcctggccagatttttcttttattcttctttctttttcttttttgctttcttgtcttttcagaagcaagccagacctagcaggctgttccatgttctatttttgactgtagccacagctgctgttctcaggacagcatcccttcccacatgcctgcgcctgctgcctgctgagatgaggaggggagcgtctgggaacttgcgagtccaaggccagtccccatttctgcctcgctcaccgctggcccttagagaccccgaggtaggggtggggagatgcttctctccttgccccccgccctcatgggtcctagcccttccctgagtgcgggctgaggccagagtcaccttttctgtggctggctctaccttcctgtccctgaggttaaacggtgcccatcctgccatcctcaaacgacagaggagcttttctggaatttcaaaccattgctcttagtcccaagctaggcttaaacctggaatctacaagccaaaagtccctccctgcctgagggcagtaccctccattgggcacagtccagacccaagtcaaagatgccccattccttgcgcctcagccctcagttccttcatttccaccaggccgtgccttgtttgagtttttcctcccagtgagactgccccacggagacagaggaaagggctggctccccctccccaggctggagacccccccccaactccaggaaagagcagtcagagtccagtgctctgcctcagacgttgcctgagaagaagtggctgccacacccaggggaaggccctgaggcggaggctgtgctccgccatggtgtcccggtaccttccatacacagaggagtgcagccttctccatatctccatggccctgtcccaggccggcccagatgtgtcccccccaggccttgtcctacgtccaaggtggcagatgtcttccctgggctgccaccagcccccgccccagagtggcccaccgtggcactagaatgcaagtatcctgcgaccttgcaacctcaccttcctgtgggtgttctttcctgccctgtccaaaagcgccctcactattcttggaccatgccagattctgcctctctggaaagaggctctggacagcagaagcctccaagcacagagcctggccccaggccccagacagggtgggcttcctgcccttccctctgggcacgcctgctggccgacccactgacccactcggatggaccaacctgctctgtccccaaaggacgcctgcaggagagagcagcactccgcatcacctcaccaaggatcggactctgcccctggacctgggaacgactggactgtcacggggttccctcctagctctcccagtgaactcctgccaggcacacacagcccctatagcactgagctcacatgggactgggatatgggggcatctcttccccagagaggcactcagtgagcctcctgtgcctggccccagcctgggccatctcttaggtgagacagttgcccgaaactaagccaggcctggctggaggagcagcagcttggggagagggatttccctgcagacctcaagccatcatgcggtgggtgctgccatgacagaggctgcacccctgggccagcggggctgctcacccacctcttgtgcaaggtggcctttgtgctgcgcctgcaggcagagctggagcccccagcagaggcaggctgggacggaccagcatctggaagatgtacatagttatttttctctttgtggtttcttgtttggtttggtttgcttttgacagcttcattttatttttgacgtcactttttggccatgtaaactatttgtggcaattttatgtttttatttatgaataaagaatgccatttctcacgccctcta

SEQ ID NO: 341245 - DNA, 231 bp, Artificial Sequence
  derived and/or modified sequence
atgggcagcgtcagtagcctcatctccggccacagcttccacagcaagcactgccgggcttcgcagtacaagctgcgcaagtcctcccacctcaagaagctcaaccggtattccgacgggctgctgaggtttggcttctcccaggactccggtcacggcaaggccatgaccagatgtcctcgggcttccagcatgagcggctcgtgtggaaggaggagaaggagaaggtga

SEQ ID NO: 341246 - DNA, 1833 bp, Artificial Sequence
  derived and/or modified sequence
tgagggctttgctatgacctcagtcccctcacggagccacgactgccccttgctgccacagcctttccaagaccctgcccggccctgccccatcctcagccccgagtcaccatgggcagcgtcagtagcctcatctccggccacagcttccacagcaagcactgccgggcttcgcagtacaagctgcgcaagtcctcccacctcaagaagctcaaccggtattccgacgggctgctgaggtttggcttctcccaggactccggtcacggcaagtccagctccaaaatgggcaagagcgaagacttcttctacatcaaggtcagccagaaagcccggggctcccatcacccagattacacggcactgtccagcggggatttagggggccaggctggggtggactttgacccgtccacaccccccaagctcatgcccttctccaatcagctagaaatgggctccgagaagggtgcagtgaggcccacagccttcaagcctgtgctgccacggtcaggagccatcctgcactcctccccggagagtgccagccaccagctgcaccccgcccctccagacaagcccaaggagcaggagctgaagcctggcctgtgctctggggcgctgtcagactccggccggaactccatgtccagcctgcccacacacagcaccagcagcagctaccagctggacccgctggtcacacccgtgggacccacaagccgttttgggggctccgcccacaacatcacccagggcatcgtcctccaggacagcaacatgatgagcctgaaggctctgtccttctccgacggaggtagcaagctgggccactcgaacaaggcagacaagggcccctcgtgtgtccgctcccccatctccacggacgagtgcagcatccaggagctggagcagaagctgttggagagggagggcgccctccagaagctgcagcgcagctttgaggagaaggagcttgcctccagcctggcctacgaggagcggccgcggcgctgcagggacgagctggagggcccggagcccaaaggcggcaacaagctcaagcaggcctcgcagaagagccagcgcgcgcagcaggtcctgcacctgcaggtactgcagcttcagcaggagaagcggcagctccggcaggagctcgagagcctcatgaaggagcaggacctgctggagaccaagctcaggtcctacgagagggagaagaccagcttcggccccgcgctggaggagacccagtgggaggtgtgccagaagtcaggcgagatctccctcctgaagcagcagctgaaggagtcccagacggaggtgaacgccaaggctagcgagatcctgggtctcaaggcacagctgaaggacacgcggggcaagctggagggcctggagctgaggacccaggacctggagggcgccctgcgcaccaagggcctggagctggaggtctgtgagaatgagctgcagcgcaagaagaacgaggcggagctgctgcgggagaaggtgaacctgctggagcaggagctgcaggagctgcgggcccaggccgccctggcccgcgacatggggccgcccaccttccccgaggacgtccctgccctgcagcgggagctggagcggctcgtgtggaaggaggagaaggagaaggtgattcagtaccagaaacagctgcagcagagctacgtggccatgtaccagcggaaccagcgcctggagaaggccctgcagcagctggcacgtggggacagcgccggggagcccttggaggttgacctggaaggggctgacatcccctacgaggacatcatagccactgagatctga

SEQ ID NO: 341247 - DNA, 5706 bp, Artificial Sequence
  derived and/or modified sequence
gcagaggccggcgcgcctggagctggcgggttggcagcggccgggcggggaggccgaaagtttctctgcccgcctcggccagtgagtgggagccgggagctgcatcccgcgcagtgggaccggcccggcccgctcagcagctctggaaaaagagagacgggaacacaccgggaaacactgggaaaaaaaaaaagtctcaagtgcgcccgaggcgcagggggcaggtctacggctctcgcaggctctgtgagggctttgctatgacctcagtcccctcacggagccacgactgccccttgctgccacagcctttccaagaccctgcccggccctgccccatcctcagccccgagtcaccatgggcagcgtcagtagcctcatctccggccacagcttccacagcaagcactgccgggcttcgcagtacaagctgcgcaagtcctcccacctcaagaagctcaaccggtattccgacgggctgctgaggtttggcttctcccaggactccggtcacggcaagtccagctccaaaatgggcaagagcgaagacttcttctacatcaaggtcagccagaaagcccggggctcccatcacccagattacacggcactgtccagcggggatttagggggccaggctggggtggactttgacccgtccacaccccccaagctcatgcccttctccaatcagctagaaatgggctccgagaagggtgcagtgaggcccacagccttcaagcctgtgctgccacggtcaggagccatcctgcactcctccccggagagtgccagccaccagctgcaccccgcccctccagacaagcccaaggagcaggagctgaagcctggcctgtgctctggggcgctgtcagactccggccggaactccatgtccagcctgcccacacacagcaccagcagcagctaccagctggacccgctggtcacacccgtgggacccacaagccgttttgggggctccgcccacaacatcacccagggcatcgtcctccaggacagcaacatgatgagcctgaaggctctgtccttctccgacggaggtagcaagctgggccactcgaacaaggcagacaagggcccctcgtgtgtccgctcccccatctccacggacgagtgcagcatccaggagctggagcagaagctgttggagagggagggcgccctccagaagctgcagcgcagctttgaggagaaggagcttgcctccagcctggcctacgaggagcggccgcggcgctgcagggacgagctggagggcccggagcccaaaggcggcaacaagctcaagcaggcctcgcagaagagccagcgcgcgcagcaggtcctgcacctgcaggtactgcagcttcagcaggagaagcggcagctccggcaggagctcgagagcctcatgaaggagcaggacctgctggagaccaagctcaggtcctacgagagggagaagaccagcttcggccccgcgctggaggagacccagtgggaggtgtgccagaagtcaggcgagatctccctcctgaagcagcagctgaaggagtcccagacggaggtgaacgccaaggctagcgagatcctgggtctcaaggcacagctgaaggacacgcggggcaagctggagggcctggagctgaggacccaggacctggagggcgccctgcgcaccaagggcctggagctggaggtctgtgagaatgagctgcagcgcaagaagaacgaggcggagctgctgcgggagaaggtgaacctgctggagcaggagctgcaggagctgcgggcccaggccgccctggcccgcgacatggggccgcccaccttccccgaggacgtccctgccctgcagcgggagctggagcggctgcgggccgagctgcgggaggagcggcaaggccatgaccagatgtcctcgggcttccagcatgagcggctcgtgtggaaggaggagaaggagaaggtgattcagtaccagaaacagctgcagcagagctacgtggccatgtaccagcggaaccagcgcctggagaaggccctgcagcagctggcacgtggggacagcgccggggagcccttggaggttgacctggaaggggctgacatcccctacgaggacatcatagccactgagatctgaggggctgcctgggaaggcgagtctggggacctggcactgggaggcagggctctcccgtgcatcccccctgctcagcaattcagacccctttgagagacgccactccctgggacacagacccaggacccccgaggggagggcaggatggcctttccttccctctctgatgtcccagtgctcaccagccctgcagcccaccagacgtcaggccctgactcctctggctttcccaggagatgggtccaggggtctgtctgctttggttaagggctccctaaactttggcctttgttcgaaatagatatcctctccccctcctccagggaaggtggccacagcaagtacagcggctcccctctgcttctcatcccaacctctttttcctcctggacacattggaatgccttggaaatagaaagaagccatatatgaccagaagccttggaaccagccccatcagaacctgagctattttcctctggccgcagaggtgtaggggtggaatgagccgcggggaagctggctttgaaacctcagggctgtcccagccccggcaagccacaggaaggaggggagagacaggcagcccagcagtgtggagaccctgccacagccagaggagggcagagggagaatccaagggttgagagccagtggcgggtgatggccagcccctggggcccagcccctgtttactggttcttgcaaatgggagctgagcagcctctggacagccagtgacctttgacctcggtgaccactcttctttaagccatagaccctgaggccctgggctgggtgctgggaagggagggttgaaaccaccgtgaaccagagggtgtggctttccaggcaccctcagggagcctccccatctgtccagctggggccagaggctgggagtccctacctgcttcacgttggccggcggctactctggaatgtttttccctccccagaatcaagcttttgcttgatccagaagagcccatatcactaagatggcatatatgtgatctgggcattttcctcctctgcctacagccaggtttagcggcaaacctttcccccttagcaccttcagggctgagttctgggtttctagaggtcaggacggctcctcagagcgccaggaagccagagccccaagcaggacgaaaaagaggcatacacacagcagtgtgaatagcctggccaccagccatcctccctccacctcaagacccccatttgtcccagactaaaggatccagagagcagctccctttctcaggagcttgggcagtgccccagggagtccagggtttctctgcagatgtgcggagcgggaggcggtggtagagagagataaaaggtggagtttctctgttgtttggttcagggattttatttttaattttatgagacagggtcttgctctgtcccccaggctggagtgcagtggcatgatcatagctcactgcagcctcatactcctgggctcaagcaatcctcctgcctcagccttccaactagctgggactacaggtgcgcgccaccgtgcctggctaacttttcattttttttgtagggacggggtctcgttttgttgccaaagctggtctcaaacttgtggcctcaagcaatccacctgccttggcctcccaaagtgctgagattgcagatgtgagccaccgtgcctggccagatttttcttttattcttctttctttttcttttttgctttcttgtcttttcagaagcaagccagacctagcaggctgttccatgttctatttttgactgtagccacagctgctgttctcaggacagcatcccttcccacatgcctgcgcctgctgcctgctgagatgaggaggggagcgtctgggaacttgcgagtccaaggccagtccccatttctgcctcgctcaccgctggcccttagagaccccgaggtaggggtggggagatgcttctctccttgccccccgccctcatgggtcctagcccttccctgagtgcgggctgaggccagagtcaccttttctgtggctggctctaccttcctgtccctgaggttaaacggtgcccatcctgccatcctcaaacgacagaggagcttttctggaatttcaaaccattgctcttagtcccaagctaggcttaaacctggaatctacaagccaaaagtccctccctgcctgagggcagtaccctccattgggcacagtccagacccaagtcaaagatgccccattccttgcgcctcagccctcagttccttcatttccaccaggccgtgccttgtttgagtttttcctcccagtgagactgccccacggagacagaggaaagggctggctccccctccccaggctggagacccccccccaactccaggaaagagcagtcagagtccagtgctctgcctcagacgttgcctgagaagaagtggctgccacacccaggggaaggccctgaggcggaggctgtgctccgccatggtgtcccggtaccttccatacacagaggagtgcagccttctccatatctccatggccctgtcccaggccggcccagatgtgtcccccccaggccttgtcctacgtccaaggtggcagatgtcttccctgggctgccaccagcccccgccccagagtggcccaccgtggcactagaatgcaagtatcctgcgaccttgcaacctcaccttcctgtgggtgttctttcctgccctgtccaaaagcgccctcactattcttggaccatgccagattctgcctctctggaaagaggctctggacagcagaagcctccaagcacagagcctggccccaggccccagacagggtgggcttcctgcccttccctctgggcacgcctgctggccgacccactgacccactcggatggaccaacctgctctgtccccaaaggacgcctgcaggagagagcagcactccgcatcacctcaccaaggatcggactctgcccctggacctgggaacgactggactgtcacggggttccctcctagctctcccagtgaactcctgccaggcacacacagcccctatagcactgagctcacatgggactgggatatgggggcatctcttccccagagaggcactcagtgagcctcctgtgcctggccccagcctgggccatctcttaggtgagacagttgcccgaaactaagccaggcctggctggaggagcagcagcttggggagagggatttccctgcagacctcaagccatcatgcggtgggtgctgccatgacagaggctgcacccctgggccagcggggctgctcacccacctcttgtgcaaggtggcctttgtgctgcgcctgcaggcagagctggagcccccagcagaggcaggctgggacggaccagcatctggaagatgtacatagttatttttctctttgtggtttcttgtttggtttggtttgcttttgacagcttcattttatttttgacgtcactttttggccatgtaaactatttgtggcaattttatgtttttatttatgaataaagaatgccatttctcacgccctcta

SEQ ID NO: 341248 - DNA, 1614 bp, Artificial Sequence
  derived and/or modified sequence
atgggcagcgtcagtagcctcatctccggccacagcttccacagcaagcactgccgggcttcgcagtacaagctgcgcaagtcctcccacctcaagaagctcaaccggtattccgacgggctgctgaggtttggcttctcccaggactccggtcacggcaagtccagctccaaaatgggcaagagcgaagacttcttctacatcaaggtcagccagaaagcccggggctcccatcacccagattacacggcactgtccagcggggatttagggggccaggctggggtggactttgacccgtccacaccccccaagctcatgcccttctccaatcagctagaaatgggctccgagaagggtgcagtgaggcccacagccttcaagcctgtgctgccacggtcaggagccatcctgcactcctccccggagagtgccagccaccagctgcaccccgcccctccagacaagcccaaggagcaggagctgaagcctggcctgtgctctggggcgctgtcagactccggccggaactccatgtccagcctgcccacacacagcaccagcagcagctaccagctggacccgctggtcacacccgtgggacccacaagccgttttgggggctccgcccacaacatcacccagggcatcgtcctccaggacagcaacatgatgagcctgaaggctctgtccttctccgacggaggtagcaagctgggccactcgaacaaggcagacaagggcccctcgtgtgtccgctcccccatctccacggacgagtgcagcatccaggagctggagcagaagctgttggagagggagggcgccctccagaagctgcagcgcagctttgaggagaaggagcttgcctccagcctggcctacgaggagcggccgcggcgctgcagggacgagctggagggcccggagcccaaaggcggcaacaagctcaagcaggcctcgcagaagagccagcgcgcgcagcaggtcctgcacctgcaggtactgcagcttcagcaggagaagcggcagctccggcaggagctcgagagcctcatgaaggagcaggacctgctggagaccaagctcaggtcctacgagagggagaagaccagcttcggccccgcgctggaggagacccagtgggaggtgtgccagaagtcaggcgagatctccctcctgaagcagcagctgaaggagtcccagacggaggtgaacgccaaggctagcgagatcctgggtctcaaggcacagctgaaggacacgcggggcaagctggagggcctggagctgaggacccaggacctggagggcgccctgcgcaccaagggcctggagctggaggtctgtgagaatgagctgcagcgcaagaagaacgaggcggagctgctgcgggagaagcatgagcggctcgtgtggaaggaggagaaggagaaggtgattcagtaccagaaacagctgcagcagagctacgtggccatgtaccagcggaaccagcgcctggagaaggccctgcagcagctggcacgtggggacagcgccggggagcccttggaggttgacctggaaggggctgacatcccctacgaggacatcatagccactgagatctga

SEQ ID NO: 341249 - DNA, 1791 bp, Artificial Sequence
  derived and/or modified sequence
atgggcagcgtgagcagcctgatcagcggccacagcttccacagcaagcattgccgcgcatctcaatataaattaagaaagagcagccaccttaagaagctcaatcggtattccgatgggctcctacggttcgggttctcgcaggacagcggccacggtaagtcctccagcaaaatgggtaagtccgaagatttcttttatattaaagtcagccagaaggcaagaggtagccaccaccctgactacactgccttaagtagcggagaccttggcggccaggctggagttgatttcgatcccagtaccccccccaaattaatgcccttttccaatcagttggaaatgggcagtgagaaaggtgctgtgagacctacggccttcaaaccagtgctccctagatctggtgctatccttcacagctcaccagagtcagcatcccaccagctccaccccgccccacccgacaagcctaaggagcaggagctaaagcctggactctgcagcggggccttatcggacagcgggcgaaactccatgagctccctccctacccactctactagctccagttatcagttggatcccctggtgactcctgttgggcctacttccagatttggcgggtccgcacataatattacccagggaattgttttgcaagactcaaacatgatgagccttaaagccctgtccttttctgacggcggaagcaaactagggcactctaacaaagctgacaaaggcccaagctgcgtgaggtcccccatctccacagatgagtgctctattcaggagctagaacagaagctgttagagcgggagggtgcactgcaaaagctccagcgatcatttgaggagaaagagctcgcttcctctctggcatatgaggagcggcctcggcgatgtcgagatgaattagagggacctgagcccaagggcggaaataagttgaagcaggcctcccagaaaagtcaacgcgctcagcaggtcttacatttacaagttctccaacttcagcaagagaagcgccagttgcggcaggagcttgagtctttgatgaaagaacaggacctccttgaaaccaaactcagatcctatgagcgcgaaaagacaagctttggacccgccctggaggaaactcaatgggaggtgtgccagaagtcaggggaaatctcactgctgaaacagcagctgaaagagtctcagacagaggtgaatgcaaaagcgtcagagatacttggcttgaaggctcagcttaaggatacgcgcggaaagttggaaggtctggaactgagaacacaggacttggagggcgccctgaggaccaagggcctcgaattagaggtgtgcgagaacgagctgcagcgaaagaaaaacgaggcagagctgcttagagaaaaagtaaacctgctagaacaggaactgcaggagctaagagctcaggccgccctagctagggatatgggtccgcctacttttcccgaggacgttccagcccttcagcgggagctcgaaaggcttagagccgaacttcgagaagagcggcagggccacgatcaaatgagtagtgggtttcagcatgaacgtctagtttggaaggaagaaaaagaaaaggtgatccagtaccagaagcagctgcaacaaagctacgtggccatgtaccagcggaaccagcgcctagagaaagccttacagcagttagcacggggcgattctgctggcgaacctctggaagtggacctggagggggctgatattccttacgaagacattatcgctactgagatctag

SEQ ID NO: 341250 - DNA, 231 bp, Artificial Sequence
  derived and/or modified sequence
atgggcagcgtgagcagcctgatcagcggccacagcttccacagcaagcactgccgcgcctctcagtacaagttgcgcaagagcagtcatttgaagaagctgaatagatacagtgatggcctcctccggtttggcttcagtcaagatagtggtcacggaaaggccatgactcgttgcccacgcgcctccagtatgtctggcagctgcggtagacggcggagacgaaggtag

SEQ ID NO: 341251 - DNA, 1722 bp, Artificial Sequence
  derived and/or modified sequence
atgggcagcgtgagcagcctgatcagcggccacagcttccacagcaagcattgtcgcgcctcacaatacaaactgcggaagtccagccacctgaagaagctgaacagatacagtgatggcctgttgcggttcggcttttcacaggacagtggacatggtaagagttccagcaagatgggtaagtccgaggattttttttacataaaggtgagtcaaaaggctagaggctcacaccacccggactacacagctctcagttccggggacctgggcggccaagctggtgttgactttgatccttcaacacctcccaaattaatgcccttctctaaccagctggagatgggttccgaaaagggcgctgtacgcccaaccgcttttaagccagttctaccacggtcaggagcaattctgcattcatctccagaatctgcctctcaccagctacaccccgcacctcccgataagcccaaggaacaggagctgaagcccggactctgctcaggcgccctctccgactctggccgcaatagcatgtcttcgctgcctacacacagtacgagttcttcttatcagctcgaccccttagtaaccccagttggaccaacaagtaggtttggaggcagtgcacacaatatcactcaagggatcgtcctgcaggactccaatatgatgtccctcaaagcactctcgttcagtgacggcggatccaaactgggacattcaaacaaggccgataaaggcccctcttgtgtccggagtcccataagcacagatgagtgttccatacaagagctcgagcaaaagctgttagagcgcgagggggctctgcaaaagctgcagaggtcctttgaggagaaagaactggcctcaagccttgcctatgaagaacgaccacggcgttgtcgagacgagctggaggggccagagccgaagggggggaacaaactgaaacaggcttcccaaaaatctcaacgggcacagcaggtcctccacctgcaggtccttcaattacagcaggaaaagaggcaactgagacaggagctggagtccctcatgaaggaacaagaccttctcgagaccaaactgcggagctatgagcgcgaaaagactagcttcggacctgcccttgaggaaacccagtgggaggtgtgccagaagtccggcgaaatctcactgctgaagcagcaactgaaagaaagccagacagaggtcaatgcaaaggcctcagaaattctcggcctgaaggctcaactgaaggacactcgaggcaagttggaaggacttgagctgcgtactcaggatttggagggggccttgcgaaccaaggggctcgaactggaggtgtgtgagaacgaactgcaaaggaagaagaatgaagccgaactactcagggaaaaggtgaatctgctggagcaggagctgcaggagctgcgggcgcaggccgccctggccagagatatgggtccacccacttttccagaagacgtccctgctctccaaagagaactcgaacgactggtgtggaaagaggagaaggaaaaggtaattcaataccagaagcaactccagcaatcatatgtggccatgtatcagcggaaccagcgtctcgaaaaagctttacagcagctggcccgcggggactccgctggggagcctctggaggtcgaccttgagggagccgacatcccatacgaagacatcatcgctactgagatttag

SEQ ID NO: 341252 - DNA, 1791 bp, Artificial Sequence
  derived and/or modified sequence
atgggcagcgtgagcagcctgatcagcggccacagcttccacagcaaacactgtagagcgtcccagtacaaactccgtaagtcatcccacctgaagaagctcaacagatacagtgacgggctgcttagattcggcttcagtcaggactcagggcacggcaagagctctagcaaaatggggaaaagtgaggattttttttatatcaaggtgtcccagaaagcccgcggctcccatcaccctgattatactgcgcttagcagcggggacttaggcggtcaggccggggtagattttgacccttcgacacccccaaagctgatgcctttctctaaccaactcgagatgggaagtgaaaaaggagctgtcagaccgacagccttcaagcccgtgctgcctcggtctggtgctattctccattcttcgcctgagtccgcctctcatcagctgcatcctgccccccccgataaacctaaagagcaagagctcaaacccggcctgtgctctggagcactgagtgactccgggagaaactctatgtcctcactccctacacacagcacgtcaagctcttatcaactggacccactggttacccccgttgggccgactagtcggtttggcggtagcgctcataacatcacgcaggggatcgtgttacaggacagcaacatgatgtcactaaaggctctcagcttcagcgacggaggctccaaattgggtcactccaacaaggcagataaggggccaagctgtgtgcgctcacccatctccactgacgaatgcagtatccaggagctcgagcagaagctgctcgagagagaaggagctctgcagaagctgcaacgcagttttgaagagaaggagctcgcatctagcttggcctacgaggagaggcctcggcggtgcagagatgagctcgaaggcccggagccaaagggcggcaataagctcaagcaggcttcccagaaaagtcagcgtgcacagcaagtactgcacctccaagtattgcagctgcaacaggaaaagagacagctgcgacaggaattggagagcctgatgaaggaacaagacctgcttgaaacaaagctgcgcagctacgagagagagaagacctcctttggcccagcacttgaagagacacaatgggaggtgtgccagaagtctggagagatttcactactcaagcaacagctgaaggaatcccagactgaggtgaacgccaaggcaagtgagattctcggcctgaaagcccagcttaaggacacccgcggcaagctggagggactggagcttagaacacaggatcttgaaggggcattgcgtacaaagggactcgagctggaggtgtgtgaaaacgagctgcagagaaagaagaatgaggccgaacttctcagggaaaaggtgaatttgctcgagcaggagctccaggaacttagggcccaggcagcactggcaagagatatgggtccgccaacgttcccagaagatgtacctgccctccaacgcgagctggagagactgagggcagagctacgagaggagcgccagggacacgatcaaatgtcatcaggattccagcatgaaaggctcgtatggaaggaagaaaaggagaaggtcatccagtaccagaagcagctgcaacagtcttacgtcgcaatgtatcaaagaaatcagagattggaaaaggccctgcaacagctagctcgcggtgacagcgccggcgagccattggaggtggacctggagggagcggatataccctatgaggatatcattgcaactgaaatctag

SEQ ID NO: 341253 - DNA, 1614 bp, Artificial Sequence
  derived and/or modified sequence
atgggcagcgtgagcagcctgatcagcggccacagcttccacagcaaacactgcagggcaagccagtacaagcttcggaagtctagccacctaaagaaactgaatcgatactcagatggactgctgaggttcgggttcagccaagattccggacacggcaagagcagttccaaaatgggcaaatctgaggatttcttctatatcaaggtcagtcagaaagcgcgcggtagccatcatccggattacactgccctctccagcggtgatctgggagggcaggcaggcgttgacttcgaccccagtacccccccaaagctgatgcctttctcgaatcagcttgagatgggatccgagaaaggagctgtcaggccaaccgcctttaaacctgtgcttccaaggagcggggcaatattacattcatctcccgaatcagcctctcaccaactgcatccggctccaccagataaacccaaggagcaggaactcaagcctggactttgcagtggggctctctccgatagcgggagaaatagtatgagttctctgccaacacactcaacatcatcaagctaccagctcgatccactagtcacccccgtgggccccacatcacgtttcggcgggagcgcccacaatataactcaaggaattgtcctccaggatagcaatatgatgtcactaaaagccctttccttttccgacggcgggagtaagcttggccactccaataaggccgacaaggggccctcttgtgtaaggagcccaatttcaactgatgaatgttctatccaggagctggaacagaaactgctagaacgcgaaggggcactacagaagctgcagcgatcatttgaagagaaggagttggccagtagcttagcctatgaagagcggccacggcggtgtcgtgatgagcttgaaggccccgaaccaaagggaggcaacaagcttaagcaagcgtctcagaaatcccagcgagcccagcaggtgttgcatctgcaggtattgcagctccaacaggaaaaacgccagctgagacaggagctagagagcttgatgaaggaacaggaccttctggaaacaaaactgagatcctacgagagggagaagacttcctttggccctgctctcgaggagactcagtgggaggtgtgccagaaatcaggagagatatcactgctgaagcaacaattaaaggaaagccagactgaagtcaacgccaaagcaagcgaaatcctgggtctgaaggcccaacttaaggacactagggggaaactagagggccttgaacttcggactcaggacctggaaggcgcccttcggaccaaagggttggagctcgaagtatgcgaaaatgaactacagcgaaagaaaaacgaggcagagctcttgcgtgaaaagcacgaaagactggtgtggaaagaagagaaggagaaggtgattcagtaccaaaagcagctccagcagtcgtatgtagccatgtatcagcgaaatcaacgactcgagaaagcgctgcaacaacttgcacgcggcgattcggctggcgagccgctcgaggtagatcttgaaggtgcagacattccttacgaggatattattgcgaccgaaatttag

SEQ ID NO: 341254 - DNA, 1791 bp, Artificial Sequence
  derived and/or modified sequence
atgggcagcgtctccagcctgattagtgggcactcgttccactccaaacactgccgggcatctcaatataaactcaggaaatcctcccacttgaagaagctcaaccgttactccgacgggctcctgcggtttggatttagtcaggattctggccacggaaaatcatctagcaagatggggaagtctgaggacttcttttacattaaggtgtcgcagaaggctcgagggagccatcatccagattacacagcactatcttccggtgacctaggaggacaggcaggagtggatttcgacccatctactccccctaagctcatgcctttctctaaccagttagaaatggggtctgaaaagggggcagtccggcctaccgccttcaagccagtgctccccagaagtggcgctattctccactcctcacccgagtcggcatcacaccagctccatcctgctccccctgacaaacccaaagaacaggaacttaaaccaggactatgtagtggcgctttgtccgatagcggaaggaactccatgagctccctaccgactcactctaccagttcatcataccaactcgatcccctggtgacccctgtcgggccaacgtctcgttttggtggctcagctcacaatattacccaaggcattgtgctccaggattccaatatgatgtctttgaaggcactgtccttctcagacgggggtagcaagcttggtcactcaaacaaggccgataagggccctagttgcgtcaggagcccaattagcacagacgagtgcagcatacaggaactggagcagaaactcctggaacgggagggagcgttacaaaaactccagcggtcctttgaagagaaggagttggcatcttccttggcatacgaggagcgaccacgcagatgtcgagatgagctggagggtcccgaaccgaagggtgggaataagctgaagcaggccagccagaaatcacagcgcgcacagcaagtgctgcatttacaagtccttcaattgcagcaggaaaagcgtcagcttcggcaagaattagaaagtcttatgaaagaacaagatctgcttgagacaaaactgcggtcctatgagagagagaaaacctccttcggacctgcgctggaggaaacacagtgggaggtctgccagaagtcgggagagatatcactgctgaagcagcagctgaaggaatcacagaccgaagtgaacgccaaggcttctgaaattctcggcctcaaggcccaactgaaggacacccggggaaagttggaaggactggagctccgcacgcaagacctggaaggggctctgcggaccaagggcctggagctggaggtatgcgagaacgaactgcagaggaaaaaaaacgaggccgaactgctcagagagaaggtgaatctcctggaacaggagttgcaggaactcagagcccaggctgcactggcgagggacatggggccacccacctttcctgaggatgtcccagccctacagcgggagctggagcgccttcgagcggaactccgagaggaaaggcaggggcacgatcagatgagctccggttttcagcacgagagactggtgtggaaggaggagaaggagaaagtgattcagtatcagaagcagctccaacagtcatacgtggccatgtaccaaaggaaccaaaggctcgagaaagccctgcagcaattggctcggggagattcagccggagagccgctggaagtggatctggaaggggcagatatcccatatgaagacatcatcgctacagaaatctag

SEQ ID NO: 341255 - DNA, 231 bp, Artificial Sequence
  derived and/or modified sequence
atgggttccgtgagctccctgatctcaggtcattccttccatagcaagcattgtcgggcttctcagtacaagttacggaagtcctcccatttgaaaaagttaaaccgttacagcgatggactgctgcgcttcggattttcccaggatagcgggcacgggaaggctatgacccggtgtcctcgtgcctctagtatgtctggctcctgtgggcgtaggcgtcggaggcggtag

SEQ ID NO: 341256 - DNA, 1722 bp, Artificial Sequence
  derived and/or modified sequence
atgggcagcgttagcagcctgatctcgggccattccttccactcaaaacactgtcgcgcatctcagtataagctccgcaagagcagccacttgaaaaaacttaacagatacagtgacggcctgctccggtttggtttcagtcaggactccgggcacggcaaaagttcctcaaagatgggaaagagcgaggatttcttctacatcaaagttagccagaaggccagaggatcgcatcatcccgattatacagctttaagttccggagatctgggcggtcaggctggagtggattttgacccttccacgcctcccaagctgatgccattcagcaatcagctagagatgggcagtgaaaaaggagctgtcagaccgaccgcattcaagccagtacttcccaggagtggggcaatcttacattcttctcccgaatcagctagtcatcagctgcatccggcaccccctgataaaccgaaggagcaggagctgaaaccgggtctgtgcagtggtgccttaagcgactctggtagaaacagcatgagtagtttacctacacattccactagctcatcgtaccagttggaccccctggtaacacccgttggaccaaccagcaggttcgggggaagcgcgcacaacatcacacagggcatcgtcctccaggactctaacatgatgtcccttaaagcgttaagcttctcagacggagggagtaagctggggcacagcaacaaagcagataaggggccaagctgtgtgaggagtcctatatcaaccgatgaatgttcaattcaggaattagagcagaagctgctggaacgggaaggggcactgcaaaaactgcagagatctttcgaggagaaggaactggcgtcgtctcttgcatacgaggagagacctcgaaggtgcagagacgaactcgaaggaccagaaccgaaggggggaaacaagctgaagcaggcgtcccagaaatctcagcgagcgcagcaagttctccaccttcaggtgctgcagctacagcaggaaaagcgccagctgcgccaggagctggagtctctgatgaaggaacaggacctacttgagacgaaacttcggagttacgaaagggaaaagacgtcattcggaccagccctcgaagagactcaatgggaggtttgccagaaatctggcgagatctcactattgaaacagcaacttaaggaatcacagacagaagtgaacgctaaagccagcgaaatcttggggcttaaggcccagctaaaggacacacggggaaaactggaggggctggagctgaggacacaggacctggagggcgcattgcgcaccaagggtctggaactggaagtctgcgagaatgaattacagagaaagaagaacgaggccgagctgctccgtgagaaagtgaacttactcgagcaggagctgcaagagcttagggcccaagccgctctggcacgtgacatgggcccacccacattcccagaagacgtgccagccctgcaaagagaactggagagactcgtttggaaggaagagaaggagaaagtgattcaatatcagaagcagcttcagcagagctatgttgccatgtaccaacgcaaccaacgcctggaaaaagctctgcagcaacttgcgcgtggcgacagcgccggagaaccgttggaggtggatcttgagggggcagacattccctatgaagatattatcgctacggaaatatag

SEQ ID NO: 341257 - DNA, 1791 bp, Artificial Sequence
  derived and/or modified sequence
atggggtccgtgtctagtctgatcagtgggcactcgtttcactcaaaacattgtagggctagtcagtacaaattaagaaagagctcacacctgaaaaagctcaatcgttatagtgatggcctgctacggttcggcttctcacaggattccggacacggaaagagttccagtaagatggggaaatccgaagacttcttttacatcaaggtgagtcaaaaggccaggggctctcatcacccagattataccgcccttagtagtggagacctcgggggacaggctggggtggacttcgacccgtctacgcctcctaagctgatgcctttctccaaccagctggagatggggtcagagaagggagccgtgaggcccactgcattcaagcccgtcctgcccagatccggggctattctgcatagttcccctgaaagcgcgagccatcaactgcatccagcgcctcccgacaagccgaaggaacaggaacttaaacccggtctgtgctccggcgcactgtcagactccggaaggaacagtatgtcatcactgcccacgcactccacttcatcaagttaccagcttgacccacttgtaacccccgtgggcccaacatctcggtttgggggaagcgcacacaatatcacacaggggattgtgctgcaggatagcaacatgatgtctctcaaagccctatctttttctgacggcggatctaagctgggccactccaacaaggctgataaaggaccctcatgcgtccgctcccccatttctactgatgagtgcagtattcaggagctggagcagaaactgctcgagagagagggtgctctacagaaactgcaacgttcctttgaagagaaggagctagcgtcttctctggcatacgaagagagacctaggaggtgccgggacgaactggagggccctgagccgaagggcggaaataagctgaagcaggcctcgcaaaaatcccaaagggcccagcaggtgctgcacctgcaagtacttcagttgcagcaagaaaagcgacagttgcggcaggaactggagtccttgatgaaggagcaggatctgctcgaaacaaagcttagatcctatgagagagagaagaccagtttcggccctgccttggaggagacacagtgggaagtctgccagaaaagcggcgagataagcttactgaaacagcagctcaaggagtctcagacggaagttaacgcaaaagccagcgaaatcctggggttaaaggcacagctgaaggacaccagaggtaaattagagggccttgagctccgaacccaggacctagaaggggctcttcgtacgaagggactggagcttgaagtgtgtgaaaacgaactccaacgcaagaaaaacgaggcggagcttctgcgtgagaaggtcaatttgctggaacaggagctacaggagttgagggctcaggccgctctcgcacgggatatgggacccccaacatttccagaagatgtgcctgctctgcaaagggagctcgagaggcttagggccgagttacgcgaggagaggcagggccacgaccagatgtcatctgggttccaacacgagagactggtctggaaagaggaaaaggaaaaggttatccagtaccaaaagcagctccagcagagttacgtggcaatgtatcagcgtaaccagaggctggaaaaagctcttcagcaactggcccgtggagactcggccggagagccccttgaggtagatctagagggtgctgacataccatacgaggatatcattgccacagagatctag

SEQ ID NO: 341258 - DNA, 1614 bp, Artificial Sequence
  derived and/or modified sequence
atgggaagcgtgagcagcctcatatccggccatagttttcacagcaaacattgtcgggcaagtcagtacaagctacggaagtcttcacatctgaaaaagttaaaccgctacagcgacggactgctgcgttttgggttcagccaagacagcggccacggcaagagctcttctaagatggggaagtcagaggactttttttacattaaagtatcacagaaagccaggggcagccaccaccctgattataccgctctgtctagtggtgatctagggggacaggccggtgtggacttcgaccctagtactccacctaaactgatgccattttccaatcaactggagatgggctccgagaagggggcagtgcggcctaccgcgtttaagcctgtgcttcccagaagcggggctatcctacacagcagccccgagtctgccagtcatcagctccatcctgctccacccgataagcctaaagaacaggaactcaaaccaggcttgtgttccggagctctctctgacagcggacgcaattctatgtcctctctgcccacccactccacttcctccagctatcagctggatccactggtcacacctgtggggcctacaagccggttcggtgggagtgcccataacatcacccagggcatcgtcctgcaggatagcaacatgatgagcttgaaagcactttctttttccgacgggggatccaagctcgggcactctaacaaggccgacaaggggccatcctgcgtgcggagtccaatcagtaccgatgagtgttctatacaggagttagagcagaaacttctggagagagaaggagctctccagaagttacagaggtccttcgaagaaaaggagttagcctcttccctagcatacgaagaacgcccaagaagatgcagggacgagctggaggggcctgaacctaagggaggtaacaaactgaagcaggcctcccaaaagagccagcgggcacaacaagtgctacacctgcaggttctccaacttcagcaggagaaacggcaacttaggcaggagttggagagtctgatgaaggaacaggacctgctcgaaactaaactccggagctatgaaagggagaaaacctcattcggcccagcgctggaagagacccagtgggaagtttgtcaaaagtcaggagaaataagtctcctcaagcagcaactgaaggagtctcaaaccgaggtcaacgcaaaagcatctgagattcttggacttaaagctcagctcaaggatacacgtggtaagctcgaagggctcgaactacgcactcaagatcttgaaggcgctttacggacgaaaggtctcgaactagaggtgtgcgagaacgaactccagcgcaaaaaaaatgaggcagagctactgcgggaaaaacacgagagactggtttggaaggaggagaaggaaaaggtgatccagtatcagaagcagcttcagcagtcatacgtcgctatgtaccagaggaatcaaaggttagagaaggccctgcagcagctcgcacggggtgacagtgctggagagcctctcgaagtggacctagagggcgctgatatcccctatgaggatattatagctacagagatctag

SEQ ID NO: 341259 - DNA, 183 bp, Artificial Sequence
  derived and/or modified sequence
atggccctgccctgtggcatgggcacagcctggtacctggacagcacagaaaatgccctgactgtgaatgtgccccgggcccagaaccacaaggccagccacaacagcatgtggaagctgggcagccacttctactgcatcctgctggtgaccaaggaccccccaggcttcaccatggtgtag

SEQ ID NO: 341260 - DNA, 417 bp, Artificial Sequence
  derived and/or modified sequence
tttcgggcacggggacccgatgggagggggagcgggagaacccgcgctggaagggctcctggccgtgagccgagagcccctaggtgcccagatggagggggtgtggcagcccgtgctgccagacttctgtcatcacgaagatccggaagctggccacctacccacgcactgtggcccgacctgcgcagtcgcgctcgaaggcttctactcttcctttctctcgcagatctgctgtctgcacggtgccctcccagccctactcctgctccgagttctggaccctggcctctgagatccacatgcacctcagcttccagcgcacccagagctgggctagcccagatcgcatgtttcggtcccagcatgagttctgcagggggatccaggtggtcatccttgtggcagccttccccttag

SEQ ID NO: 341261 - protein, 324 aa, Artificial Sequence
  derived and/or modified sequence
MVFLSGNASDSSNCTQPPAPVNISKAILLGVILGGLILFGVLGNILVILSVACHRHLHSVTHYYIVNLAVADLLLTSTVLPFSAIFEVLGYWAFGRVFCNIWAAVDVLCCTASIMGLCIISIDRYIGVSYPLRYPTIVTQRRGLMALLCVWALSLVISIGPLFGWRQPAPEDETICQINEEPGYVLFSALGSFYLPLAIILVMYCRVYVVAKRESRGLKSGLKTDKSDSEQVTLRIHRKNAPAGGSGMASAKTKTHFSVRLLKFSREKKAAKTLGIVVGCFVLCWLPFFLVMPIGTYILKYDVLFWRKGLSVCTRLRERKEIKN

SEQ ID NO: 341262 - DNA, 975 bp, Artificial Sequence
  derived and/or modified sequence
atggtgtttctgtccgggaacgcctctgatagtagcaactgcactcaaccccccgcccctgtgaacatcagtaaggccatcttacttggcgtgattctgggcggcctgatcctctttggggtcttggggaacatcttggtaattttatccgtcgcctgtcatcgccatctacactctgtgactcactactatatcgtgaaccttgctgtggccgatctgctcttgacatcaactgttttacctttcagtgctatcttcgaagttcttggttactgggcatttggccgagtgttctgcaacatctgggccgccgttgacgtcctatgttgcactgctagtattatgggactttgcattatctctatcgaccggtacataggcgtgagttaccccctgcgctacccaacaatcgtcacacagcgtagggggctgatggcactgctttgtgtgtgggctttgagcctggtaatctccatcggacccctgtttgggtggcgacaaccagcacccgaggacgagaccatatgccagattaacgaggaacccggctacgttctcttcagcgccctggggtcattttaccttcccctcgccatcattctcgtcatgtactgtagagtctacgtagtggctaagagagaatctcgggggttgaaatctggacttaagacagataaatctgattctgagcaggtcacactaaggatccatcgaaaaaacgcgcctgcaggcggctctgggatggcatccgcgaagaccaagacacactttagtgtgagactactgaaattctctcgcgagaagaaggccgcaaaaactcttggcatcgttgtcgggtgtttcgttttatgttggttaccattctttctagtaatgcctattgggacctatatcttgaagtacgacgtgctattctggagaaaagggctatctgtgtgtacaaggctgcgcgaaagaaaggagatcaagaactag

SEQ ID NO: 341263 - DNA, 1119 bp, Artificial Sequence
  derived and/or modified sequence
atggtgttcctgtccggaaacgcctcagatagttcgaactgcacacagcctcctgcgccagtgaacatatccaaggccatcctccttggcgtaatcctgggcggcctcatcctgttcggcgtgctggggaacattctggtgattttgtctgtcgcttgtcaccgtcaccttcacagtgtgactcattattacatagtcaatctcgcggttgctgatttgctgttgacaagcaccgtcctgcccttctctgctattttcgaagtactaggatattgggccttcgggagagtattctgcaatatttgggcagctgtggatgtgctgtgttgtaccgcctcgataatgggcctttgtattatctctatagataggtatataggcgtgagttaccctttaaggtatcccactatcgtcacccagagaagggggctgatggcgttactctgtgtatgggccttaagtcttgttatcagcataggcccgctgttcggctggagacagccagcccctgaggatgaaacaatatgccagatcaacgaagagcccgggtacgtattgttctcggcgcttggatctttctacctgcctctggcaataattctggtgatgtattgccgtgtatacgtcgttgccaaaagggaatcccgcggtctgaaatcaggcctgaagaccgacaaatcggacagcgagcaggttactttgcgcatccatcggaagaacgcgcctgctggtggatccggcatggcgtctgctaaaacaaaaacccatttcagcgtgaggcttctgaagtttagccgtgaaaaaaaggccgctaagacactcgggattgtggtcggatgtttcgtcttgtgctggttgccctttttcctagtgatgccaatcggcacacacacccacgatatgaaacccgcgtcaagacctcggctgctgtccctgctcccaaaggagggcgagcacgaaacacatcactggagctgcgatcctctgtctctggagagtacgcctggagcccaggagccatgtctcacgctgggatttacaagcttgtcttccatccatctgaccaaggcccagattcagcacgtgaccgtaacagatacgggcaagacagtgacctag

SEQ ID NO: 341264 - DNA, 1411 bp, Artificial Sequence
  derived and/or modified sequence
gaattccgaatcatgtgcagaatgctgaatcttcccccagccaggacgaataagacagcgcggaaaagcagattctcgtaattctggaattgcatgttgcaaggagtctcctggatcttcgcacccagcttcgggtagggagggagtccgggtcccgggctaggccagcccggcaggtggagagggtccccggcagccccgcgcgcccctggccatgtctttaatgccctgccccttcatgtggccttctgagggttcccagggctggccagggttgtttcccacccgcgcgcgcgctctcacccccagccaaacccacctggcagggctccctccagccgagaccttttgattcccggctcccgcgctcccgcctccgcgccagcccgggaggtggccctggacagccggacctcgcccggccccggctgggaccatggtgtttctctcgggaaatgcttccgacagctccaactgcacccaaccgccggcaccggtgaacatttccaaggccattctgctcggggtgatcttggggggcctcattcttttcggggtgctgggtaacatcctagtgatcctctccgtagcctgtcaccgacacctgcactcagtcacgcactactacatcgtcaacctggcggtggccgacctcctgctcacctccacggtgctgcccttctccgccatcttcgaggtcctaggctactgggccttcggcagggtcttctgcaacatctgggcggcagtggatgtgctgtgctgcaccgcgtccatcatgggcctctgcatcatctccatcgaccgctacatcggcgtgagctacccgctgcgctacccaaccatcgtcacccagaggaggggtctcatggctctgctctgcgtctgggcactctccctggtcatatccattggacccctgttcggctggaggcagccggcccccgaggacgagaccatctgccagatcaacgaggagccgggctacgtgctcttctcagcgctgggctccttctacctgcctctggccatcatcctggtcatgtactgccgcgtctacgtggtggccaagagggagagccggggcctcaagtctggcctcaagaccgacaagtcggactcggagcaagtgacgctccgcatccatcggaaaaacgccccggcaggaggcagcgggatggccagcgccaagaccaagacgcacttctcagtgaggctcctcaagttctcccgggagaagaaagcggccaaaacgctgggcatcgtggtcggctgcttcgtcctctgctggctgccttttttcttagtcatgcccattgggacatacattcttaaatatgacgtgctgttttggagaaaagggctgtcggtctgcactaggctgcgggagaggaaagagattaaaaactga

SEQ ID NO: 341265 - DNA, 1555 bp, Artificial Sequence
  derived and/or modified sequence
gaattccgaatcatgtgcagaatgctgaatcttcccccagccaggacgaataagacagcgcggaaaagcagattctcgtaattctggaattgcatgttgcaaggagtctcctggatcttcgcacccagcttcgggtagggagggagtccgggtcccgggctaggccagcccggcaggtggagagggtccccggcagccccgcgcgcccctggccatgtctttaatgccctgccccttcatgtggccttctgagggttcccagggctggccagggttgtttcccacccgcgcgcgcgctctcacccccagccaaacccacctggcagggctccctccagccgagaccttttgattcccggctcccgcgctcccgcctccgcgccagcccgggaggtggccctggacagccggacctcgcccggccccggctgggaccatggtgtttctctcgggaaatgcttccgacagctccaactgcacccaaccgccggcaccggtgaacatttccaaggccattctgctcggggtgatcttggggggcctcattcttttcggggtgctgggtaacatcctagtgatcctctccgtagcctgtcaccgacacctgcactcagtcacgcactactacatcgtcaacctggcggtggccgacctcctgctcacctccacggtgctgcccttctccgccatcttcgaggtcctaggctactgggccttcggcagggtcttctgcaacatctgggcggcagtggatgtgctgtgctgcaccgcgtccatcatgggcctctgcatcatctccatcgaccgctacatcggcgtgagctacccgctgcgctacccaaccatcgtcacccagaggaggggtctcatggctctgctctgcgtctgggcactctccctggtcatatccattggacccctgttcggctggaggcagccggcccccgaggacgagaccatctgccagatcaacgaggagccgggctacgtgctcttctcagcgctgggctccttctacctgcctctggccatcatcctggtcatgtactgccgcgtctacgtggtggccaagagggagagccggggcctcaagtctggcctcaagaccgacaagtcggactcggagcaagtgacgctccgcatccatcggaaaaacgccccggcaggaggcagcgggatggccagcgccaagaccaagacgcacttctcagtgaggctcctcaagttctcccgggagaagaaagcggccaaaacgctgggcatcgtggtcggctgcttcgtcctctgctggctgccttttttcttagtcatgcccattgggacacacacccatgacatgaagccagcttcccgtccacgactgttgtccttactgcccaaggaaggggagcatgaaacccaccactggtcctgcgacccactgtctttggaatccaccccaggagcccaggagccttgcctgacacttggatttacttctttatcaagcatccatctgactaaggcacaaatccaacatgttactgttactgatacaggaaaaacagtaacttaa

SEQ ID NO: 341266 - DNA, 975 bp, Artificial Sequence
  derived and/or modified sequence
atggtgttcctgtctggaaatgccagtgacagcagcaactgcacccagcccccagcccctgtgaacatcagcaaggccatcctgctgggcgtcatcctgggcggcctcatcctgtttggagtgctgggcaacatcctggtgatcctgtctgtggcctgccaccgccacctgcacagcgtgacccactactacatcgtgaacctggccgtggccgacctgctgctgaccagcacagtgctgcccttcagcgccatctttgaggtgctgggctactgggccttcggccgggtcttctgcaacatctgggccgctgtggatgtgctgtgctgcacagccagcatcatgggcctgtgcatcatcagcattgaccgctacatcggcgtgtcctaccccctgcgctaccccaccatcgtgacccagaggcggggcctgatggccctgctgtgtgtgtgggccctgagcctggtgatcagcatcggccccctgtttggctggaggcagcctgccccagaagatgagaccatctgccagatcaatgaggagcccggctacgtgctcttcagcgccctgggcagcttctacctgcccctggccatcatcctggtgatgtactgccgggtgtatgtggtggccaagcgggagagccggggcctgaagagcggcctgaagacagacaagagtgacagcgagcaggtgaccctgcgcatccacaggaagaatgccccagctgggggcagcggcatggccagcgccaagaccaagacccacttctctgtgcggctgctgaagttcagccgggagaagaaggccgccaagaccctgggcatcgtggtgggctgctttgtgctgtgctggctgcccttcttcctggtgatgcccatcggcacctacatcctgaagtatgatgtgctcttctggaggaagggcctgtctgtgtgcacccggctgcgggagaggaaggagatcaagaactag

SEQ ID NO: 341267 - DNA, 1119 bp, Artificial Sequence
  derived and/or modified sequence
atggtgttcctgtctggaaatgccagtgacagcagcaactgcacccagcccccagcccctgtgaacatcagcaaggccatcctgctgggcgtcatcctgggcggcctcatcctgtttggagtgctgggcaacatcctggtgatcctgtctgtggcctgccaccgccacctgcacagcgtgacccactactacatcgtgaacctggccgtggccgacctgctgctgaccagcacagtgctgcccttcagcgccatctttgaggtgctgggctactgggccttcggccgggtcttctgcaacatctgggccgctgtggatgtgctgtgctgcacagccagcatcatgggcctgtgcatcatcagcattgaccgctacatcggcgtgtcctaccccctgcgctaccccaccatcgtgacccagaggcggggcctgatggccctgctgtgtgtgtgggccctgagcctggtgatcagcatcggccccctgtttggctggaggcagcctgccccagaagatgagaccatctgccagatcaatgaggagcccggctacgtgctcttcagcgccctgggcagcttctacctgcccctggccatcatcctggtgatgtactgccgggtgtatgtggtggccaagcgggagagccggggcctgaagagcggcctgaagacagacaagagtgacagcgagcaggtgaccctgcgcatccacaggaagaatgccccagctgggggcagcggcatggccagcgccaagaccaagacccacttctctgtgcggctgctgaagttcagccgggagaagaaggccgccaagaccctgggcatcgtggtgggctgctttgtgctgtgctggctgcccttcttcctggtgatgcccatcggcacccacacccatgacatgaagccagccagccggccccggctgctgagcctgctgcccaaggagggggagcacgagacccaccactggagctgtgaccccctgagcctggagagcacccctggggcccaggagccctgcctgaccctgggcttcaccagcctgagcagcatccacctgaccaaggcccagatccagcacgtgacagtgacagacaccgggaagacagtgacctag

SEQ ID NO: 341268 - DNA, 975 bp, Artificial Sequence
  derived and/or modified sequence
atggtgttcctgagcggcaacgccagcgacagcagcaactgcacccaaccaccagcgcctgtcaacatttcaaaagcaatcttgctgggtgtgatccttggggggctgatcctcttcggtgtgctaggcaatattctggtcatcttatctgtggcctgccaccgtcacctgcattcggtgactcactattatatcgttaatctcgcagtggcagatctgctgctgactagtaccgtactgcccttcagtgctatctttgaggtacttggctattgggcatttggccgtgtgttttgtaatatttgggcagccgtcgacgtgctgtgttgtactgcctcaatcatgggactatgcatcattagtatcgataggtatatcggcgtgtcctatcccctacgataccctaccatcgttacacagaggagaggcctgatggctcttctgtgcgtgtgggccctaagtctggtgatttctattggaccgctctttggatggcgccagcccgcaccagaggatgagaccatttgtcagatcaacgaggagcccggctatgtcctgttttccgccctgggctcgttctacttgccccttgccatcatcctcgtcatgtactgccgcgtgtatgtggttgccaaaagagagagccggggattaaagtccgggctgaagaccgacaagtccgattccgagcaggtcaccctccgcatacaccgaaagaatgcgccggcgggtggaagcgggatggcatccgccaagaccaagacacacttttcggtgcgcctactgaaatttagccgggagaagaaagccgccaagaccctgggaattgtggtcggatgctttgtgttgtgttggctgcccttcttcttggtaatgcccattggcacctacatcctcaagtacgacgttttgttctggcgcaaagggctgtccgtgtgcacccggctgcgcgagcgtaaggagatcaagaattag

SEQ ID NO: 341269 - DNA, 1119 bp, Artificial Sequence
  derived and/or modified sequence
atggtgttcctgagcggcaacgccagcgacagcagcaactgcacccagccccccgctccggtgaatatttctaaggccatacttctaggggtcatcctagggggactgatcctgttcggcgtgctcggaaacattctggtcatcctgagtgtggcttgccaccgacacctgcactccgtgactcactactacatagtaaatctcgccgtggctgacctcttgctgacttcaaccgtactcccattctccgccatatttgaggtcctggggtactgggctttcgggagggttttttgcaatatttgggcagccgttgatgtgctgtgttgtacagccagtataatgggactttgcattatttccattgacagatatatcggggtgtcatatccactcagataccctacaatagtgacccaaagaagaggcttgatggccttgctgtgtgtgtgggctttaagcctggtcatttccatcggccctctgtttgggtggcggcagcctgcgcctgaagacgagacaatttgtcagataaacgaggagccgggatacgttctgtttagtgctctggggagtttttacctccccttagccattatcctggtgatgtactgccgggtgtacgtcgtggctaaacgtgagagccggggactgaagtccggcctgaaaactgacaaaagcgacagtgaacaggtcaccctccgcatacaccggaaaaacgcccctgccggcgggagtggaatggcctccgcaaaaacgaaaactcacttctcagtgaggctgcttaagttcagcagggagaaaaaggctgcaaaaacattagggatcgtggtgggctgcttcgtgctgtgctggctcccctttttcttggtcatgcccatcggcacacatacccatgacatgaagcctgcgagccgccctcgtctcttatctttgctgccgaaggagggcgaacacgaaacccaccactggagttgtgacccactcagcctggaatcaaccccgggcgctcaggaaccctgtctgaccctgggctttaccagcttgtcaagcatccatctgacgaaggctcagatacagcatgtgactgtgacagacaccgggaagacggtcacatag

SEQ ID NO: 341270 - DNA, 975 bp, Artificial Sequence
  derived and/or modified sequence
atggtctttctgtctggcaatgcttccgatagcagcaattgcacacagccgcctgctcctgtcaacattagcaaagccatattgttaggagtcatcctcggcggtctcattttattcggcgtgctgggtaacattttggtgattttgtctgtggcatgccacagacaccttcactccgtcacacattactatatcgtcaacctcgcagtggcagacttgctgctaacctccacggtcctacctttctcagcaattttcgaagtgcttgggtactgggccttcggccgagtcttctgcaacatatgggccgctgtcgacgtcctgtgctgtacagcaagcattatggggctctgtattatctccattgaccgatacattggagtgagctaccccctgcgctacccaaccatagtgacacaacgtagaggcctcatggccttactctgtgtctgggctctgtcattggtcattagcatcgggcctctgtttggctggaggcaaccagcccctgaagatgaaaccatctgccagatcaatgaggagcccggttacgtgctgtttagcgcgctcggctccttctaccttccgctcgcaatcattctggttatgtactgtcgggtgtatgtggtggcaaagagagagtctcgcggattgaagtccggtttaaaaacagataaatcagactcagaacaggtaaccctgcgcatccatcggaagaacgccccagccggaggctccgggatggcctctgcaaaaactaaaacccatttctcagttcggctgctgaagtttagcagagaaaaaaaggcagcaaagactcttggaattgttgtagggtgctttgtcctttgttggctgcctttctttctggtgatgcccatcgggacatatatcttgaaatacgacgtgttgttctggcgcaaggggctgagcgtctgcacccgtctgcgggaacggaaagaaatcaagaattag

SEQ ID NO: 341271 - DNA, 1119 bp, Artificial Sequence
  derived and/or modified sequence
atggtctttctgtcaggcaatgctagcgattccagcaattgcacacagccaccggcacccgtaaacatatccaaggcaatcctattgggggtgattcttggaggcttaattctgttcggtgttctgggcaacatacttgtgatcctgtctgtcgcttgccatcgtcacctgcacagcgtgacacactactacatcgttaacttggcagttgccgatctcttgttgacatcaaccgtgctgccctttagtgctatatttgaagtactggggtactgggcattcggacgcgttttctgcaacatctgggccgctgtcgatgtcttatgctgcacagccagcatcatggggctgtgtatcatctcgatagacagatacatcggtgtgtcctaccctctccgatatcctacaattgtgactcagcgtcgcggtctgatggctctgctttgtgtttgggccctatccctcgtcatctccattggaccactttttgggtggcgacaacccgctccagaggacgagacaatctgtcagattaacgaagaaccgggttacgtgctgtttagtgcacttggatccttctacttacccttggccatcattctggtgatgtactgcagggtatacgtggttgccaaaagggagagtagggggctcaaatcaggcttaaagaccgataagagtgattctgaacaggtaacattgcgtattcacagaaaaaacgctccagccggtggaagcgggatggcctctgcgaagacgaagacccatttttccgttcgcctcctcaaattctctcgtgaaaaaaaagccgcaaaaaccttaggaatagtggtggggtgtttcgtgttgtgttggcttccattctttctggtaatgcccatcgggacccatacccacgatatgaagccggcaagcaggccaaggctgctgagccttttacccaaggagggggaacatgaaacccaccattggtcatgtgaccccctgtccctggagagtacccccggagcccaggaaccctgcctcacattgggcttcacttccctcagcagcatccatctcaccaaagcccagattcagcatgtgaccgtcacagacacggggaagacagtgacatag

SEQ ID NO: 341272 - DNA, 975 bp, Artificial Sequence
  derived and/or modified sequence
atggtgttcctgagcggcaacgccagcgacagcagcaactgcacccagccccccgcccccgtgaacatcagcaaggccatcctgctgggcgtgatcctgggcggcctgatcctgttcggcgtgctgggcaacatcctggtgatcctgagcgtggcctgccacagacacctgcacagcgtgacccactactacatcgtgaacctggccgtggccgacctgctgctgaccagcaccgtgctgcccttcagcgccatcttcgaggtgctgggctactgggccttcggcagagtgttctgcaacatctgggccgccgtggacgtgctgtgctgcaccgccagcatcatgggcctgtgcatcatcagcatcgacagatacatcggcgtgagctaccccctgagataccccaccatcgtgacccagagaagaggcctgatggccctgctgtgcgtgtgggccctgagcctggtgatcagcatcggccccctgttcggctggagacagcccgcccccgaggacgagaccatctgccagatcaacgaggagcccggctacgtgctgttcagcgccctgggcagcttctacctgcccctggccatcatcctggtgatgtactgcagagtgtacgtggtggccaagagagagagcagaggcctgaagagcggcctgaagaccgacaagagcgacagcgagcaggtgaccctgagaatccacagaaagaacgcccccgccggcggcagcggcatggccagcgccaagaccaagacccacttcagcgtgagactgctgaagttcagcagagagaagaaggccgccaagaccctgggcatcgtggtgggctgcttcgtgctgtgctggctgcccttcttcctggtgatgcccatcggcacctacatcctgaagtacgacgtgctgttctggagaaagggcctgagcgtgtgcaccagactgagagagagaaaggagatcaagaactag

SEQ ID NO: 341273 - DNA, 1119 bp, Artificial Sequence
  derived and/or modified sequence
atggtgttcctgagcggcaacgccagcgacagcagcaactgcacccagccccccgcccccgtgaacatcagcaaggccatcctgctgggcgtgatcctgggcggcctgatcctgttcggcgtgctgggcaacatcctggtgatcctgagcgtggcctgccacagacacctgcacagcgtgacccactactacatcgtgaacctggccgtggccgacctgctgctgaccagcaccgtgctgcccttcagcgccatcttcgaggtgctgggctactgggccttcggcagagtgttctgcaacatctgggccgccgtggacgtgctgtgctgcaccgccagcatcatgggcctgtgcatcatcagcatcgacagatacatcggcgtgagctaccccctgagataccccaccatcgtgacccagagaagaggcctgatggccctgctgtgcgtgtgggccctgagcctggtgatcagcatcggccccctgttcggctggagacagcccgcccccgaggacgagaccatctgccagatcaacgaggagcccggctacgtgctgttcagcgccctgggcagcttctacctgcccctggccatcatcctggtgatgtactgcagagtgtacgtggtggccaagagagagagcagaggcctgaagagcggcctgaagaccgacaagagcgacagcgagcaggtgaccctgagaatccacagaaagaacgcccccgccggcggcagcggcatggccagcgccaagaccaagacccacttcagcgtgagactgctgaagttcagcagagagaagaaggccgccaagaccctgggcatcgtggtgggctgcttcgtgctgtgctggctgcccttcttcctggtgatgcccatcggcacccacacccacgacatgaagcccgccagcagacccagactgctgagcctgctgcccaaggagggcgagcacgagacccaccactggagctgcgaccccctgagcctggagagcacccccggcgcccaggagccctgcctgaccctgggcttcaccagcctgagcagcatccacctgaccaaggcccagatccagcacgtgaccgtgaccgacaccggcaagaccgtgacctag

SEQ ID NO: 341274 - protein, 342 aa, Artificial Sequence
  derived and/or modified sequence
MVFLSGNASDSSNCTQPPAPVNISKAILLGVILGGLILFGVLGNILVILSVACHRHLHSVTHYYIVNLAVADLLLTSTVLPFSAIFEVLGYWAFGRVFCNIWAAVDVLCCTASIMGLCIISIDRYIGVSYPLRYPTIVTQRRGLMALLCVWALSLVISIGPLFGWRQPAPEDETICQINEEPGYVLFSALGSFYLPLAIILVMYCRVYVVAKRESRGLKSGLKTDKSDSEQVTLRIHRKNAPAGGSGMASAKTKTHFSVRLLKFSREKKAAKTLGIVVGCFVLCWLPFFLVMPIDEETEAQEGKNDSPSFKQPVHHAAVLGLEVMEKENLEGVSRKDTCGVW

SEQ ID NO: 341275 - protein, 370 aa, Artificial Sequence
  derived and/or modified sequence
MVFLSGNASDSSNCTQPPAPVNISKAILLGVILGGLILFGVLGNILVILSVACHRHLHSVTHYYIVNLAVADLLLTSTVLPFSAIFEVLGYWAFGRVFCNIWAAVDVLCCTASIMGLCIISIDRYIGVSYPLRYPTIVTQRRGLMALLCVWALSLVISIGPLFGWRQPAPEDETICQINEEPGYVLFSALGSFYLPLAIILVMYCRVYVVAKRESRGLKSGLKTDKSDSEQVTLRIHRKNAPAGGSGMASAKTKTHFSVRLLKFSREKKAAKTLGIVVGCFVLCWLPFFLVMPIDEVSLCHQAGVQWHDLGSLQPPPPGFKRFSCLSLPSSWDYRDVPPGRRHQAQLIFVFLVETGFHHVGQDDLDLLTS

SEQ ID NO: 341276 - DNA, 1029 bp, Artificial Sequence
  derived and/or modified sequence
atggtgtttttaagcggaaatgcatcagattcctcaaattgcacacagccacctgctcccgttaacatctcaaaagcaatccttcttggtgtaatcttagggggattgattctcttcggggtgttggggaacattctggtgatcctctctgttgcgtgtcatcgccacctccactcggtcacacactattacatcgttaatcttgccgtggctgatctgctcctgaccagtactgtactgccattctccgctatatttgaggtgttaggttactgggcctttgggcgggttttctgtaatatatgggccgcagtcgatgttctctgctgtactgcaagcattatgggactgtgcataatctcaatcgacaggtatattggtgtgtcatacccactccgataccctacaatagtcacacagaggagaggattgatggcattactttgcgtttgggcgctgtctctggtgatctctattggccccctgttcggctggcgccaacccgcacctgaggacgagacaatttgtcagatcaatgaggagcctggctacgttttgttttcagctctcgggtccttttaccttcctctagccattatactggtaatgtactgcagagtttacgtggtggctaagcgggaaagtcgcgggctcaaatcagggcttaagacagacaaatcagatagcgaacaagtgacgctgcggattcatagaaaaaatgcacccgcggggggatccggcatggctagcgcgaaaaccaaaacccacttttcggtcagactgctcaaattttcccgtgaaaagaaggcagctaagactttaggcatcgtcgttgggtgcttcgtgctttgttggctgccctttttcctggtgatgccaatcgatgaagaaacagaagcccaagagggcaagaatgacagcccttcgttcaagcaacctgtgcaccacgcggctgtgctgggcttggaggtgatggaaaaagagaatctggagggtgtgtcacgcaaagacacgtgcggcgtgtggtag

SEQ ID NO: 341277 - DNA, 1113 bp, Artificial Sequence
  derived and/or modified sequence
atggtttttctgtccgggaatgcatccgactcctcaaactgtacacagcccccagcacccgttaatatcagcaaggcgattcttctgggagtcatcctcggcggccttatactattcggcgtactgggcaacatcttggtgattctctccgtggcttgccataggcacctgcattcagttacccactactatattgttaacctcgccgttgccgatcttcttctcacgtctactgttttgccattttccgcaattttcgaggtgctcggctattgggcgttcgggcgggtgttctgtaatatttgggccgcggtcgacgtcctgtgctgtaccgcctccatcatgggcctgtgcatcatcagcatcgaccggtacataggagtgtcctaccctttgcgataccccaccatcgtcacccagagacgcggtctgatggcactgttgtgcgtttgggcgctgtctttggtaatctctatcgggccattgtttggatggaggcaacctgcccctgaggatgagaccatatgccagattaacgaagaacccggttacgtcctgttctctgctctgggctcattttacttgcccttggcgatcatcctggtgatgtattgtcgcgtgtatgtagtcgccaaaagagaaagccgaggcttaaagtcaggcttgaaaaccgataaatccgacagtgaacaggtcactttgcgcatccatcgtaaaaatgccccagctggtggatcagggatggccagcgccaaaacgaaaacccacttctctgttagactcctaaagttttcgagagaaaagaaggctgctaaaaccctggggattgtggtgggctgctttgtactttgctggctgccttttttcctggtgatgcccattgacgaagtcagcctttgccatcaggctggcgtgcagtggcacgatctaggctcactccagcctcccccccccggctttaagcgattcagttgtttgtcgctcccctcttcgtgggattatcgggatgtgccgcctgggagaaggcaccaggcccagctgatattcgtgtttcttgtcgagaccggattccaccatgttggccaagacgacttagatttactaacgtcttag

SEQ ID NO: 341278 - DNA, 1697 bp, Artificial Sequence
  derived and/or modified sequence
gaattccgaatcatgtgcagaatgctgaatcttcccccagccaggacgaataagacagcgcggaaaagcagattctcgtaattctggaattgcatgttgcaaggagtctcctggatcttcgcacccagcttcgggtagggagggagtccgggtcccgggctaggccagcccggcaggtggagagggtccccggcagccccgcgcgcccctggccatgtctttaatgccctgccccttcatgtggccttctgagggttcccagggctggccagggttgtttcccacccgcgcgcgcgctctcacccccagccaaacccacctggcagggctccctccagccgagaccttttgattcccggctcccgcgctcccgcctccgcgccagcccgggaggtggccctggacagccggacctcgcccggccccggctgggaccatggtgtttctctcgggaaatgcttccgacagctccaactgcacccaaccgccggcaccggtgaacatttccaaggccattctgctcggggtgatcttggggggcctcattcttttcggggtgctgggtaacatcctagtgatcctctccgtagcctgtcaccgacacctgcactcagtcacgcactactacatcgtcaacctggcggtggccgacctcctgctcacctccacggtgctgcccttctccgccatcttcgaggtcctaggctactgggccttcggcagggtcttctgcaacatctgggcggcagtggatgtgctgtgctgcaccgcgtccatcatgggcctctgcatcatctccatcgaccgctacatcggcgtgagctacccgctgcgctacccaaccatcgtcacccagaggaggggtctcatggctctgctctgcgtctgggcactctccctggtcatatccattggacccctgttcggctggaggcagccggcccccgaggacgagaccatctgccagatcaacgaggagccgggctacgtgctcttctcagcgctgggctccttctacctgcctctggccatcatcctggtcatgtactgccgcgtctacgtggtggccaagagggagagccggggcctcaagtctggcctcaagaccgacaagtcggactcggagcaagtgacgctccgcatccatcggaaaaacgccccggcaggaggcagcgggatggccagcgccaagaccaagacgcacttctcagtgaggctcctcaagttctcccgggagaagaaagcggccaaaacgctgggcatcgtggtcggctgcttcgtcctctgctggctgccttttttcttagtcatgcccattgatgaggaaactgaggcccaagaaggaaaaaatgactcacccagctttaaacaaccagttcaccatgcagcagtgctggggttggaggtgatggagaaggaaaatttggaaggtgtttcaaggaaagacacctgtggggtttggtgaccagttggaatgtaagaggcaaaaaaaagggagaaggaactagatacatattcttctggcaggaactgttaattgggttcctgctcccatcttgcactacagtgagagagataacctggtctcctaccattggaaagcatatcatctgtgctctggaggatgagacaatcaaagaaaacaagtaaataagaaaacttaaaaactgtgatatgtaccgtgaaataaataagcc

SEQ ID NO: 341279 - DNA, 1918 bp, Artificial Sequence
  derived and/or modified sequence
gaattccgaatcatgtgcagaatgctgaatcttcccccagccaggacgaataagacagcgcggaaaagcagattctcgtaattctggaattgcatgttgcaaggagtctcctggatcttcgcacccagcttcgggtagggagggagtccgggtcccgggctaggccagcccggcaggtggagagggtccccggcagccccgcgcgcccctggccatgtctttaatgccctgccccttcatgtggccttctgagggttcccagggctggccagggttgtttcccacccgcgcgcgcgctctcacccccagccaaacccacctggcagggctccctccagccgagaccttttgattcccggctcccgcgctcccgcctccgcgccagcccgggaggtggccctggacagccggacctcgcccggccccggctgggaccatggtgtttctctcgggaaatgcttccgacagctccaactgcacccaaccgccggcaccggtgaacatttccaaggccattctgctcggggtgatcttggggggcctcattcttttcggggtgctgggtaacatcctagtgatcctctccgtagcctgtcaccgacacctgcactcagtcacgcactactacatcgtcaacctggcggtggccgacctcctgctcacctccacggtgctgcccttctccgccatcttcgaggtcctaggctactgggccttcggcagggtcttctgcaacatctgggcggcagtggatgtgctgtgctgcaccgcgtccatcatgggcctctgcatcatctccatcgaccgctacatcggcgtgagctacccgctgcgctacccaaccatcgtcacccagaggaggggtctcatggctctgctctgcgtctgggcactctccctggtcatatccattggacccctgttcggctggaggcagccggcccccgaggacgagaccatctgccagatcaacgaggagccgggctacgtgctcttctcagcgctgggctccttctacctgcctctggccatcatcctggtcatgtactgccgcgtctacgtggtggccaagagggagagccggggcctcaagtctggcctcaagaccgacaagtcggactcggagcaagtgacgctccgcatccatcggaaaaacgccccggcaggaggcagcgggatggccagcgccaagaccaagacgcacttctcagtgaggctcctcaagttctcccgggagaagaaagcggccaaaacgctgggcatcgtggtcggctgcttcgtcctctgctggctgccttttttcttagtcatgcccattgacgaagtctcgctctgtcaccaggctggagtgcagtggcatgatcttggctcactgcaacctccgcctcccgggttcaagagattctcctgcctcagcctcccaagcagctgggactacagggatgtgccaccaggccgacgccaccaggcccagctaatttttgtatttttagtagagacggggtttcaccatgttggccaggatgatctcgatctcttgacctcatgatctgcctgcctcagcctcccaaagtgctgggattacaggcgtgagccaccgtgcccggcccaactattttttttttttatcttttttaacagtgcaatcctttctgtggatgaaatcttgctcagaagctcaatatgcaaaagaaagaaaaacagcagggctggacggatgttgggagtggggtaagaccccaaccactcagaaccacccccccaacacacacacacattctctccatggtgactggtgaggggcctctagagggtacatagtacaccatggagcacggtttaagcaccactggactacacattcttctgtggcagttatcttaccttcccatagacacccagcccatagccattggtt

SEQ ID NO: 341280 - DNA, 1029 bp, Artificial Sequence
  derived and/or modified sequence
atggtgttcctgtctggaaatgccagtgacagcagcaactgcacccagcccccagcccctgtgaacatcagcaaggccatcctgctgggcgtcatcctgggcggcctcatcctgtttggagtgctgggcaacatcctggtgatcctgtctgtggcctgccaccgccacctgcacagcgtgacccactactacatcgtgaacctggccgtggccgacctgctgctgaccagcacagtgctgcccttcagcgccatctttgaggtgctgggctactgggccttcggccgggtcttctgcaacatctgggccgctgtggatgtgctgtgctgcacagccagcatcatgggcctgtgcatcatcagcattgaccgctacatcggcgtgtcctaccccctgcgctaccccaccatcgtgacccagaggcggggcctgatggccctgctgtgtgtgtgggccctgagcctggtgatcagcatcggccccctgtttggctggaggcagcctgccccagaagatgagaccatctgccagatcaatgaggagcccggctacgtgctcttcagcgccctgggcagcttctacctgcccctggccatcatcctggtgatgtactgccgggtgtatgtggtggccaagcgggagagccggggcctgaagagcggcctgaagacagacaagagtgacagcgagcaggtgaccctgcgcatccacaggaagaatgccccagctgggggcagcggcatggccagcgccaagaccaagacccacttctctgtgcggctgctgaagttcagccgggagaagaaggccgccaagaccctgggcatcgtggtgggctgctttgtgctgtgctggctgcccttcttcctggtgatgcccattgatgaggagacagaggcccaggagggcaagaatgacagccccagcttcaagcagcctgtgcaccacgccgctgtgctgggcctggaggtgatggagaaggagaacctggagggcgtgtccaggaaggacacctgtggggtgtggtag

SEQ ID NO: 341281 - DNA, 1113 bp, Artificial Sequence
  derived and/or modified sequence
atggtgttcctgtctggaaatgccagtgacagcagcaactgcacccagcccccagcccctgtgaacatcagcaaggccatcctgctgggcgtcatcctgggcggcctcatcctgtttggagtgctgggcaacatcctggtgatcctgtctgtggcctgccaccgccacctgcacagcgtgacccactactacatcgtgaacctggccgtggccgacctgctgctgaccagcacagtgctgcccttcagcgccatctttgaggtgctgggctactgggccttcggccgggtcttctgcaacatctgggccgctgtggatgtgctgtgctgcacagccagcatcatgggcctgtgcatcatcagcattgaccgctacatcggcgtgtcctaccccctgcgctaccccaccatcgtgacccagaggcggggcctgatggccctgctgtgtgtgtgggccctgagcctggtgatcagcatcggccccctgtttggctggaggcagcctgccccagaagatgagaccatctgccagatcaatgaggagcccggctacgtgctcttcagcgccctgggcagcttctacctgcccctggccatcatcctggtgatgtactgccgggtgtatgtggtggccaagcgggagagccggggcctgaagagcggcctgaagacagacaagagtgacagcgagcaggtgaccctgcgcatccacaggaagaatgccccagctgggggcagcggcatggccagcgccaagaccaagacccacttctctgtgcggctgctgaagttcagccgggagaagaaggccgccaagaccctgggcatcgtggtgggctgctttgtgctgtgctggctgcccttcttcctggtgatgcccattgatgaggtgtccctgtgccaccaggccggcgtgcagtggcatgacctgggcagcctgcagcccccacctcctggcttcaagcgcttcagctgcctgagcctgcccagctcctgggactacagagatgtgcccccaggaagaagacaccaggcccagctgatctttgtgttcctggtggagaccggcttccaccacgtgggccaggatgacctggacctgctgaccagctag

SEQ ID NO: 341282 - DNA, 1029 bp, Artificial Sequence
  derived and/or modified sequence
atggtgttcctgagcggcaacgccagcgacagcagcaactgcacccagcctccggcaccagttaatatcagtaaagcgattcttctaggcgtcatccttgggggactcatactgtttggcgtgctcggtaatatcctggtgattctcagcgtggcctgtcacagacacctgcactcggttacccattactatattgtgaacctcgctgtcgccgacttgttacttactagcacagtattgcccttcagcgctatatttgaagtgctcgggtactgggcgttcggacgtgtgttttgtaacatctgggcagccgtggacgttctgtgttgcaccgccagtattatgggtctctgcattatctccatcgataggtacattggagtgtcctaccccctgagataccctacgattgtgactcagcggcggggcctgatggctctactgtgtgtatgggccctctcactcgtgataagcattggtcctctcttcggctggagacagcctgcacctgaggacgagactatctgccaaatcaatgaagaaccgggttacgtgctcttcagcgctctggggagtttctacctgcctctcgcaataattttagttatgtattgtcgggtgtacgtggtggccaagagggagtctagaggtttgaagagcggcctgaaaacagataagtccgattcagaacaggttacattgcgaatccacagaaagaatgcaccagctggtggaagtggcatggcctcagccaagacaaaaacccacttctcagtgcgtctcctgaagtttagcagggaaaagaaagcagcgaaaaccttaggcatcgtggtgggctgttttgttctgtgttggctgcccttttttctggtgatgcctatagacgaggaaacagaagcccaggagggtaagaatgactccccctcatttaaacagcccgttcaccacgcagccgtcttagggctggaagtgatggagaaagagaacctcgagggagtgtctaggaaggacacctgcggggtctggtag

SEQ ID NO: 341283 - DNA, 1113 bp, Artificial Sequence
  derived and/or modified sequence
atggtgttcctgagcggcaacgccagcgacagcagcaactgcacccaaccaccagccccggtcaacattagtaaggctatactgctcggagtgattttggggggcctgatcctcttcggcgttttgggaaatattcttgtgatactttctgtcgcatgccaccggcatttgcactctgtgacacactattatatcgtcaacctcgctgtggccgacctgctactgacaagcaccgtgcttccgttttccgcaattttcgaggtgctaggctattgggctttcgggcgagtgttttgcaatatttgggctgctgtggatgttctctgttgtaccgcctccatcatggggctatgcatcattagtattgacaggtatattggcgtgtcttacccacttcggtatcccacaattgtgacccagagacgcgggttgatggctctactgtgcgtgtgggcccttagcctggttatttccatagggcctctattcggttggcgtcaaccggctccggaggatgaaacgatctgtcaaattaacgaggagcccggctacgtccttttctctgcactgggctcattttacctgcccctggccattatcctggtgatgtactgtagggtgtacgtggtcgcaaagagggagagccgaggcctaaaatccggcttaaaaaccgacaaatccgactcggaacaggttaccctcagaatccacaggaagaatgccccggctgggggaagcgggatggcaagtgcaaagacgaaaacacacttctcagtgagactgttgaaattctctagagaaaagaaagccgcaaagactctcgggatcgtggttgggtgctttgtgctgtgctggctccctttctttctcgtgatgcctatagatgaggtgtctttgtgtcaccaggccggtgtgcaatggcacgacctgggtagtctgcagcctccaccaccaggctttaaacgcttctcctgcctgagccttccttctagctgggactaccgcgacgtccccccgggccgtagacatcaggcgcagcttatattcgtttttctggtggaaacaggctttcaccacgtcggacaagacgacctagacctgctcacaagctag

SEQ ID NO: 341284 - DNA, 1029 bp, Artificial Sequence
  derived and/or modified sequence
atggttttccttagtgggaacgcctctgactcatcaaattgtacacagccgccagcgcctgttaatatcagcaaagccatcctcctaggggtgatccttggcggactgatcctgtttggcgtcttaggaaatatcctcgttatcttaagcgtagcatgccatcgacatctgcatagcgtgacccactattatatcgtgaatctggccgtggctgatctccttctgacctctacggtgcttcctttttcagcaatcttcgaggtgcttggatattgggcctttggcagggtcttttgcaacatttgggccgctgtcgatgtgctctgttgcactgccagtataatggggctttgtatcatcagcatagaccgctacattggtgtgtcatacccattgcgttatcccacgattgtgacccagaggaggggattaatggcacttctgtgtgtatgggccttgtctctggtgattagtatcggaccgctcttcggttggcgccaacccgcacctgaagacgaaacgatatgtcagattaatgaagagccagggtacgtgttgttttctgctttggggtctttttatcttcctctggctataatacttgtgatgtattgccgcgtgtacgtggtcgcaaaaagagagagtcgaggccttaaatctggtctgaagaccgataagtcggatagtgagcaggtgactctccgaattcaccgcaagaatgcaccagccggaggtagtggaatggcttccgccaaaacaaaaacacacttttccgtcagattgcttaaattcagccgtgagaagaaggcagcgaagactcttgggattgtggtaggctgtttcgtgctgtgttggctgccattttttctggttatgcccatcgatgaagagaccgaagcgcaggaaggtaaaaatgacagtcccagtttcaaacagccagtccatcacgcggcagttcttggcctggaggtaatggagaaggaaaatttggaaggcgtcagccgaaaagatacgtgcggggtctggtag

SEQ ID NO: 341285 - DNA, 1113 bp, Artificial Sequence
  derived and/or modified sequence
atggtcttcctgagcggcaacgcaagtgatagttccaattgcacccagcctcctgcacccgtcaacatttctaaggctatcttgctaggggttatcctgggtggcttaatcctctttggcgtgttgggaaacattcttgtgattctgtccgtggcctgtcatagacacctgcattccgtgacacactactatatcgtgaacctggctgtcgcggacctgcttctgacatcaaccgtgctacctttctcagctattttcgaggttctgggatactgggccttcggcagagtgttctgtaacatctgggccgctgtggacgttctttgctgcaccgcctccattatgggcctttgtatcatctctatagacaggtatataggcgtctcatatcctctgaggtacccaactattgtgactcagcgcaggggtcttatggccctgctgtgtgtgtgggccctctctcttgtcataagcattgggccattattcggctggcgccagcctgcacctgaggatgaaacgatctgtcagatcaatgaagagccaggctatgtactgttctctgcgctaggaagcttctatctgcccctagcaatcattcttgtaatgtactgccgggtttacgtcgtggcaaagcgcgagtctagaggacttaagtcgggacttaagactgacaaaagcgactcagagcaagtgaccctccgaattcaccgtaagaacgcgccagcaggcggttctgggatggcatccgcaaaaacaaaaacacacttttctgtgcgcctgctgaagttcagcagggagaagaaggccgctaaaaccctagggatagtcgtgggctgttttgtactatgctggttaccttttttcttagtgatgcccatagatgaggtaagcctgtgtcaccaggctggggttcagtggcacgaccttggcagcctgcagccccctcctcccggatttaaaaggttctcatgcctgagcttgccttcttcatgggactacagggacgtgcctcccggaagacgtcatcaggctcagctgattttcgtgttcttggtagaaacaggctttcaccacgttggtcaagacgatctcgatttactgacctcgtag

SEQ ID NO: 341286 - DNA, 1029 bp, Artificial Sequence
  derived and/or modified sequence
atggtgttcctgagcggcaacgccagcgacagcagcaactgcacccagccccccgcccccgtgaacatcagcaaggccatcctgctgggcgtgatcctgggcggcctgatcctgttcggcgtgctgggcaacatcctggtgatcctgagcgtggcctgccacagacacctgcacagcgtgacccactactacatcgtgaacctggccgtggccgacctgctgctgaccagcaccgtgctgcccttcagcgccatcttcgaggtgctgggctactgggccttcggcagagtgttctgcaacatctgggccgccgtggacgtgctgtgctgcaccgccagcatcatgggcctgtgcatcatcagcatcgacagatacatcggcgtgagctaccccctgagataccccaccatcgtgacccagagaagaggcctgatggccctgctgtgcgtgtgggccctgagcctggtgatcagcatcggccccctgttcggctggagacagcccgcccccgaggacgagaccatctgccagatcaacgaggagcccggctacgtgctgttcagcgccctgggcagcttctacctgcccctggccatcatcctggtgatgtactgcagagtgtacgtggtggccaagagagagagcagaggcctgaagagcggcctgaagaccgacaagagcgacagcgagcaggtgaccctgagaatccacagaaagaacgcccccgccggcggcagcggcatggccagcgccaagaccaagacccacttcagcgtgagactgctgaagttcagcagagagaagaaggccgccaagaccctgggcatcgtggtgggctgcttcgtgctgtgctggctgcccttcttcctggtgatgcccatcgacgaggagaccgaggcccaggagggcaagaacgacagccccagcttcaagcagcccgtgcaccacgccgccgtgctgggcctggaggtgatggagaaggagaacctggagggcgtgagcagaaaggacacctgcggcgtgtggtag

SEQ ID NO: 341287 - DNA, 1113 bp, Artificial Sequence
  derived and/or modified sequence
atggtgttcctgagcggcaacgccagcgacagcagcaactgcacccagccccccgcccccgtgaacatcagcaaggccatcctgctgggcgtgatcctgggcggcctgatcctgttcggcgtgctgggcaacatcctggtgatcctgagcgtggcctgccacagacacctgcacagcgtgacccactactacatcgtgaacctggccgtggccgacctgctgctgaccagcaccgtgctgcccttcagcgccatcttcgaggtgctgggctactgggccttcggcagagtgttctgcaacatctgggccgccgtggacgtgctgtgctgcaccgccagcatcatgggcctgtgcatcatcagcatcgacagatacatcggcgtgagctaccccctgagataccccaccatcgtgacccagagaagaggcctgatggccctgctgtgcgtgtgggccctgagcctggtgatcagcatcggccccctgttcggctggagacagcccgcccccgaggacgagaccatctgccagatcaacgaggagcccggctacgtgctgttcagcgccctgggcagcttctacctgcccctggccatcatcctggtgatgtactgcagagtgtacgtggtggccaagagagagagcagaggcctgaagagcggcctgaagaccgacaagagcgacagcgagcaggtgaccctgagaatccacagaaagaacgcccccgccggcggcagcggcatggccagcgccaagaccaagacccacttcagcgtgagactgctgaagttcagcagagagaagaaggccgccaagaccctgggcatcgtggtgggctgcttcgtgctgtgctggctgcccttcttcctggtgatgcccatcgacgaggtgagcctgtgccaccaggccggcgtgcagtggcacgacctgggcagcctgcagccccccccccccggcttcaagagattcagctgcctgagcctgcccagcagctgggactacagagacgtgccccccggcagaagacaccaggcccagctgatcttcgtgttcctggtggagaccggcttccaccacgtgggccaggacgacctggacctgctgaccagctag

SEQ ID NO: 341288 - protein, 422 aa, Artificial Sequence
  derived and/or modified sequence
MTPSIPSIRRLGSGYFSSNGKLEEVKTPKNPVKRKDLLRHDPDLHMHQGYDKYDVSEFCSYIKSSSSLGNATSDEDPNTNIMNINENKNIPKAKNKSESENEPKAGTDSPVSCASVTEERVASDSPKPALTLQQGQEFSAGGQNAENLCQFFKISPDLNIKCERKDDFLGAAEGKLQCNRLMPNSQKDCHCLGDVLIENTKESKSQSEDLGRKPMESSSVVSCRDRKDRRRSMCYSDGRSLHLEKNGNHTPSSSVGSSVEISLENSELFKDLSDAIEQTFQRRNSETKVRRSTRLQKDLENEGLVWISLPLPSTSQKAKRRTICTFDSSGFESMSPIKETVSSRQKPQMAPPVSDPENSQGPAAGSSDEPGKRRKSFCISTLANTKATSQFKGYRRRSSLNGKGESSLTALERIEHNGERKQ

SEQ ID NO: 341289 - DNA, 1269 bp, Artificial Sequence
  derived and/or modified sequence
atgacccccagcatccccagcatcagaagactgggcagcggctacttcagcagcaacggcaagctggaggaggtgaagacccccaagaaccccgtgaagagaaaggacctgctgagacacgaccccgacctgcacatgcaccagggctacgacaagtacgacgtgagcgagttctgcagctacatcaagagcagcagcagcctgggcaacgccaccagcgacgaggaccccaacaccaacatcatgaacatcaacgagaacaagaacatccccaaggccaagaacaagagcgagagcgagaacgagcccaaggccggcaccgacagccccgtgagctgcgccagcgtgaccgaggagagagtggccagcgacagccccaagcccgccctgaccctgcagcagggccaggagttcagcgccggcggccagaacgccgagaacctgtgccagttcttcaagatcagccccgacctgaacatcaagtgcgagagaaaggacgacttcctgggcgccgccgagggcaagctgcagtgcaacagactgatgcccaacagccagaaggactgccactgcctgggcgacgtgctgatcgagaacaccaaggagagcaagagccagagcgaggacctgggcagaaagcccatggagagcagcagcgtggtgagctgcagagacagaaaggacagaagaagaagcatgtgctacagcgacggcagaagcctgcacctggagaagaacggcaaccacacccccagcagcagcgtgggcagcagcgtggagatcagcctggagaacagcgagctgttcaaggacctgagcgacgccatcgagcagaccttccagagaagaaacagcgagaccaaggtgagaagaagcaccagactgcagaaggacctggagaacgagggcctggtgtggatcagcctgcccctgcccagcaccagccagaaggccaagagaagaaccatctgcaccttcgacagcagcggcttcgagagcatgagccccatcaaggagaccgtgagcagcagacagaagccccagatggccccccccgtgagcgaccccgagaacagccagggccccgccgccggcagcagcgacgagcccggcaagagaagaaagagcttctgcatcagcaccctggccaacaccaaggccaccagccagttcaagggctacagaagaagaagcagcctgaacggcaagggcgagagcagcctgaccgccctggagagaatcgagcacaacggcgagagaaagcagtag

SEQ ID NO: 341290 - DNA, 1269 bp, Artificial Sequence
  derived and/or modified sequence
atgacgccaagtataccaagcatcagacgactggggtcgggttactttagtagtaacggaaagctggaggaagtaaaaacccctaagaaccccgttaagcgtaaggatttgctgaggcacgatcccgacttacacatgcatcaaggatatgataaatatgacgtatctgaattctgtagctatattaagtcttcgtcctcactgggaaatgccaccagtgatgaggatcctaacacgaacattatgaacatcaacgagaataaaaatattcctaaagccaagaataaatccgaatctgaaaacgaacctaaggccggcacggacagtccagtatcttgtgcatccgtcactgaggagcgtgtcgcgtctgacagccccaagcccgctctcaccctgcaacagggacaggagttcagtgcgggcggccagaatgctgaaaacctctgtcagttttttaagatttcacccgacttaaacatcaagtgcgaacggaaggatgactttctgggagctgctgagggaaagcttcaatgcaacaggttgatgcctaatagccagaaggactgccactgtctcggcgatgttttgattgaaaatacaaaggaatcaaaatcccagtctgaagacctgggaaggaagcctatggaatcctcctcggtagtttcctgcagggacaggaaagaccgacggaggtccatgtgctacagcgacgggagatccttgcacctagaaaaaaacgggaatcacactccttcaagttccgtgggatcttctgtagagattagtttggaaaattctgaactgttcaaagatctgtctgacgcaatcgaacaaacattccagcggaggaactcagaaaccaaggtcaggcgaagcacgcgtctgcagaaagatctggaaaacgaaggactcgtctggataagcctcccgctgccgagcaccagccagaaggcaaaacgcagaaccatctgtacgtttgacagcagcggatttgaaagcatgagcccaatcaaggaaaccgtgagtagccgacaaaaacctcagatggcacctcccgtcagtgaccctgagaattctcagggtcctgccgccggtagtagcgacgagccagggaaaagacgaaaatctttctgcatcagcaccctcgctaacacaaaagccacttcccaattcaaaggctaccgtagacggagtagtctcaacgggaagggagagagctccctgacggccctggagcgcatcgagcataatggggaacgaaagcagtag

SEQ ID NO: 341291 - DNA, 1269 bp, Artificial Sequence
  derived and/or modified sequence
atgacccccagcatccccagcatccggcggctgggcagcggctacttcagcagcaatggcaagctggaggaggtgaagacccccaagaaccctgtgaagaggaaggacctgctgcggcatgaccctgacctgcacatgcaccagggctatgacaagtatgatgtgtctgagttctgcagctacatcaagagcagcagcagcctgggcaatgccaccagtgatgaggaccccaacaccaacatcatgaacatcaatgaaaacaagaacatccccaaggccaagaacaagtctgagagtgaaaatgagcccaaggccggcacagacagccctgtgtcctgtgcctctgtgacagaggagcgggtggccagtgacagccccaagccagccctgaccctgcagcagggccaggagttctctgctgggggccagaatgctgagaacctgtgccagttcttcaagatcagcccagacctgaacatcaagtgtgagaggaaggatgacttcctgggcgctgctgagggcaagctgcagtgcaaccggctgatgcccaacagccagaaggactgccactgcctgggagatgtgctgattgagaacaccaaggagagcaagagccagagcgaggacctgggcaggaagcccatggagagcagctctgtggtgtcctgccgggacaggaaggacagaagaagatccatgtgctacagtgatggccgcagcctgcacctggagaagaatggaaaccacacccccagcagctctgtgggcagctctgtggagatcagcctggagaacagcgagctgttcaaggacctgagtgatgccatcgagcagaccttccagaggagaaattctgagaccaaggtgcggcgcagcacccggctgcagaaggacctggagaatgaaggcctggtgtggatcagcctgcccctgcccagcaccagccagaaggccaagaggaggaccatctgcacctttgacagcagcggctttgagagcatgagccccatcaaggagaccgtgagcagccggcagaagccccagatggcccctcctgtgtctgaccctgagaacagccagggccctgctgctggcagcagtgatgagcccgggaagaggaggaagagcttctgcatcagcaccctggccaacaccaaggccaccagccagttcaagggctacagaagaagaagcagcctgaatggaaaaggagagagcagcctgacagccctggagcgcatcgagcacaatggagagaggaagcagtag

SEQ ID NO: 341292 - DNA, 1269 bp, Artificial Sequence
  derived and/or modified sequence
atgacccccagcatccccagcatccggcggctgggcagcggctacttctcctctaacgggaagctggaggaggtcaaaactccaaagaacccagtaaagagaaaagacctgcttagacacgatcccgacctgcacatgcaccagggatatgataagtacgacgttagtgagttttgttcctacattaagtcctcatctagccttggcaacgccacatccgatgaggatccaaacacaaatatcatgaatatcaatgagaacaagaatatccccaaggctaaaaataagtcagagagcgaaaacgagccgaaggccggcacagactctcctgtgtcatgtgcaagcgttacagaagagagagtggctagtgactccccgaagccggctctgaccctccaacagggacaagagttctctgcaggtggacagaatgccgaaaacctgtgtcagttctttaagatctcccccgacttgaacataaagtgcgagagaaaggacgattttctaggcgccgctgaaggtaagctgcagtgcaatcgcctaatgccgaattctcagaaggactgccactgcttgggagatgtacttatcgaaaacacaaaggagagcaagtctcagtcagaggaccttggcaggaaaccaatggagtctagttcagtggtctcatgccgagataggaaagacaggcgacgatctatgtgctactccgatggacgaagcctccacctcgaaaagaatggcaatcatactccaagtagcagcgttggaagttctgtggagataagtctcgaaaattcagaattgtttaaggacctcagcgacgctatcgagcagacttttcagagaaggaactctgagactaaggtccgcaggtctaccaggcttcagaaggatctcgagaacgagggtttggtctggatctcattacccctgccttccacaagtcagaaggccaaaagacgcaccatctgtacctttgactcatctggattcgagtccatgagccctattaaggagaccgtgtcctccaggcagaagccacagatggcgcccccagtctcagatcctgagaatagtcagggtcctgcagctggatcttctgacgaacccggaaagcgtaggaagagcttctgtatatccacacttgcgaatactaaagcaaccagtcagtttaaagggtaccggcgcagatccagtctcaacggcaagggggaaagctcacttactgccttagagcgaatcgagcacaatggcgagcgtaaacagtag

SEQ ID NO: 341293 - DNA, 1269 bp, Artificial Sequence
  derived and/or modified sequence
atgactccatccatcccatcgatccgccgtttgggttcaggttatttttcttctaacggaaaattggaggaagtgaagacccctaagaaccctgtcaagagaaaagatctgctgcggcatgatcctgatttgcacatgcaccagggatacgataagtacgacgttagcgagttttgttcttatattaaatcttccagttccctcgggaatgccacctctgatgaagaccctaacactaacattatgaacatcaacgagaacaaaaatatccccaaagccaagaataaaagcgagtctgagaacgagccaaaggctggcacggacagcccggtgagctgcgcttctgtgaccgaagagcgagtggctagcgattctcccaaacctgcccttacacttcagcagggccaagaattcagcgccggaggccaaaatgctgagaatctttgtcaattcttcaagatcagtcccgacctcaatataaagtgcgagcgcaaggatgatttccttggagccgctgagggaaaattgcagtgcaacagactcatgcctaattcgcagaaggactgtcactgtctgggggacgtgctgattgagaacaccaaggaatcaaaaagccaatcggaggacctcgggaggaagcctatggagtcttcttcagtggtcagttgtcgcgaccgcaaggatcgcagacgtagtatgtgttacagtgacgggaggagcctgcacctagagaagaacggaaaccataccccttccagcagcgttggctcctctgtcgaaattagcctggagaactcagaactgtttaaagacttgtcagatgcaattgagcagacctttcaaaggcgaaatagtgaaactaaggtgaggcggtctacccgccttcagaaggacttggaaaacgagggacttgtatggattagccttccccttccctctacttcccaaaaggctaagaggcgcaccatctgtacctttgatagttctggcttcgagagtatgagccccatcaaagagacagtgtcttcaagacagaagccccaaatggcgcctccagtgtccgatccagaaaattcccaggggcctgccgctggatcatccgatgaacctgggaagcgccgtaaaagtttctgtatatcaactttggcgaatacaaaagcaacctcacagttcaagggttacaggcgtcggtcttccctgaatggaaagggagagtcttcattaaccgcgctagaacgcatagaacataacggagagagaaaacagtag

SEQ ID NO: 341294 - protein, 601 aa, Artificial Sequence
  derived and/or modified sequence
MAALTPRKRKQDSLKCDSLLHFTENLFPSPNKKHCFYQNSDKNEENLHCSQQEHFVLSALKTTEINRLPSANQGSPFKSALSTVSFYNQNKWYLNPLERKLIKESRSTCLKTNDEDKSFPIVTEKMQGKPVCSKKNNKKPQKSLTAKYQPKYRHIKPVSRNSRNSKQNRVIYKPIVEKENNCHSAENNSNAPRVLSQKIKPQVTLQGGAAFFVRKKSSLRKSSLENEPSLGRTQKSKSEVIEDSDVETVSEKKTFATRQVPKCLVLEEKLKIGLLSASSKNKEKLIKDSSDDRVSSKEHKVDKNEAFSSEDSLGENKTISPKSTVYPIFSASSVNSKRSLGEEQFSVGSVNFMKQTNIQKNTNTRDTSKKTKDQLIIDAGQKHFGATVCKSCGMIYTASNPEDEMQHVQHHHRFLEGIKYVGWKKERVVAEFWDGKIVLVLPHDPSFAIKKVEDVQELVDNELGFQQVVPKCPNKIKTFLFISDEKRVVGCLIAEPIKQAFRVLSEPIGPESPSSTECPRAWQCSDVPEPAVCGISRIWVFRLKRRKRIARRLVDTLRNCFMFGCFLSTDEIAFSDPTPDGKLFATKYCNTPNFLVYNFNS

SEQ ID NO: 341295 - DNA, 1806 bp, Artificial Sequence
  derived and/or modified sequence
atggctgccctgacaccacggaagcggaaacaagattctctcaaatgtgatagtctcctccacttcacggagaacctatttcccagccctaacaaaaagcattgtttttaccagaactcggataagaatgaagaaaacttgcattgttcacagcaagaacactttgtcctaagcgcacttaaaacaaccgagataaaccgtttgccctccgcaaaccagggttcccctttcaaatcggcactaagtactgtgagcttttacaaccagaacaaatggtacctgaatccccttgaacgtaaattaatcaaggagtcacggagcacctgtttgaaaaccaacgacgaggataagtcattcccaatcgttactgaaaaaatgcagggaaagccggtgtgttccaagaaaaacaacaagaagcctcagaagtctttaacagcaaagtatcagcccaagtatcggcacattaagccagtgagccggaattcccgaaatagcaagcagaaccgagttatctataagccaatcgtcgagaaagagaataactgtcacagcgccgaaaacaactcaaacgctcccagagtgctctcgcaaaagattaagccccaggttaccttgcagggaggggctgctttctttgttcgcaagaaaagctctctccgaaaaagttccctcgaaaacgagccttccctgggaaggacccagaaaagcaagtccgaggtcattgaagattctgatgtcgagacagtgagcgaaaaaaaaacttttgcaaccaggcaggtacccaaatgccttgtgttggaggaaaaactcaaaataggcctgctctcagcttcatcgaaaaacaaagaaaagctcataaaagactctagcgacgaccgggtgagttcaaaggaacacaaagtggataaaaatgaagccttctcgtcagaggatagcctaggggagaataaaacaatcagcccaaaatccaccgtgtaccctatcttctctgcctcgtcagtgaactctaagcgtagtcttggagaggagcagttctctgtgggctccgttaatttcatgaagcagaccaatatccaaaaaaatacaaatacgcgggatacttccaaaaaaacaaaggatcagctcataattgatgccgggcagaaacattttggggccaccgtatgtaagagctgtggcatgatctacacagcaagcaacccagaggacgagatgcagcatgttcagcatcaccaccgctttttggaggggattaagtacgtcggctggaagaaggagagggttgttgcagaattttgggacggcaaaatcgtgctggtgttgccgcatgacccctcttttgccattaagaaagtggaggacgtgcaggaactcgtggacaacgagctgggcttccaacaagtggtgccaaagtgcccaaacaaaatcaaaacgttcctgttcatcagcgatgagaaacgggtcgtcggatgcttaatcgctgagcctattaaacaggcattccgtgtcctgtcagagcccataggtcctgaatccccctcttccactgagtgtcctcgggcctggcagtgttcagacgtaccagaacctgcagtttgcggcatctctagaatttgggtgtttcgactgaaaaggaggaaacgcatcgcgcggagactcgtggacaccctgcgaaactgtttcatgttcggatgttttctctccacagatgagatcgcgttcagtgacccgacgcctgatggaaaactgttcgccaccaaatactgcaatacccccaattttctggtgtacaattttaattcctag

SEQ ID NO: 341296 - DNA, 1806 bp, Artificial Sequence
  derived and/or modified sequence
atggccgccctgacccccaggaagaggaagcaggacagcctgaagtgtgacagcctgctgcacttcacagagaacctcttccccagccccaacaagaagcactgcttctaccagaacagcgacaagaatgaggagaacctgcactgcagccagcaggagcactttgtgctgagcgccctgaagaccacagagatcaaccggctgcccagcgccaaccagggcagccccttcaagagcgccctgagcacagtgtccttctacaaccagaacaagtggtacctgaaccccctggagaggaagctgatcaaggagagccgcagcacctgcctgaagaccaatgatgaggacaagagcttccccatcgtgacagagaagatgcagggcaagcctgtgtgcagcaagaagaacaacaagaagccccagaagagcctgacagccaagtaccagcccaagtaccgccacatcaagcctgtgtccaggaacagcaggaacagcaagcagaacagagtcatctacaagcccatcgtggagaaggagaacaactgccacagcgctgagaacaacagcaatgccccccgggtgctgagccagaagatcaagccccaggtgaccctgcagggcggggccgccttctttgtgaggaagaagagcagcctgaggaagagcagcctggagaatgagcccagcctgggccgcacccagaagagcaagtctgaggtgattgaggacagtgatgtggagaccgtgtctgagaagaagacctttgccacccggcaggtgcccaagtgcctggtgctggaggagaagctgaagattggcctgctgagcgccagcagcaagaacaaggagaagctgatcaaggacagcagtgatgacagagtgagcagcaaggagcacaaggtggacaagaatgaggccttcagcagcgaggacagcctgggggagaacaagaccatcagccccaagagcacagtgtaccccatcttcagcgccagctctgtgaacagcaagaggagcctgggggaggagcagttctctgtgggctctgtgaacttcatgaagcagaccaacatccagaagaacaccaacacccgggacaccagcaagaagaccaaggaccagctgatcattgatgctggccagaagcactttggagccaccgtgtgcaagagctgtggcatgatctacacagccagcaacccagaagatgagatgcagcacgtgcagcaccaccaccgcttcctggagggcatcaagtatgtgggctggaagaaggagcgggtggtggccgagttctgggatggcaagatcgtgctggtgctgccccatgaccccagctttgccatcaagaaggtggaggatgtgcaggagctggtggacaatgagctgggcttccagcaggtggtgcccaagtgccccaacaagatcaagaccttcctgttcatcagtgatgagaagagggtggtgggctgcctgattgctgagcccatcaagcaggccttccgggtgctgtctgagcccatcggccctgagagccccagcagcacagaatgtccccgggcctggcagtgcagtgatgtgcctgagcctgctgtgtgtggcatcagccgcatctgggtgttccggctgaagaggaggaagagaattgcccggcggctggtggacaccctgaggaactgcttcatgtttggctgcttcctgagcacagatgagatcgccttcagtgaccccaccccagatggcaagctgtttgccaccaagtactgcaacacccccaacttcctggtgtacaacttcaacagctag

SEQ ID NO: 341297 - DNA, 1806 bp, Artificial Sequence
  derived and/or modified sequence
atggccgccctgaccccccggaagcggaagcaggacagcctgaagtgcgactctctactgcactttaccgagaatctttttccatcaccaaataaaaaacactgcttttaccagaattccgacaagaatgaggagaatttgcactgttcccagcaagaacacttcgtactttccgcattgaagacgacagagataaatcgactaccgtctgctaatcagggctcacccttcaagagcgctttaagcactgtatccttctacaaccagaacaaatggtacctgaaccctctagagagaaaactgatcaaagagtcacgctcgacatgtctgaaaactaacgatgaggataagtccttcccaatagtaacagagaagatgcagggcaagccagtgtgttccaagaagaataacaagaaaccgcagaaatcccttactgctaaatatcagccgaagtataggcacatcaagccagtcagccgaaattctcgcaactctaagcagaaccgagtgatttataaaccaatcgttgagaaggaaaacaactgccatagcgcagaaaataatagtaatgcaccacgagtcctgtcgcaaaaaataaagccacaagtgactcttcaggggggggccgcttttttcgtcagaaagaaaagctccctcagaaagtccagtctggagaatgagccgtccctgggcaggacgcagaagagtaagtcggaggtgattgaggactcagacgttgaaacagtctctgagaagaagacttttgctacccgccaagtgcctaaatgcctggtgttagaggagaaactgaaaatcgggctgttgagcgcatccagtaaaaataaggagaagctgatcaaggacagctccgatgaccgagtgtcgagcaaagagcacaaagtcgataaaaatgaggcattcagtagtgaagactctcttggcgaaaataaaaccatttctcctaaatcaaccgtttacccaatcttctctgcctctagcgtgaatagtaaacgttccctgggcgaggagcagttctcagtggggagcgtgaacttcatgaagcagacaaatattcagaagaataccaatacccgggatacctccaagaagaccaaagatcagctcatcatagacgctggtcaaaaacacttcggggccactgtttgtaagtcctgcggaatgatatacaccgcatcaaatcccgaggatgaaatgcagcatgttcaacaccaccatcgtttcctagaaggaatcaaatacgtagggtggaaaaaggagcgtgtggtggccgagttctgggacgggaagatcgtgctggttctaccccacgacccgagcttcgctattaagaaggtggaggatgtccaggagttggtggacaatgaactggggttccagcaagtggttccgaagtgccccaataagataaaaacctttctgttcatctctgatgaaaaacgcgtggtggggtgcctgatcgcagagcctattaaacaagctttccgcgtgctaagcgagcccatagggccagaaagtcccagcagcactgaatgcccccgagcatggcagtgtagcgacgtgccagagccagccgtgtgcggcatttcccgaatatgggtttttaggctgaaacggcggaaacgtattgccagacggctggtggatactctgcggaactgttttatgtttggttgttttctgtctacagacgaaatcgcattctcagaccccacacctgacggtaagctgtttgctacaaagtactgtaatacccccaattttttagtgtacaatttcaacagttag

SEQ ID NO: 341298 - DNA, 1806 bp, Artificial Sequence
  derived and/or modified sequence
atggctgctctgactcccaggaagcgcaagcaagactccttgaaatgtgattcgctgcttcatttcacggaaaacctcttcccaagccccaataaaaaacactgcttttaccagaattccgataaaaacgaggaaaatttacactgctcccaacaggagcattttgtgttatcagccctcaaaactacagagatcaacagactgccttcagcaaatcagggctcaccattcaagtcggctctgtctacagtgtccttttataaccagaataaatggtacctaaatcctctcgagaggaagttgataaaagaatcccgaagtacttgtctgaagacgaacgatgaggataagagtttcccaatagtcactgagaagatgcagggtaaacccgtgtgtagcaagaagaataacaagaagccccagaagagcttaactgcgaagtaccagccaaaataccggcatattaagcctgtgtcacggaattcacgcaactctaaacaaaaccgcgtgatctataagcccattgtcgagaaggaaaataactgccatagcgccgagaataacagtaatgcccctcgcgtgctctcacagaagattaagccccaggtgacattacagggaggcgctgctttttttgtgaggaagaagagtagccttaggaaatcctccttggagaacgaaccaagtcttggacgtacacagaaatcaaagagcgaagtaatagaagacagcgatgtggaaacagtcagtgaaaagaagacctttgccactaggcaggttcctaaatgccttgtgctggaagagaaattaaagattggcctcctgtcggcctcatctaagaataaggagaagctgattaaggatagctccgacgacagagtgtcttccaaggagcacaaggtggacaaaaacgaagcttttagtagcgaagactctcttggtgaaaataaaactatcagtcccaagtcaaccgtttatcccattttctcagcaagtagtgtgaatagcaagaggtcactcggagaggagcagttctctgtgggctcggtgaactttatgaaacaaacaaatatacagaaaaacaccaatacacgcgatactagcaaaaagacaaaggaccaactcatcatcgacgctggccagaaacattttggggcaaccgtgtgtaagagctgcggaatgatttatacggcaagtaacccagaagatgaaatgcaacacgttcagcatcatcataggtttcttgaaggaattaagtatgtcggttggaagaaggagcgagtggtggcagagttttgggatggaaagatcgtattagtgctcccccatgatccgtcctttgctatcaagaaagtggaagatgtgcaagagcttgtagacaatgagctcgggttccagcaggtagtccctaagtgtccaaataagataaagacgtttttgttcattagtgatgaaaagcgggtcgttggctgtctgatcgcagaaccaattaaacaagcctttagagtcctctctgaaccgattggtccggagagtccatcttcaacagagtgtccacgtgcttggcagtgttctgacgtacccgagcctgcagtatgcggcatctccagaatctgggtcttccggctgaagcgcagaaagagaattgcacgcagactggtagatactctgaggaattgttttatgtttggctgctttctgtcgactgacgagatagcgttctcagacccaacacctgacggtaaattgttcgcaaccaaatactgcaatactccaaatttcctggtttacaactttaacagctag

SEQ ID NO: 341299 - DNA, 1806 bp, Artificial Sequence
  derived and/or modified sequence
atggccgccctgacccccagaaagagaaagcaggacagcctgaagtgcgacagcctgctgcacttcaccgagaacctgttccccagccccaacaagaagcactgcttctaccagaacagcgacaagaacgaggagaacctgcactgcagccagcaggagcacttcgtgctgagcgccctgaagaccaccgagatcaacagactgcccagcgccaaccagggcagccccttcaagagcgccctgagcaccgtgagcttctacaaccagaacaagtggtacctgaaccccctggagagaaagctgatcaaggagagcagaagcacctgcctgaagaccaacgacgaggacaagagcttccccatcgtgaccgagaagatgcagggcaagcccgtgtgcagcaagaagaacaacaagaagccccagaagagcctgaccgccaagtaccagcccaagtacagacacatcaagcccgtgagcagaaacagcagaaacagcaagcagaacagagtgatctacaagcccatcgtggagaaggagaacaactgccacagcgccgagaacaacagcaacgcccccagagtgctgagccagaagatcaagccccaggtgaccctgcagggcggcgccgccttcttcgtgagaaagaagagcagcctgagaaagagcagcctggagaacgagcccagcctgggcagaacccagaagagcaagagcgaggtgatcgaggacagcgacgtggagaccgtgagcgagaagaagaccttcgccaccagacaggtgcccaagtgcctggtgctggaggagaagctgaagatcggcctgctgagcgccagcagcaagaacaaggagaagctgatcaaggacagcagcgacgacagagtgagcagcaaggagcacaaggtggacaagaacgaggccttcagcagcgaggacagcctgggcgagaacaagaccatcagccccaagagcaccgtgtaccccatcttcagcgccagcagcgtgaacagcaagagaagcctgggcgaggagcagttcagcgtgggcagcgtgaacttcatgaagcagaccaacatccagaagaacaccaacaccagagacaccagcaagaagaccaaggaccagctgatcatcgacgccggccagaagcacttcggcgccaccgtgtgcaagagctgcggcatgatctacaccgccagcaaccccgaggacgagatgcagcacgtgcagcaccaccacagattcctggagggcatcaagtacgtgggctggaagaaggagagagtggtggccgagttctgggacggcaagatcgtgctggtgctgccccacgaccccagcttcgccatcaagaaggtggaggacgtgcaggagctggtggacaacgagctgggcttccagcaggtggtgcccaagtgccccaacaagatcaagaccttcctgttcatcagcgacgagaagagagtggtgggctgcctgatcgccgagcccatcaagcaggccttcagagtgctgagcgagcccatcggccccgagagccccagcagcaccgagtgccccagagcctggcagtgcagcgacgtgcccgagcccgccgtgtgcggcatcagcagaatctgggtgttcagactgaagagaagaaagagaatcgccagaagactggtggacaccctgagaaactgcttcatgttcggctgcttcctgagcaccgacgagatcgccttcagcgaccccacccccgacggcaagctgttcgccaccaagtactgcaacacccccaacttcctggtgtacaacttcaacagctag

SEQ ID NO: 341300 - DNA, 3922 bp, Artificial Sequence
  derived and/or modified sequence
agatttttcacctcaccagggcgcgagaatcttggaaacagccaccagggtgggcggggcaagggctggtgctccaccaatcaccgagccagcccctggaagcgctgagccgtggccaatcggaacgcagcggcttcctcctagcctggcgcgcgattatttgaagacgctcacggagcggctggctaggctgaggagagctcgccgggctctgaggcgcaggaattcaataaagaaaatggcagctcttactccaaggaagaggaagcaggattctttgaagtgtgacagccttttacacttcactgaaaatctgtttccatcacctaataaaaagcactgtttttatcaaaacagtgataaaaatgaagaaaacctgcattgctctcaacaagagcattttgttttaagtgcgctcaaaacaactgaaataaatagactgccatcagcaaatcaaggctcaccatttaaatctgcgctctccactgtatctttttacaaccaaaataagtggtacctcaatccactggagagaaagctgataaaagagagtagatctacttgtctaaaaactaatgatgaagataaatcttttcccattgtgacagaaaaaatgcaaggaaaaccagtctgctccaagaagaacaacaaaaaaccacagaagagtttaactgctaagtatcaaccaaagtatagacacatcaagcctgtatcaaggaattctagaaattccaagcaaaatcgagtgatctataagccaattgtggagaaggaaaataattgtcattcagctgaaaataattccaatgctcctcgggttctgagccaaaaaataaaaccacaagttacactccagggtggagcagcattttttgttagaaaaaaatcttctcttagaaaatcgtccctggaaaatgagccgtcactgggacgcacccaaaagagtaaatcagaagtcattgaagattctgatgtagagactgtcagtgaaaaaaaaacttttgcgacaaggcaagtgccaaagtgcttggtcctagaagagaaattgaaaattggactactgagtgcaagcagtaaaaataaagagaaattaataaaggattcatcagatgacagagtttcttcaaaggaacataaagttgataaaaatgaggctttttcttcagaggattctcttggtgagaataagacaatttctcctaagtccactgtctatccaatcttcagtgcatcttcagtcaattcaaaaagatctttaggtgaagaacagttttctgtgggatctgtcaacttcatgaaacagaccaatatccagaaaaatactaataccagagatacaagtaaaaaaacaaaagaccagctcatcatcgacgctggtcagaaacattttggggctactgtgtgcaagtcttgtggtatgatatatactgcttccaaccctgaagatgaaatgcagcatgtacagcatcaccacaggtttctggaaggaatcaaatatgtgggttggaagaaagaacgtgtagtagcagagttttgggatgggaaaatcgtgttggttctgccacatgatccaagctttgctatcaaaaaggtagaagatgtccaagaacttgttgataatgaattgggcttccagcaagttgttcctaaatgtccaaacaaaataaaaacttttctttttatatctgatgaaaagagagtagttgggtgtttaattgcagaacccatcaaacaggcatttcgtgtcctgtctgaaccaattggtccagaatccccaagctctacggaatgtcctagggcttggcaatgttcagatgtaccagaacctgcagtctgtgggataagtagaatctgggttttcagactgaagagaagaaagcgcattgcaagacgactggttgataccctcaggaattgcttcatgtttggctgttttctcagcactgatgaaatagcattttctgacccaacaccagatggcaagttatttgcaaccaagtactgcaacacccctaatttcctcgtatataattttaatagttaaagctgatttcagttataaaggagttactatctggataagttcaaagagctccttattataaaatacaaactatttaatatcaaaataaaaaataccgagactcacactcatacacacacacacacacacgcacacacacatatcacagttttgttccttatgagttgaaaagtcaggaataaatttgttgaaaattatctggggattcaaaggaaaaatctttgggtgattccctgattagcactctgaatgtttaattatgaaactttgtagctataactggaaaattacctgactctttgtaagagtattaaatacaaagtgatttttctctagaaatgtgacctggtcttttataaagcccactcttagaccaggattatctaatgccacatcagaagcaaacaggcaaatttaaacttgggcaagtaatttctgtgcccaatttgtaaagggaattcctgaatttttttttttttttaatagaggcatgggtctcactgtgttgcccaggctggtctgaaacttttgggctcaagcgatcctcccaaaacgctgggattacagtcatgagccaccgtgcccagcctaattcctgacttctctatacagagtcttcacttgataggcactcgtctgtagtaactcagtttgaatatctttagaaaatgtttagaatttatttgtaacaagatggtaaggaataagattatcccatatgcatttctgtagagcagaatttgatagcttagtgttcaatctttttgaaaataaatgtttacctgtcatcagatttaattaaaattatacttagtaattgcactattacttagttaatttttgttgtatggaaatattggtagtactactttgggaacctgttactgacaattgatgtcattaacaaaatgcctagttggattagatgttttcattttctaattttttgcttgtttaaaatgcaccttacttgttctgagatacctggcaaaagtctttacaaaatgtatggtaatagaaccaaggttagtaaatatacataggctggtggatgagagaccatggaactgtgtaaatacacttaaatgttcacacatttttctagtgtaattcttggatactttaaaaagcaaaacattgttcaaattgttttgattctgaaaaatcattcaactgctaactggcaataagactctaggcaagtcgttttccagattgtaattatatgtagaaactattcatctgcattcattttatttgcctgtaagttaacatgtttccaaaatttaaaagcctgggtccccaaaagaatgtggaagtattaaaatgtatgtaattatgcaaacattttaatgctattttctgcacttatttcttttaaatattttatttaaaatttttaattaacattttgtttgcttaatgcttttgttatgaatcaattaaaattctttattttatacaactaaatctgattttaattattttattatgaaaatagtatatgttaaataaaattcagataatacagaaatagagattgccaaaagaagaggcttcccggccgggcgcggtggctcacgcctgtaatcccagcactttgggaggccgaggcgggtggatcatgaggtcaggagatcgagaccatcctggctaacaaggtgaaaccccgtctctactaaaaatacaaaaaattagccgggcgcggtggcgggcgcctgtagtcccagctactcgggaggctgaggcaggagaatggcgtgaacccgggaggcgagcttgcagtgagccgagattgcgccactgcagtccgcagtccggcctgggcgacagagcgagactccgtctcaaaaaaaaaaaaaaaaaaaaaaaaaaaaa

SEQ ID NO: 341301 - protein, 239 aa, Artificial Sequence
  derived and/or modified sequence
MKQTNIQKNTNTRDTSKKTKDQLIIDAGQKHFGATVCKSCGMIYTASNPEDEMQHVQHHHRFLEGIKYVGWKKERVVAEFWDGKIVLVLPHDPSFAIKKVEDVQELVDNELGFQQVVPKCPNKIKTFLFISDEKRVVGCLIAEPIKQAFRVLSEPIGPESPSSTECPRAWQCSDVPEPAVCGISRIWVFRLKRRKRIARRLVDTLRNCFMFGCFLSTDEIAFSDPTPDDCRRLNRYQET

SEQ ID NO: 341302 - DNA, 720 bp, Artificial Sequence
  derived and/or modified sequence
atgaagcagacaaacatacaaaagaacacaaatactagagatacctccaagaagactaaagatcagctaatcatcgatgctggacagaaacacttcggagctacagtgtgtaagagctgcggaatgatatacacagcctctaacccggaagatgaaatgcagcacgtacagcaccaccaccgattcctcgaaggcattaagtacgtggggtggaagaaggagagagtggtggcagaattctgggacggcaaaatcgttctggtgcttcctcacgacccttctttcgctattaagaaggtagaagacgtgcaggaacttgtcgataacgaattgggtttccagcaggtggtccccaaatgcccaaataagatcaagactttcttgttcattagcgatgaaaagcgcgtggttggatgcctcatagcagagccgattaaacaggccttcagagtcttgtctgagcccatcggtcccgaaagcccctcatcaactgagtgtccacgagcttggcagtgcagcgatgtccctgaacccgcggtttgtggaataagtaggatatgggtgtttcgactgaagagacgcaagcggattgctagaaggctggtcgataccctcagaaattgttttatgtttggctgcttcttgagtacggatgagatcgcgtttagtgatcccacgcccgatgattgtagacgcttgaatagatatcaggagacgtag

SEQ ID NO: 341303 - DNA, 720 bp, Artificial Sequence
  derived and/or modified sequence
atgaagcagaccaacatccagaagaacaccaacacccgggacaccagcaagaagaccaaggaccagctgatcattgatgctggccagaagcactttggagccaccgtgtgcaagagctgtggcatgatctacacagccagcaacccagaagatgagatgcagcacgtgcagcaccaccaccgcttcctggagggcatcaagtatgtgggctggaagaaggagcgggtggtggccgagttctgggatggcaagatcgtgctggtgctgccccatgaccccagctttgccatcaagaaggtggaggatgtgcaggagctggtggacaatgagctgggcttccagcaggtggtgcccaagtgccccaacaagatcaagaccttcctgttcatcagtgatgagaagagggtggtgggctgcctgattgctgagcccatcaagcaggccttccgggtgctgtctgagcccatcggccctgagagccccagcagcacagaatgtccccgggcctggcagtgcagtgatgtgcctgagcctgctgtgtgtggcatcagccgcatctgggtgttccggctgaagaggaggaagagaattgcccggcggctggtggacaccctgaggaactgcttcatgtttggctgcttcctgagcacagatgagatcgccttcagtgaccccaccccagatgactgccggcggctgaaccgctaccaggagacctag

SEQ ID NO: 341304 - DNA, 720 bp, Artificial Sequence
  derived and/or modified sequence
atgaagcagaccaacatccagaagaacaccaacacccgggacacctccaagaaaacaaaagaccagctgatcatcgacgccggacaaaagcacttcggggccaccgtgtgtaagtcctgcggtatgatctacaccgcctctaaccccgaggatgagatgcaacacgttcagcatcaccatcgttttttagaggggataaagtacgtggggtggaaaaaggagcgcgtagtcgcggagttctgggatggtaaaatcgtgctggtcctgccccacgaccccagtttcgcaataaagaaagttgaggacgttcaggaacttgttgacaatgagttaggcttccagcaggttgtgcctaaatgtcccaataaaattaagactttcctttttatttccgatgaaaaaagagtggtgggctgcctcattgctgagcctatcaaacaagcgttcagagtcctaagtgaaccgatcggtccggagtccccttcttccaccgaatgcccgcgcgcctggcagtgctctgatgtgcctgagccagctgtgtgcggcatttcccgcatctgggtgtttcggttaaagcggagaaagagaatcgctcgccggctggtggacacattgcgtaactgcttcatgttcggttgctttctgtccaccgatgaaatcgccttttctgaccccacacccgacgactgtcgccgactcaatagataccaggagacctag

SEQ ID NO: 341305 - DNA, 720 bp, Artificial Sequence
  derived and/or modified sequence
atgaagcagacaaacatccagaaaaacacaaatactcgggatacatcaaaaaagaccaaagaccagttaatcatcgatgctggccagaagcatttcggagccaccgtgtgtaaatcgtgcgggatgatctatactgcctccaatccagaggacgagatgcagcacgttcaacatcatcacagattcctggagggaatcaagtatgttggttggaagaaagaacgcgtggttgccgagttttgggacggcaagatagtgcttgtattgccccatgacccaagcttcgctatcaagaaagtcgaagacgttcaagaactggtcgacaatgagttaggatttcagcaggtcgttcctaaatgtccaaataaaataaagaccttcctctttataagtgatgagaaacgggtcgtgggttgtctcatcgctgagccaataaaacaggcattccgtgtgcttagcgagcccatcggccctgagtcaccaagcagcaccgagtgtccacgggcatggcaatgttcggatgtcccagagcccgcagtgtgtggaatatctaggatctgggttttccgactcaaacgccgtaaacgcattgcaaggcggctggtggacacattgcggaactgcttcatgtttggatgcttcctcagtaccgatgagatagcatttagtgatcccactccagatgattgtcgtagactgaaccggtaccaggaaacttag

SEQ ID NO: 341306 - DNA, 720 bp, Artificial Sequence
  derived and/or modified sequence
atgaagcagaccaacatccagaagaacaccaacaccagagacaccagcaagaagaccaaggaccagctgatcatcgacgccggccagaagcacttcggcgccaccgtgtgcaagagctgcggcatgatctacaccgccagcaaccccgaggacgagatgcagcacgtgcagcaccaccacagattcctggagggcatcaagtacgtgggctggaagaaggagagagtggtggccgagttctgggacggcaagatcgtgctggtgctgccccacgaccccagcttcgccatcaagaaggtggaggacgtgcaggagctggtggacaacgagctgggcttccagcaggtggtgcccaagtgccccaacaagatcaagaccttcctgttcatcagcgacgagaagagagtggtgggctgcctgatcgccgagcccatcaagcaggccttcagagtgctgagcgagcccatcggccccgagagccccagcagcaccgagtgccccagagcctggcagtgcagcgacgtgcccgagcccgccgtgtgcggcatcagcagaatctgggtgttcagactgaagagaagaaagagaatcgccagaagactggtggacaccctgagaaactgcttcatgttcggctgcttcctgagcaccgacgagatcgccttcagcgaccccacccccgacgactgcagaagactgaacagataccaggagacctag

SEQ ID NO: 341307 - DNA, 2487 bp, Artificial Sequence
  derived and/or modified sequence
gctcacggagcggctggctaggctgaggagagctcgccgggctctgaggcgcaggaattcaataaagaaaatggcagctcttactccaaggaagaggaagcaggattctttgaagtgtgacagccttttacacttcactgaaaatctgtttccatcacctaataaaaagcactgtttttatcaaaacagtgataaaaatgaagaaaacctgcattgctctcaacaagagcattttgttttaagtgcgctcaaaacaactgaaataaatagactgccatcagcaaatcaaggctcaccatttaaatctgcgctctccactgtatctttttacaaccaaaataagtggtacctcaatccactggagagaaagctgataaaagagagtagatctacttgtctaaaaactaatgatgaagataaatcttttcccattgtgacagaaaaaatgcaaggaaaaccagtctgctccaagaagaacaacaaaaaaccacagaagagtttaactgctaagtatcaaccaaagtatagacacatcaagcctgtatcaaggaattctagaaattccaagcaaaatcgagtgatctataagccaattgtggagaaggaaaataattgtcattcagctgaaaataattccaatgctcctcgggttctgagccaaaaaataaaaccacaagttacactccagggtggagcagcattttttgttagaaaaaaatcttctcttagaaaatcgtccctggaaaatgagccgtcactgggacgcacccaaaagagtaaatcagaagtcattgaagattctgatgtagagactgtcagtgaaaaaaaaacttttgcgacaaggcaagtgccaaagtgcttggtcctagaagagaaattgaaaattggactactgagtgcaagcagtaaaaataaagagaaattaataaagatctttaggtgaagaacagttttctgtgggatctgtcaacttcatgaaacagaccaatatccagaaaaatactaataccagagatacaagtaaaaaaacaaaagaccagctcatcatcgacgctggtcagaaacattttggggctactgtgtgcaagtcttgtggtatgatatatactgcttccaaccctgaagatgaaatgcagcatgtacagcatcaccacaggtttctggaaggaatcaaatatgtgggttggaagaaagaacgtgtagtagcagagttttgggatgggaaaatcgtgttggttctgccacatgatccaagctttgctatcaaaaaggtagaagatgtccaagaacttgttgataatgaattgggcttccagcaagttgttcctaaatgtccaaacaaaataaaaacttttctttttatatctgatgaaaagagagtagttgggtgtttaattgcagaacccatcaaacaggcatttcgtgtcctgtctgaaccaattggtccagaatccccaagctctacggaatgtcctagggcttggcaatgttcagatgtaccagaacctgcagtctgtgggataagtagaatctgggttttcagactgaagagaagaaagcgcattgcaagacgactggttgataccctcaggaattgcttcatgtttggctgttttctcagcactgatgaaatagcattttctgacccaacaccagatgattgtagaagattaaataggtaccaggagacatgaaagaatcatcttcaacatttctcaagtagctgctgattatctccttttatggaggcataacaagctcctggaggcttctacagattctaaagggaaagatttcctgggaggttggtaaatattcaagaagctggtcagttggcagctgttttatagattccttgggattttctacctaaacaacatatcaactgcaaacggggacagtttcgtctcctttccaattttgccttctccattttcttgccttattttagtggctagggctataggactgctaaataaaactggcaagagcaggcatcctggtcttgttccctacttcagtatgatacctgcaggtttttcttgtagacagcctttttcaagctaagatcccttctatttctagttagctgagaggttaactagattttaaactaacttttaaatcaagaatggatgttggattttgtcaaacactttttcggtatctattgagatatgtagttttcaaatttgattaaagacttaaatgttggacctaaaaccataaaaaccctagaagaaaacctaggcaataccattcaggacataggcatgggcaacgacttcatgattaaaacaccaaaagcaatggcagcaaaagccaaaacagacaaatgggatctaattaaagagcttctgcacagcaaaagaaagtaccatcaaagtgaacaggcaacctacagaatgggagaacatttttgcaatcgacctatctgacaaagggctaatatccagaatctacaaagaactcaaacaaatttacaag

SEQ ID NO: 341308 - protein, 303 aa, Artificial Sequence
  derived and/or modified sequence
MGRKVHSNGSQFAEHSRSPRRTGRDCKPVRAPSMALGVSQLAGRSRCLCSESQGGYERFSSEYPEFCSKTKALAAIPPPVPPSATEPLDLGCSSCGTPLHDQGGPVEILPFLYLGSAYHAARRDMLDALGITALLNVSSDCPNHFEGHYQYKCIPVEDNHKADISSWFMEAIEYIDAVKDCRGRVLVHCQAGISRSATICLAYLMMKKRVRLEEAFEFVKQRRSIISPNFSFMGQLLQFESQVLATSCAAEAASPSGPLRERGKTPATPTSQFVFSFPVSVGVHSAPSSLPYLHSPITTSPSC

SEQ ID NO: 341309 - DNA, 912 bp, Artificial Sequence
  derived and/or modified sequence
atgggcaggaaggtgcactctaacggttcgcagttcgccgaacattcacggagtccccggcggaccggccgagactgtaaaccagtgcgggcccccagtatggccttgggggtgagtcaactcgctggaagatcccggtgcctttgctcagagtcccaaggcggatatgaaaggttctccagcgagtacccagagttttgcagcaagacaaaggctctagccgccataccccccccggttccgccatccgctacagaaccactcgacctcggatgtagctcttgcgggactccactccacgatcaggggggaccagtggagattttgccctttctctacctgggcagcgcgtaccatgccgcgagacgcgatatgctggatgcccttggaatcaccgcactgctgaacgtttcaagcgactgccctaaccatttcgaaggtcattaccaatacaagtgtatccctgtggaggataaccacaaggccgacatttcctcttggtttatggaagctattgagtatatagacgcagtaaaagattgccgtggccgcgttcttgtccattgccaggcgggcataagccggagcgccaccatctgtctagcatacttgatgatgaagaagagagtaaggctcgaagaagcgtttgagttcgtcaaacagagacggtctatcatttcacccaattttagtttcatgggtcagctactgcagtttgaatcacaggtgctagctacaagctgcgccgctgaagcagccagcccatcgggtcccctgagagagcggggaaaaacacccgcgacacccacgtcgcagtttgtcttttccttccccgtgtccgtaggcgtgcatagcgcaccctcatctctcccatacctgcattccccaattaccacaagtccaagctgctag

SEQ ID NO: 341310 - DNA, 912 bp, Artificial Sequence
  derived and/or modified sequence
atgggcaggaaggtgcacagcaatggcagccagtttgctgagcacagccgcagccccaggagaacaggccgggactgcaagcctgtgcgggcccccagcatggccctgggcgtgtcccagctggccggccgcagccgctgcctgtgcagcgagagccagggcggctatgagcgcttcagcagcgagtacccagagttctgcagcaagaccaaggccctggccgccatccccccacctgtgcccccatctgccacagagcccctggacctgggctgcagcagctgtggcacccccctgcatgaccagggcggccctgtggagatcctgcccttcctgtacctgggcagcgcctaccacgccgcccggcgggacatgctggatgccctgggcatcacagccctgctgaatgtgtccagtgactgccccaaccactttgagggccactaccagtacaagtgcatccctgtggaggacaaccacaaggctgacatcagctcctggttcatggaggccatcgagtacattgatgctgtgaaggactgccggggccgggtgctggtgcactgccaggccggcatcagccgcagcgccaccatctgcctggcctacctgatgatgaagaagagggtgcggctggaggaggcctttgaatttgtgaagcagaggaggagcatcatcagccccaacttctccttcatgggccagctgctgcagtttgagagccaggtgctggccaccagctgtgccgctgaggccgccagccccagcggccccctgcgggagcggggcaagaccccagccacccccaccagccagtttgtgttctccttccctgtgtctgtgggcgtgcacagcgcccccagcagcctgccctacctgcacagccccatcaccaccagccccagctgctag

SEQ ID NO: 341311 - DNA, 912 bp, Artificial Sequence
  derived and/or modified sequence
atgggccggaaggtgcacagcaacggcagccagttcgccgagcacagcaggagtcctaggcgtacaggccgcgattgcaaacccgtgagggcccccagcatggctttaggcgtaagccagcttgctggaagatccaggtgcttgtgctcggagagtcaaggaggctacgagagattctcctcggagtatccggagttttgttcaaagaccaaagctctcgctgctatcccgccccccgtgcctccatctgctactgagcctttagacttgggttgttcttcatgtgggacgccattacatgaccagggcggtcctgtcgagattctgccattcctctacctgggcagcgcctatcacgctgcccgacgggacatgctggacgccttgggcataaccgcccttctgaacgtctcatcagactgccccaatcactttgagggtcattaccagtacaaatgcatccccgttgaggataatcataaagctgatatttcatcctggttcatggaggcaatcgagtacatagatgccgtgaaggattgccggggcagggttctggtgcactgtcaagctgggatttcgcgctctgcaactatctgcttagcatacctcatgatgaagaagagggtccgccttgaagaggcatttgagttcgtcaagcagagaagatccattatttcaccaaacttcagtttcatgggacagctcttgcagttcgaatcacaggtgctggcaaccagctgcgccgctgaagccgcttcgccttcgggccccctgagggaacgagggaagactccggctaccccgactagtcagtttgtcttttcgtttccagtgtccgttggagtgcacagtgctcctagttcccttccctacctgcacagtcccattactacgagtccgtcttgttag

SEQ ID NO: 341312 - DNA, 912 bp, Artificial Sequence
  derived and/or modified sequence
atggggagaaaggtacatagcaatggttctcagtttgcggaacattcacgcagtcctcggcgaacagggagggattgcaagcccgtaagagctccttccatggcattaggtgtttctcaactagccggtaggtctcggtgcctctgcagcgagagccagggcggttacgagagattctcatccgaataccccgagttctgctcgaagactaaggccctcgcagcgattcctcccccagtcccgcctagtgcgacggaaccactagatttaggctgcagcagctgcggaacgccgctgcatgatcaaggtggcccagttgagatccttccgttcctgtatttaggctctgcctatcatgctgccaggcgcgacatgctggacgcattaggtatcacggcattgctgaacgtaagtagcgactgccccaatcactttgaaggccactaccagtataagtgcatccctgtggaagataaccataaagctgatatctcctcatggttcatggaggcaatcgaatatatcgatgcagtcaaagattgtagggggcgagtcctagtacactgtcaggccggtatttcgaggtccgccactatctgccttgcctatcttatgatgaaaaaacgggtgcgcttagaggaagcttttgagttcgtgaagcagcggagaagcatcatttccccaaacttctcctttatgggccagctgcttcagttcgaatcccaagtgttggccacttcttgtgccgctgaggcggcttcgcctagtgggcctctccgagagagagggaagaccccggctaccccaacttctcagttcgtttttagcttcccagtatcagtaggagtccattcagctcccagctctttgccgtaccttcatagccccatcaccacttctcctagctgctag

SEQ ID NO: 341313 - DNA, 912 bp, Artificial Sequence
  derived and/or modified sequence
atgggcagaaaggtgcacagcaacggcagccagttcgccgagcacagcagaagccccagaagaaccggcagagactgcaagcccgtgagagcccccagcatggccctgggcgtgagccagctggccggcagaagcagatgcctgtgcagcgagagccagggcggctacgagagattcagcagcgagtaccccgagttctgcagcaagaccaaggccctggccgccatccccccccccgtgccccccagcgccaccgagcccctggacctgggctgcagcagctgcggcacccccctgcacgaccagggcggccccgtggagatcctgcccttcctgtacctgggcagcgcctaccacgccgccagaagagacatgctggacgccctgggcatcaccgccctgctgaacgtgagcagcgactgccccaaccacttcgagggccactaccagtacaagtgcatccccgtggaggacaaccacaaggccgacatcagcagctggttcatggaggccatcgagtacatcgacgccgtgaaggactgcagaggcagagtgctggtgcactgccaggccggcatcagcagaagcgccaccatctgcctggcctacctgatgatgaagaagagagtgagactggaggaggccttcgagttcgtgaagcagagaagaagcatcatcagccccaacttcagcttcatgggccagctgctgcagttcgagagccaggtgctggccaccagctgcgccgccgaggccgccagccccagcggccccctgagagagagaggcaagacccccgccacccccaccagccagttcgtgttcagcttccccgtgagcgtgggcgtgcacagcgcccccagcagcctgccctacctgcacagccccatcaccaccagccccagctgctag

SEQ ID NO: 341314 - DNA, 2959 bp, Artificial Sequence
  derived and/or modified sequence
gcagttcagacccccccacacccatcaaagagccgctcctcccccccgcaggcgccttcgccgcctccctcccttcctttcctttccgctcctcttccgacctgtccacccgggaggaagggagctggaaagggggcggaaacctctcccctccaaaaagcacaacaaaactgttcagtgcggaggagccgggttcgcccctgccggacagcggggggctttgttccccgcagttgtttcctgcccatttgacctgtcagctgctggggaaacgctgctgttgacctttggttgaactgctaaggcgattttgctgatttttctttctttttccgcgagggctgtcttttgctcctccaaatgagcccagtccccctcccttctccccaaagcgctccaagagaaagtgccaggaaggggcttgtcccggaaggcctggcggctgagcggggccaggtcctggttaggccaccagggtgggcgtccgcgccattgtttgagcttgtcggcgctggtgggagagatgagggcaattcctctgggacgcaagtcccctcgaatggccggggctggccgggatgttccccgcacggcgctgccctcgagtccccccgatggagagcgcgggcgcgccttccttcgctggcgtccaaacccgggaccagctagaacacagcagggctgggactgggttccagccccacgtggagtctggatttgttttgttgtgttttgctttccttcctggaagaaatcccgaggggaccgccctagagcggcagctccaggacctcggcccttgggcttccgggggtgcagccacttaggccccgctcccggggagagagggattattttttaagatttatccccagggcgcgcggcatttccctgtccctcgtgaatcccgttgagagtcctccctccccaacctcctccatttccccagccagaccgattcgagagccctggagattctgggcgaggctagtgactgggtagtacaggcctctagccccaccattgctctctctgtcttcagttccccaggagggcaatggcatcaaacagcacagctctgggggatgtcaatattgcataccttttctacctaaagggaaaatgactcgcttttctgcttgcaaatatggtagtttctgcttacaaatgtaatacaatgcccatgacagccaaggactggaagcataagttgctaggtcttacaggtgattttttacaatgaagcaaactcactatgttagacaccatttacattggatgtctccaactaacaaaagtaactaaagacagatgtaggtgtaaattgagagtgaaatttgaccctttagaccgtcacaacttccttgggcttatcctgggtgcttataggagaggtgggctccacccacaaaaatggactgctcagaaaaatgagggagagagaaagggtggccactttcccgagccaagaaattccttgaaaaaaaatcagaacatctgaaaccagagagccgatttccttaccgggaggcagttcctggctaacgaagaggaagcacgatgggaagaaaagttcactccaacggaagccagtttgctgaacatagcagatcgcccaggaggactgggagagactgcaaaccagttcgagcccccagcatggcgttaggtgtcagccagctggcaggaaggtccaggtgtctgtgttcagagtctcaaggcggctatgagaggttttcctccgagtacccagaattctgttctaaaaccaaggccctggcagccatcccacccccggttccccccagtgccacagagcccttggacctgggctgcagctcctgtgggaccccactacacgaccaggggggtcctgtggagatccttcccttcctctacctcggcagtgcctaccatgctgcccggagagacatgctggacgccctgggcatcacggctctgttgaatgtctcctcggactgcccaaaccactttgaaggacactatcagtacaagtgcatcccagtggaagataaccacaaggccgacatcagctcctggttcatggaagccatagagtacatcgatgccgtgaaggactgccgtgggcgcgtgctggtgcactgccaggcgggcatctcgcggtcggccaccatctgcctggcctacctgatgatgaagaaacgggtgaggctggaggaggccttcgagttcgttaagcagcgccgcagcatcatctcgcccaacttcagcttcatggggcagctgctgcagttcgagtcccaggtgctggccacgtcctgtgctgcggaggctgctagcccctcgggacccctgcgggagcggggcaagacccccgccacccccacctcgcagttcgtcttcagctttccggtctccgtgggcgtgcactcggcccccagcagcctgccctacctgcacagccccatcaccacctctcccagctgttagagccgccctgggggccccagaaccagagctggctcccagcaagggtaggacgggccgcatgcgggcagaaagttgggactgagcagctgggagcaggcgaccgagctccttccccatcatttctccttggccaacgacgaggccagccagaatggcaataaggactccgaatacataataaaagcaaacagaacactccaacttagagcaataacggctgccgcagcagccagggaagaccttggtttggtttatgtgtcagtttcacttttccgatagaaatttcttacctcatttttttaagcagtaaggcttgaagtgatgaaacccacagatcctagcaaatgtgcccaaccagctttactaaagggggaggaagggagggcaaagggatgagaagacaagtttcccagaagtgcctggttctgtgtacttgtccctttgttgtcgttgttgtagttaaaggaatttcattttttaaaagaaa

SEQ ID NO: 341315 - DNA, 1553 bp, Artificial Sequence
  derived and/or modified sequence
ctcttcccgggaggagcccggcgtctttttcacccgcgctctccccccttactccctcagcctcccacccgggatggagccatgtgcggcgtggagtccccgcggtgggagagagaatgtaatggacatcggtctgaccaacgagaagcccaacccggaactctcttactccggctccttccagccagcccccggcaacaagaccgtgacctacttgggaaagttcgccttcgactccccttccaactggtgccaggacaacatcattagcctcatgagcgccggcatcttgggggtgcccccggcttcaggggcgctcagcacgcagacgtccacggccagcatggtgcagccaccgcagggtgacgtggaggccatgtatcccgcgctacccccctactccaactgcggcgacctctactcagagcccgtgtctttccacgacccccagggcaatcccgggctcgcctattccccccaggattaccaatcggccaagccggcgttggacagcaatctcttccccatgattcctgactacaacctctaccaccaccccaacgacatgggctccattccggagcacaagcccttccagggcatggaccccatccgggtcaacccgccccctattacccctctggagaccatcaaggcattcaaagacaagcagatccacccgggctttggcagcctgccccagccgccgctcaccctcaagcccatccggccccgcaagtaccccaaccggcctagcaagacaccgctccacgaacggccccacgcgtgcccggccgagggctgcgaccgccgtttcagccgttcggacgagctgacccggcacctgcgcatccacacgggccacaagcccttccagtgccggatctgcatgcggagcttcagccgcagcgaccacctcaccactcacatccgcactcatacgggcgagaagccctttgcctgcgagttctgcgggcgcaagtttgcgcgcagcgacgagcgcaagcgccacgccaagatccacctcaagcaaaaggagaagaaggcggagaagggcggtgcaccctctgcatcctcggcgccccccgtgtcgctggcccccgtggtcaccacctgcgcctgaggatcgggcccccagatccccacttttcccctccagtgcctcccggctgctagcctgaaagcagcgggaaagccagccacggaggcgtaggggccgcgccctggcctctccatggacgtgcggccccttgcttccccttcgatgcccccggttcccaacctttcacgccggccagcggtcaggggccagggctggaggcgccttcccctcgcggtcccccacttagccaaggcgtgggggcggaaaggtggcgtctagcccgctttgttcagttcggatcgccttgatccaggggccgccgggccgcgccaaggacctgcaagggactgaaggcggagcccatccaaccctcgcccgacccaaacacctcattgtttcccccacgtctccctctataccccctcgaagactcgagagggggagggggtaa

SEQ ID NO: 341316 - DNA, 1626 bp, Artificial Sequence
  derived and/or modified sequence
atgatttacgagccacacttcacttactcattgctggaacatgtggagttgcctaggtctcgcgagcggtcgttgtctccaaaatccacgagcccaccccctagccctgaagtctgggctgactctaggtcaccaggaataatctctcaggcttctgcccctagaacaactggaacgcctcggacttctctgccccacttccaccaccccgaaacaagccgtcctgattccaacatatacaaaaagccgcccatttacaagcagcgggagagtgtcggagggtcaccccagacaaagcacctgatcgaggacttgattattgagagcagcaaattccccgcagcgcaaccaccggatccaaaccagcctgctaaaattgaaaccgactactggccctgtcccccttcactagcagtcgtggagacagagtggagaaagcgtaaagcctccagacgaggcgcggaggaagaagaggaggaggaggacgacgactccggcgaggaaatgaaggccctcagggagcggcagcgagaggagttaagcaaagtgacatctaaccttgggaagatgattcttaaagaggaaatggagaaaagtctgccaatcaggagaaaaacccgatccctccccgataggacaccttttcatacgtccttgcatcaaggaacttccaaatcctcctctcttcctgcttacggccgaaccactcttagtcggttgcagtccacggaatttagtccatccggatcagaaactggaagtccaggcctgcaaaacggcgagggccagaggggtaggatggacagaggtaatagtctgccatgtgtgctggagcagaaaatttacccgtacgagatgcttgttgtcactaacaagggtagaaccaaattgccacccggagtcgacaggatgaggctggagaggcatctaagcgccgaggatttctccagagttttcgcaatgtctcctgaggagttcgggaagctggccctttggaagcgcaacgagctcaaaaagaaggcttctctgtttggggcactggtggtgcggccggtgggttgtctagaacagctcgaggggcgctgccgaggtggaaaacgacccgggcggaagagttctagactgctctgccgtccaccatctccccccattcttaccccagacagctttcctgctcttcagccccctgccccccttacgctagttggaaccggcccgagcagtgcttccggaagggaggtcactccaccacttcagctggctctgacaagtgctcgaaagccccgcgcctctaagccctttgcacccgctctcaggctgccacagaagccaggactgcgagttgaaatgcccccgactcacgatcctggacccccgccagctagcagacctaggaatggcaatagctcgaccaaacctggtacaggccagaaacttggcctgccgccaccactggatggagtaaaacggcccgggctggcccatttcggcgttagctggttacccgccctgacttatacacacgcaccccctcacaccctctgctcactgaaaaacgtcatatactggggccccccgtcctgctttccccacctccccttaccttacctcacccctccagcatag

SEQ ID NO: 341317 - DNA, 1626 bp, Artificial Sequence
  derived and/or modified sequence
atgatctatgagccccacttcacctacagcctgctggagcacgtggagctgcccaggagccgggagaggagcctgagccccaagagcaccagccccccacccagccctgaggtgtgggccgacagccgcagccctggcatcatcagccaggccagcgcccccaggaccaccggcacccccaggaccagcctgccccacttccaccaccctgagaccagcaggccagacagcaacatctacaagaagccacccatctacaagcagcgggagagcgtgggcggcagcccccagaccaagcacctgattgaagatctcatcatcgagagcagcaagtttcctgctgcccagcccccagaccccaaccagcctgccaagattgaaacagactactggccctgcccccccagcctggccgtggtggagacagagtggaggaagaggaaggccagcagaagaggagctgaggaggaggaggaggaggaggatgatgattctggagaggagatgaaggccctgcgggagcggcagcgggaggagctgagcaaggtgaccagcaacctgggcaagatgatcctgaaggaggagatggagaagagcctgcccatccggaggaagaccaggagcctgcctgacaggacccccttccacaccagcctgcaccagggcaccagcaagagcagcagcctgcctgcctacggccgcaccaccctgagccggctgcagagcacagagttcagccccagcggcagcgagaccggcagccctggcctgcagaatggagagggccagaggggccgcatggaccggggcaacagcctgccctgtgtgctggagcagaagatctacccctatgagatgctggtggtgaccaacaagggccgcaccaagctgcccccaggagtggacaggatgaggctggagcggcacctgtctgctgaggacttcagccgggtgtttgccatgagccctgaggagtttgggaagctggccctgtggaagagaaatgagctgaagaagaaggccagcctgtttggagccctggtggtgcggcctgtgggctgcctggagcagctggagggccgctgccggggcggcaagaggcctggcaggaagagcagccggctgctgtgcaggcctcccagcccccccatcctgaccccagacagcttccctgccctgcagcccccagcccccctgaccctggtgggcaccggccccagcagcgccagcggccgggaggtgaccccacccctgcagctggccctgaccagcgccaggaagccccgggccagcaagccctttgccccagccctgcggctgccccagaagccaggcctgcgggtggagatgccacccacccatgaccccggccccccaccagccagccggcccagaaatggaaacagcagcaccaagccaggcaccggccagaagctgggcctgcccccacccctggatggagtgaagaggcctggcctggcccactttggagtgtcctggctgcctgccctgacctacacccacgccccaccccacaccctgtgcagcctgaagaatgtcatctactggggcccccccagctgcttcccccacctgcccctgccctacctgaccccaccagcctag

SEQ ID NO: 341318 - DNA, 1626 bp, Artificial Sequence
  derived and/or modified sequence
atgatctacgagccccacttcacctacagcctgctggagcacgtggagttaccacgctcccgcgagcggtccttatctcctaaaagcacgtccccaccacctagtccagaggtttgggctgattctcgttctcctggaattatcagccaggcgtccgcgccgcgtaccactggcacgcctcgcacctctctgcctcactttcaccatccagagacgagtcgtcccgactcgaatatctacaagaaacctcccatatataagcaacgagagagcgtgggtggctccccccaaacaaagcatctcattgaggacctaataatagaatctagtaaatttcctgccgcccagccaccagatcctaaccagccagctaaaatcgagacagactactggccttgtccaccttcactcgccgttgtcgaaacagaatggaggaagcgcaaggctagtagacggggggctgaagaagaggaggaggaagaagacgatgactcaggcgaagaaatgaaggctcttcgtgagcgacaacgagaagagctttccaaagtgaccagtaatctgggcaagatgatcctcaaggaggaaatggaaaagtcactgcccatccgaaggaagacacgctcccttccagatcgcacacctttccacaccagcctacatcaaggaacatccaagagtagctccctgcccgcctatggccggacaacactgtcacgcttgcagtccactgaattcagccctagcggctcagagaccgggagccccggcttacagaacggggaagggcaacgcgggcgtatggacagaggaaatagcctcccttgtgtgctcgaacaaaaaatctacccctatgaaatgttggttgtgactaataagggccggacaaaactgccacctggagtggacaggatgaggctggagcgacacctgtctgctgaggatttttcgagagtgtttgcaatgtccccagaggaattcggaaaattggcactgtggaagaggaacgaattgaaaaaaaaggccagcctatttggggccctggttgtaagaccagttggatgtctggaacagctggaaggcaggtgcagaggagggaaaagacccggccgaaaaagctcccggctgttgtgtaggcccccgtccccacctattctcacccccgactcatttccagcacttcagccccctgcccctctgacattagtcggaactggtcctagctctgcgagcggccgagaggtgaccccaccgctgcagctggccttgacttcagccagaaaacctagggcatctaagcctttcgcccccgccctgagattgccccagaaacccggcctgcgtgtggagatgccgccgacccatgaccctggcccaccacccgccagccggcccagaaacggcaacagttctaccaaaccaggaactggtcagaagctgggtctcccgccgccccttgacggcgtgaaaaggccaggtctggcccatttcggggtttcttggctccccgctctaacatacacacacgcgccccctcacactctgtgtagcttaaagaacgtgatctattggggcccaccaagctgcttcccacatctccctttaccataccttaccccacccgcttag

SEQ ID NO: 341319 - DNA, 1626 bp, Artificial Sequence
  derived and/or modified sequence
atgatctacgagccacattttacctactccttgcttgagcacgtggagctgcccagatctcgcgagaggtcactgtcgcccaagagtacatcacctccaccaagtcccgaggtgtgggccgatagtcggagcccgggtataatcagtcaggcgtccgcacccaggactaccggaacgcccagaacttctctgccccactttcaccatcccgaaaccagcagaccagacagcaacatttacaaaaagcccccaatttacaaacagcgggaatcggtaggaggaagcccccagacaaaacacttgattgaggatttaattattgagagcagcaaatttcccgcagcccagccccctgatcccaaccagccagccaaaatcgagaccgattactggccttgccctccctctctcgccgttgtagaaaccgagtggcgcaagagaaaggctagccgcagaggcgcagaagaggaggaagaggaggaagacgatgattccggcgaagaaatgaaggcattaagagagcgacaacgggaagaactgtcaaaggtcacctccaacttggggaagatgatactaaaagaagagatggagaagagcctcccaataagacgcaagacgaggtctctaccagataggacacctttccacacgagtctacatcagggaactagcaagtcttctagtctgcccgcatacggtcgcactaccctgtccagactccaaagcacagagttttcaccgtccgggtccgaaactggatcccctggtcttcagaatggtgagggccagcgagggaggatggatcgcggaaatagcctgccctgcgtgctggagcagaagatctacccctacgaaatgctcgtagtcaccaacaaaggccgaaccaaactgccccctggggtggatcggatgcgtcttgagcggcacctctcagctgaggacttcagtcgggtatttgccatgagtcctgaagaattcggaaaactcgccctgtggaaacgtaatgagctgaaaaagaaagctagcctgtttggtgccttagtggtgcggcctgtgggatgtttggaacagctggaaggtcggtgccggggaggaaaacgaccaggaaggaagtcaagtcgcttgctttgccgacctcccagccctccaatcttaaccccagactcattccccgctctgcagcctcctgcacctctgaccctggtggggacaggacccagtagcgcaagcggtcgggaggtgactccccctctgcagttggcgcttacgtctgcccgtaaaccaagagccagcaaaccttttgcacctgcattgcggctgcctcagaagcctggactgcgcgtggagatgccaccaacgcacgacccagggcctcctcctgccagcaggccccgaaatggcaatagctctaccaaacctgggaccggtcagaagctgggtcttcccccacctctggacggtgtcaagagacccggactcgcacactttggtgtgtcttggctgcccgcactcacttacacccatgctccccctcatacactttgtagcctaaagaatgtaatatactggggcccaccttcgtgcttcccacacctaccactaccttacctcacacctcctgcttag

SEQ ID NO: 341320 - DNA, 1626 bp, Artificial Sequence
  derived and/or modified sequence
atgatctacgagccccacttcacctacagcctgctggagcacgtggagctgcccagaagcagagagagaagcctgagccccaagagcaccagccccccccccagccccgaggtgtgggccgacagcagaagccccggcatcatcagccaggccagcgcccccagaaccaccggcacccccagaaccagcctgccccacttccaccaccccgagaccagcagacccgacagcaacatctacaagaagccccccatctacaagcagagagagagcgtgggcggcagcccccagaccaagcacctgatcgaggacctgatcatcgagagcagcaagttccccgccgcccagccccccgaccccaaccagcccgccaagatcgagaccgactactggccctgcccccccagcctggccgtggtggagaccgagtggagaaagagaaaggccagcagaagaggcgccgaggaggaggaggaggaggaggacgacgacagcggcgaggagatgaaggccctgagagagagacagagagaggagctgagcaaggtgaccagcaacctgggcaagatgatcctgaaggaggagatggagaagagcctgcccatcagaagaaagaccagaagcctgcccgacagaacccccttccacaccagcctgcaccagggcaccagcaagagcagcagcctgcccgcctacggcagaaccaccctgagcagactgcagagcaccgagttcagccccagcggcagcgagaccggcagccccggcctgcagaacggcgagggccagagaggcagaatggacagaggcaacagcctgccctgcgtgctggagcagaagatctacccctacgagatgctggtggtgaccaacaagggcagaaccaagctgccccccggcgtggacagaatgagactggagagacacctgagcgccgaggacttcagcagagtgttcgccatgagccccgaggagttcggcaagctggccctgtggaagagaaacgagctgaagaagaaggccagcctgttcggcgccctggtggtgagacccgtgggctgcctggagcagctggagggcagatgcagaggcggcaagagacccggcagaaagagcagcagactgctgtgcagaccccccagcccccccatcctgacccccgacagcttccccgccctgcagccccccgcccccctgaccctggtgggcaccggccccagcagcgccagcggcagagaggtgaccccccccctgcagctggccctgaccagcgccagaaagcccagagccagcaagcccttcgcccccgccctgagactgccccagaagcccggcctgagagtggagatgccccccacccacgaccccggccccccccccgccagcagacccagaaacggcaacagcagcaccaagcccggcaccggccagaagctgggcctgcccccccccctggacggcgtgaagagacccggcctggcccacttcggcgtgagctggctgcccgccctgacctacacccacgcccccccccacaccctgtgcagcctgaagaacgtgatctactggggcccccccagctgcttcccccacctgcccctgccctacctgaccccccccgcctag

SEQ ID NO: 341321 - protein, 1009 aa, Artificial Sequence
  derived and/or modified sequence
MSGVSEPLSRVKLGTLRRPEGPAEPMVVVPVDVEKEDVRILKVCFYSNSFNPGKNFKLVKCTVQTEIREIITSILLSGRIGPNIRLAECYGLRLKHMKSDEIHWLHPQMTVGEVQDKYECLHVEAEWRYDLQIRYLPEDFMESLKEDRTTLLYFYQQLRNDYMQRYASKVSEGMALQLGCLELRRFFKDMPHNALDKKSNFELLEKEVGLDLFFPKQMQENLKPKQFRKMIQQTFQQYASLREEECVMKFFNTLAGFANIDQETYRCELIQGWNITVDLVIGPKGIRQLTSQDAKPTCLAEFKQIRSIRCLPLEEGQAVLQLGIEGAPQALSIKTSSLAEAENMADLIDGYCRLQGEHQGSLIIHPRKDGEKRNSLPQIPMLNLEARRSHLSESCSIESDIYAEIPDETLRRPGGPQYGIAREDVVLNRILGEGFFGEVYEGVYTNHKGEKINVAVKTCKKDCTLDNKEKFMSEAVIMKNLDHPHIVKLIGIIEEEPTWIIMELYPYGELGHYLERNKNSLKVLTLVLYSLQICKAMAYLESINCVHRDIAVRNILVASPECVKLGDFGLSRYIEDEDYYKASVTRLPIKWMSPESINFRRFTTASDVWMFAVCMWEILSFGKQPFFWLENKDVIGVLEKGDRLPKPDLCPPVLYTLMTRCWDYDPSDRPRFTELVCSLSDVYQMEKDIAMEQERNARYRTPKILEPTAFQEPPPKPSRPKYRPPPQTNLLAPKLQFQVPEGLCASSPTLTSPMEYPSPVNSLHTPPLHRHNVFKRHSMREEDFIQPSSREEAQQLWEAEKVKMRQILDKQQKQMVEDYQWLRQEEKSLDPMVYMNDKSPLTPEKEVGYLEFTGPPQKPPRLGAQSIQPTANLDRTDDLVYLNVMELVRAVLELKNELCQLPPEGYVVVVKNVGLTLRKLIGSVDDLLPSLPSSSRTEIEGTQKLLNKDLAELINKMRLAQQNAVTSLSEECKRQMLTASHTLAVDAKNLLDAVDQAKVLANLAHPPAE

SEQ ID NO: 341322 - DNA, 3030 bp, Artificial Sequence
  derived and/or modified sequence
atgagcggcgtgagcgagcccctgagcagagtgaagctgggcaccctgagaagacccgagggccccgccgagcccatggtggtggtgcccgtggacgtggagaaggaggacgtgagaatcctgaaggtgtgcttctacagcaacagcttcaaccccggcaagaacttcaagctggtgaagtgcaccgtgcagaccgagatcagagagatcatcaccagcatcctgctgagcggcagaatcggccccaacatcagactggccgagtgctacggcctgagactgaagcacatgaagagcgacgagatccactggctgcacccccagatgaccgtgggcgaggtgcaggacaagtacgagtgcctgcacgtggaggccgagtggagatacgacctgcagatcagatacctgcccgaggacttcatggagagcctgaaggaggacagaaccaccctgctgtacttctaccagcagctgagaaacgactacatgcagagatacgccagcaaggtgagcgagggcatggccctgcagctgggctgcctggagctgagaagattcttcaaggacatgccccacaacgccctggacaagaagagcaacttcgagctgctggagaaggaggtgggcctggacctgttcttccccaagcagatgcaggagaacctgaagcccaagcagttcagaaagatgatccagcagaccttccagcagtacgccagcctgagagaggaggagtgcgtgatgaagttcttcaacaccctggccggcttcgccaacatcgaccaggagacctacagatgcgagctgatccagggctggaacatcaccgtggacctggtgatcggccccaagggcatcagacagctgaccagccaggacgccaagcccacctgcctggccgagttcaagcagatcagaagcatcagatgcctgcccctggaggagggccaggccgtgctgcagctgggcatcgagggcgccccccaggccctgagcatcaagaccagcagcctggccgaggccgagaacatggccgacctgatcgacggctactgcagactgcagggcgagcaccagggcagcctgatcatccaccccagaaaggacggcgagaagagaaacagcctgccccagatccccatgctgaacctggaggccagaagaagccacctgagcgagagctgcagcatcgagagcgacatctacgccgagatccccgacgagaccctgagaagacccggcggcccccagtacggcatcgccagagaggacgtggtgctgaacagaatcctgggcgagggcttcttcggcgaggtgtacgagggcgtgtacaccaaccacaagggcgagaagatcaacgtggccgtgaagacctgcaagaaggactgcaccctggacaacaaggagaagttcatgagcgaggccgtgatcatgaagaacctggaccacccccacatcgtgaagctgatcggcatcatcgaggaggagcccacctggatcatcatggagctgtacccctacggcgagctgggccactacctggagagaaacaagaacagcctgaaggtgctgaccctggtgctgtacagcctgcagatctgcaaggccatggcctacctggagagcatcaactgcgtgcacagagacatcgccgtgagaaacatcctggtggccagccccgagtgcgtgaagctgggcgacttcggcctgagcagatacatcgaggacgaggactactacaaggccagcgtgaccagactgcccatcaagtggatgagccccgagagcatcaacttcagaagattcaccaccgccagcgacgtgtggatgttcgccgtgtgcatgtgggagatcctgagcttcggcaagcagcccttcttctggctggagaacaaggacgtgatcggcgtgctggagaagggcgacagactgcccaagcccgacctgtgcccccccgtgctgtacaccctgatgaccagatgctgggactacgaccccagcgacagacccagattcaccgagctggtgtgcagcctgagcgacgtgtaccagatggagaaggacatcgccatggagcaggagagaaacgccagatacagaacccccaagatcctggagcccaccgccttccaggagcccccccccaagcccagcagacccaagtacagaccccccccccagaccaacctgctggcccccaagctgcagttccaggtgcccgagggcctgtgcgccagcagccccaccctgaccagccccatggagtaccccagccccgtgaacagcctgcacaccccccccctgcacagacacaacgtgttcaagagacacagcatgagagaggaggacttcatccagcccagcagcagagaggaggcccagcagctgtgggaggccgagaaggtgaagatgagacagatcctggacaagcagcagaagcagatggtggaggactaccagtggctgagacaggaggagaagagcctggaccccatggtgtacatgaacgacaagagccccctgacccccgagaaggaggtgggctacctggagttcaccggccccccccagaagccccccagactgggcgcccagagcatccagcccaccgccaacctggacagaaccgacgacctggtgtacctgaacgtgatggagctggtgagagccgtgctggagctgaagaacgagctgtgccagctgccccccgagggctacgtggtggtggtgaagaacgtgggcctgaccctgagaaagctgatcggcagcgtggacgacctgctgcccagcctgcccagcagcagcagaaccgagatcgagggcacccagaagctgctgaacaaggacctggccgagctgatcaacaagatgagactggcccagcagaacgccgtgaccagcctgagcgaggagtgcaagagacagatgctgaccgccagccacaccctggccgtggacgccaagaacctgctggacgccgtggaccaggccaaggtgctggccaacctggcccacccccccgccgagtag

SEQ ID NO: 341323 - DNA, 3030 bp, Artificial Sequence
  derived and/or modified sequence
atgtcaggcgtgagtgaacccctgagcagagtcaagctggggaccctgcgccgtcccgagggacccgctgaaccaatggtggtcgtgcccgtggatgtcgaaaaggaagatgtgagaatactaaaggtgtgcttttatagcaactcctttaacccgggcaagaatttcaagctggtgaaatgcaccgtgcagaccgaaatcagagagatcattacctccatccttctttcaggtagaatcggacctaatatcaggctcgccgaatgctacggcctgaggctgaagcacatgaagtccgatgaaatccactggttgcatccccagatgactgtgggagaggtccaagacaaatacgagtgtctgcatgtggaggctgagtggcggtacgatctgcagattaggtatcttcccgaggactttatggaatcactgaaagaggatcggacaacgcttctatatttttaccagcagctgcggaacgattacatgcagagatacgcttctaaagtcagtgaaggcatggccctgcagctgggttgcctagagttgcgcagattttttaaggatatgcctcacaatgccctggacaaaaagagcaactttgagcttcttgagaaggaggtgggtctcgaccttttcttcccgaaacagatgcaggaaaatcttaagccgaaacagttcaggaagatgatacaacagacattccaacaatacgcgtcgctgcgcgaggaggaatgtgtcatgaaattctttaacacattggccggtttcgcaaacattgaccaggagacatatcgatgcgagttgatccagggatggaatatcacagttgatctggtcattggtcctaagggtattcgccagctgacttcccaggatgcgaagccgacgtgcttggccgaattcaagcaaatccgctccatccgctgcctgcccctagaagaagggcaggccgtgcttcagcttggcatcgaaggcgctcctcaggccctctctatcaagacatcctctctggcggaggcagaaaacatggccgacctcattgatggctattgccgccttcagggggagcatcaaggatccctgatcattcacccacggaaggacggcgagaagcgcaactcccttccccagatccccatgctcaatttggaagcccgccgtagccacttatctgaatcttgttcaatcgaatctgacatctacgccgaaataccggacgagaccttgagaagaccgggtgggccacaatacggtattgcccgcgaggacgtggtccttaatagaatcctgggcgaggggttttttggtgaagtatacgagggcgtgtatactaaccacaagggggagaagatcaatgtggcagtaaagacatgtaagaaagattgtacattggacaataaagaaaagttcatgagcgaggccgttattatgaagaatctcgaccacccacatattgtcaagctgattgggattatcgaagaagaaccaacctggatcatcatggagctttatccatacggggagttggggcactatcttgagcgaaacaaaaacagcctgaaagtgctaacacttgttctgtacagtctgcagatatgcaaggcaatggcatacctcgaatctattaattgcgtccaccgtgatatcgccgtgcgtaatattctggtggccagtcccgaatgcgttaagcttggagactttggcctgagcaggtatatcgaagacgaggactattacaaggcctcagttacccgtctcccgataaaatggatgtcaccagagtcaattaacttccggcgctttacgaccgcctccgacgtgtggatgttcgccgtgtgtatgtgggagatcctgtcctttgggaaacagccatttttttggctcgaaaataaggatgtgattggggtgctggagaagggggatcgcctgcctaaacccgacctgtgcccccccgttctgtacactctcatgacccggtgctgggactacgacccgtctgaccgcccaaggtttacggaactcgtctgtagtctcagtgacgtgtaccagatggagaaagatatagccatggagcaagaacgaaacgcccgataccgtaccccaaagatcttagagcctacggcctttcaagaaccacccccaaagccctcgaggccaaaatacaggccccccccccagaccaatttactggcacccaaattgcagtttcaagtcccagagggcctttgcgcaagctctcccacactgaccagccctatggagtatccttcgcctgtgaattcactgcacacaccacctttgcaccggcataatgtgttcaaaaggcattccatgagggaagaggactttatacagccaagttctcgggaggaagcgcagcagctgtgggaagctgagaaggtcaagatgcgacagatcctggataagcagcagaagcagatggttgaggattaccaatggctaagacaggaagagaagagcctggacccgatggtttatatgaacgacaaatcccccctcacaccagagaaggaggtcggatacctggaattcaccggcccccctcaaaagcccccgagactgggggctcagtcaattcagcccacggcaaatctcgatcgaacagacgatttggtgtatttaaatgttatggagctggtcagagccgttttggagctgaaaaacgaactgtgtcaactgccccccgagggatatgtagttgtggtgaaaaatgtaggcctaaccctgcggaagctaatcggttccgttgatgacctactcccctcgctcccttcatcaagtcgaaccgaaatcgaagggacccagaagctcctcaataaggatctggccgagctcatcaataagatgcgcctcgcacaacaaaatgccgttactagcctttctgaggaatgtaaaaggcagatgctcacggctagccacacccttgcagtagacgccaagaacctgctggatgctgtggaccaagcaaaggtactggccaacctggctcatcccccagccgaatag

SEQ ID NO: 341324 - DNA, 3030 bp, Artificial Sequence
  derived and/or modified sequence
atgtctggggtgtccgaaccattgtctagggtcaaactcgggacactgagaaggcccgaaggcccagccgagcccatggtcgtggtgccagtcgatgtggagaaggaggacgtgagaatcttaaaggtatgcttctactctaactctttcaaccccggaaagaacttcaagttagtcaaatgtaccgtacaaactgaaattagggagatcatcacttctatccttctgagtggaaggattgggcccaatatccggctggctgagtgttacggcttgcggctgaagcacatgaaatctgatgagattcactggttacatccacagatgactgtcggcgaagtccaggataagtatgagtgtcttcatgtcgaggctgagtggagatacgaccttcaaataagatacttgcccgaggatttcatggaaagtctgaaggaagaccgcacgaccttgctttacttttatcaacaacttcggaacgactatatgcagagatacgccagtaaggtaagtgagggcatggctctccagctagggtgtctggaactgcgcaggttcttcaaggacatgccccacaatgcacttgataagaagtctaactttgagcttttggaaaaagaagttggtctggacttgttttttcctaagcagatgcaggagaacctgaagccaaaacagtttagaaaaatgatacaacagacttttcagcagtatgcctccctacgggaggaagagtgtgtgatgaaattttttaacacactggctggatttgctaatatcgatcaggagacttataggtgtgaactcattcagggatggaatatcacagttgatttggtaattggcccgaaggggattcggcaactgacctcccaggatgctaaacccacctgcctcgccgaattcaaacagatacggtctataagatgcttgcctttagaggagggccaggctgttttgcagctgggaatagagggcgcgccccaggctttatcaatcaagacttcaagtctcgcagaagcagagaacatggcagacctgatcgacgggtattgtcgtttgcagggagagcaccaggggtccctgattattcatcccagaaaggacggcgaaaagcgtaatagcttaccccagattccgatgttaaacctcgaggcccggcggtctcatctaagcgaatcatgcagtatagaatctgatatttacgctgagatacctgacgaaacactgagaaggccgggggggccccagtacggaatcgccagggaagacgtcgtgctgaaccggatccttggggaaggcttctttggcgaagtctatgaaggagtgtacacaaatcataagggcgagaagatcaacgtcgccgtcaagacctgcaagaaggattgcaccctcgataacaaagaaaagttcatgagcgaggcggtaattatgaagaatttagatcatccccatattgtgaagctgataggcatcatagaggaggaacctacatggatcatcatggaactctatccgtatggggagctggggcattacttggaaagaaataagaacagcctgaaggtgctcacactggtgctttattccctccaaatctgcaaggcgatggcctatctagagtctattaattgcgtacatcgcgatatagccgttagaaatatcctggtcgcctcccccgagtgtgtcaaacttggagacttcgggctgtctcgatatattgaagatgaggattactacaaggcttctgtaactaggctcccaattaaatggatgtctccggaaagtatcaattttaggcgttttaccactgcctcagatgtctggatgttcgccgtatgtatgtgggagattctgtcatttggcaagcaaccctttttttggctagagaataaagacgtgattggagtactggagaagggcgaccggctgccaaaacctgacctctgtcctcctgtgctgtacaccctgatgactaggtgttgggactacgacccttccgaccgccctagattcacagaattggtttgcagtttatcagatgtctatcagatggaaaaagacattgcaatggagcaggagcgcaatgcaagatatcggacccccaagattctggagcctaccgcctttcaggaaccaccccctaagccgagtaggcctaaatatagacccccaccccagaccaaccttctggcacccaagctacagttccaggtgccagaaggcctttgtgccagctcccccactctgacgtctccgatggagtatccctccccggttaactccctccacacaccgcccctgcatagacacaatgtgtttaagcgccattccatgcgggaagaggacttcatccagccctccagtagggaggaggcacagcagctgtgggaggctgagaaggtcaagatgagacagattctggacaaacaacagaagcagatggttgaggactaccagtggcttcgccaagaggagaaatcccttgaccctatggtgtacatgaatgacaaaagccccttaacgcctgagaaggaagttgggtacctggagttcactggcccccctcaaaagcctcctcgactgggtgcacagagcatccaacccacagcaaatttagatagaacggatgatctcgtttatctgaatgtgatggagttggtgagagctgttcttgagcttaagaatgagctctgtcagctgccacctgaagggtatgtcgtggtggttaagaatgtcggtctgaccctccgaaaactgatcggctcggtggacgacctgctgccctctttgccctcctctagtaggaccgagatagaagggacccagaagctcctgaacaaagatctggccgagcttatcaacaagatgagactggcccaacagaatgccgtgacaagtctttcagaagagtgcaagcgccagatgttgacagctagccataccctggcagtagatgctaagaacctgctcgacgccgtggaccaggccaaagtccttgccaatcttgcgcatcccccggccgagtag

SEQ ID NO: 341325 - DNA, 3030 bp, Artificial Sequence
  derived and/or modified sequence
atgagcggagtttcggaacccctgagtcgagtcaaactcggaactcttagaaggcccgaaggcccagccgagccgatggttgtcgtgcctgttgacgtggaaaaagaggacgtgcggattctgaaagtgtgcttctactctaattctttcaatcctggcaagaactttaaactggtgaaatgtactgtccaaacggagattagagagattattacctccatcctgctctcaggccgaattggccccaacatccgacttgccgagtgttacggtcttcggcttaagcacatgaaatctgatgagattcactggctgcacccccagatgacagtgggcgaggtacaagacaaatatgagtgtctgcatgtggaagctgagtggagatatgacctgcagattcgctacctgcccgaagattttatggaaagtcttaaggaggataggactactcttctgtatttctatcagcaactccgcaacgactatatgcagagatacgcatccaaggtgtcagagggcatggccctgcagctagggtgcctcgagctgcgccgatttttcaaggacatgcctcataatgccctggacaagaaatccaatttcgaactgctcgaaaaagaagttggcctggacctgtttttccccaaacagatgcaggagaatcttaagcccaagcagttccgaaagatgatacaacaaacatttcaacagtatgcgagcctccgggaagaggaatgtgtgatgaagttcttcaacaccttggccgggttcgctaatatcgatcaggagacatacagatgtgagttgatccaaggttggaacattacagtcgatctcgtaatcggtcccaagggcatcaggcagttaacttctcaggacgctaagcctacctgtctcgctgagttcaagcagattaggtctatacgctgccttccgctcgaggagggccaggcagtgctgcagctagggatcgaaggggccccacaggccctctccatcaaaacttctagtctggcggaggctgagaacatggctgacctaattgatggttactgcagactccagggcgagcaccagggcagcttgatcatccacccccggaaggacggcgaaaaacgaaattctcttccccagatcccaatgctgaatctggaggcccggcgcagtcacctcagcgaaagttgttccattgaatcagacatctacgccgagatccccgatgagaccctgaggagaccagggggaccccagtacggtatcgctcgagaagatgtggtcctaaatcggatccttggcgagggattcttcggggaagtttacgaaggagtgtacaccaaccacaaaggcgagaagatcaacgtcgccgtcaagacgtgtaagaaagattgcacactggataacaaagagaagttcatgtcagaggccgtcataatgaagaatctggaccatccacacatcgtgaaactaatcggcattatcgaggaggagccaacatggatcattatggaactttacccctatggggaactgggacactatttagagcggaacaaaaacagcctaaaggtgcttaccttagtgctgtattcattacagatatgcaaagccatggcatatctggaatcaatcaactgcgtccatcgagacatcgccgttagaaacattctcgttgcaagccccgaatgtgtcaaactgggcgactttggtctgtccaggtacatcgaggacgaagactattacaaagcgagcgtcacccggctgccaatcaagtggatgtctccggagagtatcaactttaggcgtttcaccactgcgagcgacgtgtggatgttcgccgtgtgcatgtgggaaatcctctcatttggtaaacagccatttttctggctcgagaacaaggacgttattggtgtgcttgagaagggcgatcggctgccgaagccagacctttgcccacctgtgctgtacacactgatgaccaggtgttgggattacgatccctccgatcggccccgcttcaccgagctggtttgttccctgagcgacgtgtaccagatggaaaaagacatcgcaatggagcaggagaggaacgcccgctataggacacccaaaatcctggaaccgaccgccttccaggaaccacctccaaagccgtccaggcccaaatacaggccacctcctcaaacaaacttgctggctccgaaactccagtttcaagtgcctgagggtttgtgcgcctctagccccacactcacctcccccatggaatacccttctcctgtcaacagcctccacacccctccgctgcatcgccacaatgtgttcaaacggcactctatgagggaggaggatttcatccaaccgagttcccgggaggaggcccagcagctctgggaggccgagaaagtgaaaatgagacagattctggacaagcagcagaagcaaatggtggaggactatcaatggctgaggcaggaggagaaatccctggatccaatggtctacatgaatgacaaatctcccctgacgcccgagaaagaggtcggctacctggagttcacaggacctccccagaagccaccccgcctgggtgcgcagtcaatccagcctactgcaaatctggaccgtaccgacgatcttgtatatctgaatgtaatggagcttgtgagggcagtcctggagctgaagaatgagttgtgtcagttgccgcctgaaggctatgtggtcgttgtcaagaatgtagggttgaccctccgcaaactgatcgggtcggttgatgatctgcttcctagcctgccttcttcaagtcggaccgaaatagagggaactcagaagctgctgaataaggacttggcagagttgatcaacaagatgcgcctcgcacagcaaaatgctgtaaccagtctctcggaagagtgtaaaagacagatgctcacagcctcacacaccctggcagttgacgcaaagaatctgctcgacgctgtcgaccaggcaaaggtcctggccaacctggcacatccgccagcagagtag

SEQ ID NO: 341326 - DNA, 3030 bp, Artificial Sequence
  derived and/or modified sequence
atgtctggagtgtctgagcccctgagccgggtgaagctgggcaccctgcggcggcctgagggccctgctgagcccatggtggtggtgcctgtggatgtggagaaggaggatgtgcgcatcctgaaggtgtgcttctacagcaacagcttcaaccctgggaagaacttcaagctggtgaagtgcaccgtgcagacagagatccgggagatcatcaccagcatcctgctgagcggccgcatcggccccaacatccggctggccgagtgctacggcctgcggctgaagcacatgaagagtgatgagatccactggctgcacccccagatgacagtgggggaggtgcaggacaagtatgaatgtctgcacgtggaggccgagtggaggtatgacctgcagatccgctacctgcctgaggacttcatggagagcctgaaggaggacaggaccaccctgctgtacttctaccagcagctgagaaatgactacatgcagagatatgccagcaaggtgtctgagggcatggccctgcagctgggctgcctggagctgcggcgcttcttcaaggacatgccccacaatgccctggacaagaagagcaactttgagctgctggagaaggaggtgggcctggacctcttcttccccaagcagatgcaggagaacctgaagcccaagcagttcaggaagatgatccagcagaccttccagcagtatgccagcctgcgggaggaggagtgtgtgatgaagttcttcaacaccctggccggctttgccaacatcgaccaggagacctaccgctgtgagctgatccagggctggaacatcaccgtggacctggtgattggccccaagggcatccggcagctgaccagccaggatgccaagcccacctgcctggccgagttcaagcagatccgcagcatccgctgcctgcccctggaggagggccaggccgtgctgcagctgggcatcgagggcgccccccaggccctgagcatcaagaccagcagcctggccgaggccgagaacatggctgacctgattgatggctactgccgcctgcagggcgagcaccagggcagcctcatcatccaccccaggaaggatggagagaagaggaacagcctgccccagatccccatgctgaacctggaggcccggcgcagccacctgtctgagagctgcagcattgaaagtgacatctatgcagagatcccagatgagaccctgcggcggcctgggggcccccagtatggcatcgccagagaagatgtggtgctgaaccgcatcctgggggagggcttcttcggggaggtgtatgagggcgtgtacaccaaccacaagggggagaagatcaacgtggccgtgaagacctgcaagaaggactgcaccctggacaacaaggagaagttcatgtctgaggccgtcatcatgaagaacctggaccacccccacatcgtgaagctgattggcatcatcgaggaggagcccacctggatcatcatggagctgtacccctatggagagctgggccactacctggagaggaacaagaacagcctgaaggtgctgaccctggtgctgtacagcctgcagatctgcaaggccatggcctacctggagagcatcaactgtgtgcaccgggacattgctgtgaggaacatcctggtggccagcccagaatgtgtgaagctgggggactttggcctgagccgctacattgaagatgaggactactacaaggcctctgtgacccggctgcccatcaagtggatgagccctgagagcatcaacttccgccgcttcaccacagccagtgatgtgtggatgtttgctgtgtgcatgtgggagatcctgagctttgggaagcagcccttcttctggctggagaacaaggatgtgattggagtgctggagaagggggaccggctgcccaagccagacctgtgcccccctgtgctgtacaccctgatgacccgctgctgggactatgaccccagcgaccggccccgcttcacagagctggtgtgcagcctgagtgatgtgtaccagatggagaaggacatcgccatggagcaggagagaaatgcccgctaccgcacccccaagatcctggagcccacagccttccaggagcccccacccaagcccagccggcccaagtaccggcccccaccccagaccaacctgctggcccccaagctgcagttccaggtgcctgagggcctgtgtgccagcagccccaccctgaccagccccatggagtaccccagccctgtgaacagcctgcacaccccacccctgcaccgccacaacgtgttcaagaggcacagcatgagggaggaggacttcatccagcccagcagccgggaggaggcccagcagctgtgggaggccgagaaggtgaagatgaggcagatcctggacaagcagcagaagcagatggtggaggactaccagtggctgcggcaggaggagaagagcctggaccccatggtgtacatgaatgacaagagccccctgaccccagagaaggaggtgggctacctggagttcaccggccccccccagaagccaccccggctgggcgcccagagcatccagcccacagccaacctggacagaacagatgacctggtgtacctgaatgtgatggagctggtgcgggctgtgctggagctgaagaatgagctgtgccagctgcccccagagggctacgtggtggtggtgaagaatgtgggcctgaccctgaggaagctgattggctctgtggatgacctgctgcccagcctgcccagcagcagcaggacagaaattgagggcacccagaagctgctgaacaaggacctggccgagctgatcaacaagatgaggctggcccagcagaatgctgtgaccagcctgtctgaggagtgcaagaggcagatgctgacagccagccacaccctggccgtggatgccaagaacctgctggatgctgtggaccaggccaaggtgctggccaacctggcccaccccccagctgagtag

SEQ ID NO: 341327 - DNA, 3030 bp, Artificial Sequence
  derived and/or modified sequence
atgagcggcgtgagcgagcccctgagccgggtgaagctgggcaccctccgccgccccgaagggccagccgagccgatggtggttgtgccagtggacgtggagaaggaggacgtgaggatcttgaaagtgtgtttttactccaattcctttaacccaggaaagaacttcaagctcgtgaagtgcacagtccagacggaaataagggagattataacatccattctgctctctggccgtattgggcccaatattcggctcgccgaatgttatggtctcagattgaagcatatgaagtctgacgaaatccactggcttcaccctcagatgacagtgggagaagttcaggataaatacgagtgtttacacgttgaagcggaatggcggtatgacctacagatcagatacctcccagaagatttcatggagtccctgaaagaggataggactactcttttgtacttttaccagcagttacggaatgactatatgcagagatacgcaagcaaggtctccgaaggtatggcactgcaactgggttgcctcgaactccgtagatttttcaaggacatgccccataacgcacttgacaagaaaagcaatttcgaactgctcgagaaggaagttggcttggacctgttctttcccaagcaaatgcaggagaaccttaagcctaagcagtttagaaagatgattcagcaaacatttcagcagtacgcatcactgagggaagaagaatgcgtgatgaagttttttaacactctggctggttttgcgaacatagaccaggagacctataggtgcgagttaatacagggttggaatatcaccgtggacttagtaattggacctaaagggatccggcagcttacatcgcaggatgccaaaccaacctgtttggctgagttcaaacagataaggagtattagatgtcttcccctagaggaaggccaagctgtgctgcaattgggaatcgagggggcccctcaggctctgtccattaagacgagttccctggccgaggctgagaacatggcggatctcattgacggatattgtcggctgcagggagaacaccaagggtcgctgattattcatcctagaaaagacggcgaaaagaggaacagtctcccgcaaatacccatgttaaacttggaagctagacgctcacatttgtctgagagctgttctattgaatcagacatttatgccgagattcctgacgaaacgttgagacgaccgggcgggccccagtacgggatcgccagagaggatgtggtgctgaaccggatcctaggggagggcttctttggtgaagtctacgagggagtctacactaaccacaaaggtgagaagatcaacgttgcggtgaaaacctgcaaaaaggactgtacactcgacaacaaagagaaattcatgtccgaagctgtgatcatgaaaaacctagatcacccccacatcgttaaattaatcgggatcattgaggaagaacctacgtggattatcatggaactgtatccatacggcgagcttggacactatctggagaggaataaaaattctctgaaggtgctgacccttgtcctctacagcctccaaatttgtaaagctatggcctacctggaaagcatcaactgcgtgcaccgtgacattgctgtgaggaacatcctcgtcgctagtcccgagtgcgtgaagctcggcgattttggactcagcaggtatatagaagatgaggactactataaggcctcagtcacgcggttgcccattaaatggatgagtccggagtcgatcaactttcggagatttaccactgcaagcgacgtctggatgttcgccgtgtgcatgtgggaaattcttagcttcgggaagcaacccttcttttggctggaaaacaaggatgtcatcggcgtgctggagaagggcgatagactacccaaaccggatctgtgtcccccagtgctgtacaccctgatgacaagatgttgggattacgacccctcagatcgaccgcgctttacagaactggtatgtagcctgtccgacgtttaccagatggagaaggacattgctatggaacaggagcgaaacgcacggtatcgaactcctaaaatacttgaacctaccgccttccaagagccaccacccaagcccagcaggcccaagtatcgcccccccccacagacgaacctccttgcgcctaagctgcagtttcaggtcccggagggtctgtgtgccagttcacctacactgacctcaccaatggaatatccgtctcccgtcaactcccttcacacgcctcctttgcacaggcacaatgtgtttaagcggcattctatgcgcgaggaggacttcatccagccctcttcacgggaggaagctcagcagttatgggaggcagaaaaagtgaagatgcgtcagatactggacaagcaacagaaacagatggtggaggactaccagtggctccggcaggaggaaaagagcctggaccccatggtgtacatgaatgataagtctccgctgacccctgaaaaagaggtcggatacctggaatttacaggcccaccccaaaagccacctcgcttgggtgcccagagcattcagccaaccgctaatctcgaccgaacagatgatctggtgtatctgaacgtgatggagctcgtgcgcgccgtgcttgagctcaagaacgagttgtgtcaactgcccccagaaggctatgtcgtcgttgtgaagaatgttggtcttacgctgcgcaagctcatcggatcagtcgatgatctgctgccttcactaccttccagtagccggaccgaaattgagggcacccagaaactgctcaataaggacctagcagaactgattaacaagatgaggctagctcagcagaacgccgtcacttctctgagtgaggagtgtaaacggcagatgttgacagctagccacaccctggcagtggatgctaagaatcttctcgacgccgtcgaccaggcgaaggtgttggccaacttagcacacccccctgctgaatag

SEQ ID NO: 341328 - DNA, 3030 bp, Artificial Sequence
  derived and/or modified sequence
atgagcggcgtgagcgagcccctgagccgggtgaagctgggcaccttacgacggcctgaaggccctgccgagcccatggtggtcgtgcccgttgatgtggagaaagaagatgttcgcatactgaaggtctgtttctattctaactcgttcaatcctggtaagaatttcaagttggtgaagtgcaccgtccagacggagatccgagagattatcacttctattctgctttcgggcaggattggtcccaacatcaggctggcagaatgttacggtctcagactcaaacacatgaaatccgacgaaatacattggctgcatccacagatgaccgtgggagaggtgcaggataaatatgagtgcttgcacgtcgaggccgaatggagatatgacttacagatcagatatctgcctgaggacttcatggaaagcctgaaggaagatcggaccacgcttctgtatttctatcagcaactgagaaatgattacatgcaacgatacgcatctaaagtctcggaagggatggctctacagctgggatgcctcgaactccggcgtttcttcaaggatatgcctcacaatgctctagataagaaaagtaactttgaattgctggagaaggaggtgggcctggacctgtttttcccgaagcagatgcaagagaatctgaagccgaagcaatttcggaagatgatccagcaaacgtttcagcagtacgcaagcctgcgtgaagaagagtgcgtgatgaagtttttcaacaccctggccggctttgccaatatcgaccaggagacttacagatgtgaactcatccaagggtggaatattacagtcgatcttgtaatcgggccgaaggggatccggcagcttacctcccaggatgcaaagccgacatgcctagcagaattcaagcagatcaggagtatacggtgtttaccattggaagaagggcaggccgtcctgcagctggggatcgagggagccccccaggctctctcaataaagaccagcagtctcgccgaggccgaaaatatggctgatcttatcgatggatactgcagattgcagggagagcaccagggaagcttaattattcacccaagaaaagacggggaaaaacggaattctttaccccagatccccatgctgaacctggaggcacgacgctcccatctgtcggagagttgcagtattgagtccgatatttacgccgagattccggacgagaccctgaggcgcccgggcggcccccagtatggaattgcccgcgaagatgtggtactgaatcgcatcctcggtgagggattttttggagaggtgtatgaaggcgtgtataccaatcacaaaggagaaaaaatcaacgtcgctgtcaagacatgtaagaaagactgtaccctcgataataaggagaaattcatgtctgaagctgtgatcatgaaaaacctggatcatccccatattgtgaaactcatagggattatcgaggaagagcccacctggattatcatggagctgtacccatatggagagctgggacactacttggagagaaataagaattcgctcaaagtactgaccctggtgctgtacagtttgcagatctgcaaggccatggcctatttggagtccatcaattgcgtacatagagatattgctgtcagaaatattctggtagccagtccagagtgcgtgaaactgggagactttggcttaagccgctatatcgaggacgaagattactataaagcttctgtgacaagactccccataaagtggatgagcccagaaagcatcaactttcgtcgcttcacaaccgcttccgacgtgtggatgtttgctgtttgcatgtgggaaatcctgtcttttgggaagcagccattcttttggctggaaaataaggatgtgataggggtgctggaaaagggtgatagactccccaaaccagatctgtgtcccccagtgctgtataccctcatgacacggtgttgggactacgacccatccgaccgacctcggttcacagaactggtgtgcagcttgagcgatgtgtatcagatggaaaaggacattgcaatggagcaggagcgcaatgctagatataggacacctaaaattctggagcccaccgcatttcaggaaccccccccaaaacctagcagacccaagtaccgtcctccaccccagactaaccttcttgcacccaaactgcagttccaggtccctgaaggactgtgtgcgtcatcgcccaccttgaccagccccatggagtacccaagcccagtgaattcgttacatactcctcctttgcaccggcacaacgtcttcaagcgccactctatgcgggaagaagatttcattcaaccctcctcacgggaggaggcccaacagctgtgggaggccgagaaggtgaagatgcggcagattcttgacaagcaacagaaacagatggtggaggattaccagtggctgaggcaggaagagaagtctttggaccccatggtgtatatgaacgacaagagcccactgacccccgagaaagaagtgggttatctggagttcaccggccccccacagaaacctccgaggttgggggcacagtctatccaaccaaccgccaatttggatagaactgacgatctcgtgtatctcaacgttatggagttggtgcgtgcagtactggagctgaagaacgaactgtgccagcttccccccgaaggttacgttgttgtcgtgaaaaacgtgggcctcaccttgaggaagcttattggttcagtcgacgacctgctgccaagcctcccatcgagctcacgtacagagatcgaaggaacccagaagctgctgaataaggatctggcagagctgatcaataagatgcggttagctcagcaaaacgcagtaacctcgctgagtgaggagtgcaagcgccagatgctgaccgccagtcacacactcgccgtggacgccaaaaatctcctcgatgccgtagaccaagccaaggtgttggctaacctggctcacccccccgccgaatag

SEQ ID NO: 341329 - DNA, 3030 bp, Artificial Sequence
  derived and/or modified sequence
atgagcggcgtgagcgagcccctgagccgggtgaagctgggcaccttgcggcgtccagaaggccccgccgagcccatggttgttgtgcccgtggacgtggagaaagaagatgtgaggattctaaaagtatgtttctattcaaactcatttaatccgggcaagaattttaagctcgtaaagtgtaccgtacagacggagatcagggaaatcataacaagtatcctgctttccggacggattgggcctaatatccggctcgctgaatgctacggtttgcggctaaagcacatgaaatcagacgaaattcattggttgcacccacagatgaccgtgggtgaggttcaggataagtatgaatgtttgcatgttgaggcagagtggcgatacgacttgcagatcagatacttaccagaagattttatggagtcactgaaagaagatagaaccactctgctgtacttctaccagcagttgagaaacgattacatgcaaaggtacgcttcaaaagtgtcagaggggatggctttgcagctgggatgtctcgaactgcgccggtttttcaaagatatgccccacaacgctcttgacaaaaagtctaatttcgagctacttgagaaagaagtgggcctcgacttgttttttcccaaacagatgcaggagaacttgaagcctaagcaatttcgcaaaatgatccagcagactttccagcagtacgcttccctgcgagaggaggaatgcgtcatgaaattttttaataccctggctggttttgccaacattgaccaggaaacttaccggtgcgagctgatccaggggtggaatataaccgtggatctggtgattggccctaaggggattcgacagttaaccagccaggatgccaaacccacgtgcctggctgagtttaagcagattcggtcaatccggtgcctgccactggaggaggggcaggccgtcctgcagctgggtatagaaggagctcctcaggctctttccatcaaaacatccagcctggccgaggccgaaaacatggccgacctgattgacggctattgtagattgcagggagaacaccagggctcgttgataattcaccccagaaaagacggcgaaaaacggaatagtctgcctcagatacccatgctgaacctggaagccagacgcagtcacctgtcggaaagctgctctatcgaatctgatatatatgcggagattccagacgagacactgaggcgacccggcggcccacagtatggtattgcccgggaagacgtcgtgttaaaccgaatcctgggagagggtttcttcggcgaggtctacgaaggcgtatataccaatcataaaggagagaagattaatgtcgccgttaaaacctgcaaaaaagattgcaccttggacaataaggaaaagtttatgtcagaggcggtgatcatgaagaacctcgaccatccccacatcgtgaaactgatcggcattatcgaggaggagcctacctggattatcatggaactgtacccatacggagagttgggccactacctggagcgaaacaaaaattccctgaaagtactcaccctggtgctgtactcactacaaatatgtaaggccatggcatatctcgaatccattaattgtgtacatagggacatagctgtccgtaacatcttggtcgcatcgcctgagtgcgtgaagcttggggacttcggtctgtctagatatattgaggacgaagattattacaaagcttccgtgacacgcctgcccattaaatggatgagccctgagagtattaattttcggagattcacgacggctagcgacgtctggatgttcgccgtttgcatgtgggagatcttaagctttgggaaacaaccatttttttggctagaaaataaagatgtaataggagtcctggaaaaaggtgatagactgccaaagcctgatctgtgccctcccgtgctgtacaccctcatgaccaggtgttgggactacgacccttctgataggccgagatttaccgagctggtctgcagccttagtgatgtgtaccaaatggaaaaggatattgcaatggaacaggagcgcaacgcccgctataggacccccaagatcctggaaccaaccgctttccaggagcctccccccaagccctcccgccccaaataccgcccaccaccacagactaacctgcttgcgcctaagctgcagtttcaggtgcccgagggactctgtgcaagtagtccaacactgacgagcccaatggagtacccatcacccgtgaatagtctccacactcctcctttgcatcgccacaacgtcttcaaacggcattctatgcgggaggaggattttatacaaccatcctctcgagaggaagcacagcagctgtgggaggcagagaaagtcaaaatgagacaaattctggacaagcagcagaagcagatggtagaggattatcagtggctgaggcaggaggaaaaaagcctagatcctatggtttacatgaacgacaagtcacctcttacccccgagaaggaggtggggtatctcgagtttaccgggccacctcagaaacccccacgtctgggagcgcaaagcatccagcccactgctaatctggatcgaacagatgacctcgtttatctgaatgtgatggagctggtgcgcgcggttttggaactcaaaaatgaactctgtcagctgcctcctgaagggtacgtggtggtggtaaaaaacgttgggctaacacttagaaagttgattggttccgtggatgatttactgccatctctgccctctagcagccgaaccgagatagaaggtacccaaaagctcctgaataaggacctggctgaactaatcaacaagatgcgacttgctcagcagaacgctgttacctccctgtcagaggagtgcaaaagacagatgttgactgcttctcatacactggcagttgacgctaaaaatctgctcgacgcggtggaccaggctaaggtgcttgccaacctcgcccaccccccagctgagtag

SEQ ID NO: 341330 - DNA, 3030 bp, Artificial Sequence
  derived and/or modified sequence
atgagcggtgtgtccgagcccctctctagggtgaagctcggtaccctgagacgaccagaagggcctgcagaacctatggtggtggtcccagtagacgttgagaaggaggacgtaaggattctgaaggtgtgcttctattctaactctttcaatccaggcaagaattttaaactcgtgaagtgtaccgttcagacagaaattcgagagattattacgtcaatactgcttagtggacgcattggaccaaacatccgtttggccgagtgctacgggctgcgcttgaaacacatgaaatctgacgagatacactggttgcatcctcagatgacagtgggggaggtgcaggacaagtacgagtgtctgcatgtagaggctgaatggcgctacgatttgcagatccggtacctacctgaagatttcatggagagcctcaaagaggataggacaactcttctctatttttatcagcagttgaggaacgattacatgcagcgctatgcttcgaaagtatcagaggggatggccttgcagctggggtgtttggagctgcgaaggttctttaaggatatgccgcataacgctctggataagaagagtaattttgaactgctggaaaaagaggtggggcttgatcttttcttccccaagcaaatgcaggaaaacttgaaacctaagcagttcagaaagatgatccagcagaccttccagcagtatgcttcactgagggaagaggagtgcgtgatgaaattcttcaacacgctagcgggattcgccaatatagaccaggagacttacagatgcgaactgatacagggatggaacatcaccgttgatttggtgatcgggcctaagggaatcagacaacttacatcacaggatgccaaacccacatgcctcgcagaattcaagcagattcgaagcatccggtgcttgccgctggaagaaggccaggcggtcctgcagctgggtattgagggggctccacaggccctctccattaagacgtcaagcctggcggaagctgagaatatggcagacctgatcgatggatactgtcggctccaaggagaacaccaaggatccctgatcatccatccaagaaaagacggggagaagagaaattctctgcctcaaatacccatgttgaaccttgaggccaggcgatcacacttgagcgaatcatgtagcatcgagtccgatatctatgctgaaattcccgatgagacactcaggaggccaggtggccctcagtatggcattgctagggaggatgttgtgctcaatcgaatccttggtgagggttttttcggcgaggtgtatgagggcgtgtataccaatcataaaggcgaaaaaatcaatgtggccgtgaagacctgtaagaaagattgtactctggataataaagagaagttcatgtctgaggccgtcatcatgaaaaacctggaccatccacatatcgttaaactgatcgggatcattgaagaggaacccacgtggatcatcatggaattatacccctatggggagcttggccattatctcgaacggaataaaaacagtctcaaggtcctgaccttggtgctgtattcccttcagatttgtaaggctatggcatacctcgagtccataaactgcgttcaccgagacattgcggtacgcaacatcctcgtggcgagccctgaatgcgttaaactgggggattttgggttgagccgctatatcgaagatgaggattactacaaggctagcgtaacaagacttccaatcaaatggatgtcacctgagagcatcaactttcgccgatttactacagcatcagatgtgtggatgtttgccgtgtgcatgtgggagattcttagttttggaaagcagcccttcttctggctggagaataaggacgtgattggagtgctggagaaaggcgataggttgcctaagccagacctgtgtcctcccgttctttacacactgatgactcgctgctgggattatgaccctagcgaccgcccaaggttcacggagcttgtgtgttcactgtctgatgtataccagatggaaaaggatattgctatggagcaggagaggaacgcccgatatagaacgccgaagattctagagccaaccgcctttcaggagcccccaccaaagccgagccgtcccaagtacagacccccacctcagaccaatctgctggccccaaagctgcaattccaggtgcccgagggactctgcgctagctccccaacactgacatcccctatggaatacccaagcccagtcaactccctccatacgcctccccttcatcgccacaatgtgttcaagcgccactcgatgcgtgaagaagacttcattcagccttctagtcgagaggaggcccagcagctttgggaagccgagaaggtgaaaatgcggcagattcttgacaagcaacagaagcagatggtggaagattaccagtggcttcggcaggaggagaagtcactcgatcccatggtttatatgaacgacaaaagtcctctgacaccggaaaaagaagtgggctacctggagtttacagggccaccacagaaaccaccgcgtctgggcgctcagtctattcagcccactgcgaacctagacaggaccgacgaccttgtgtacctaaatgtcatggagctggtaagggccgtgctggaattgaaaaatgaactgtgtcaattgccacctgagggctatgttgttgtggtaaaaaatgtgggactgactctccgtaagctcattggtagcgttgatgatctgttacctagcctaccatcctctagtcgaactgagatcgaaggcacacaaaaactgctcaataaggatctggccgaattaatcaacaagatgcgcttagcccagcagaatgccgtgaccagccttagcgaagaatgcaagcggcagatgctgactgctagtcacactctagccgtcgacgcaaaaaatcttctcgacgccgtggaccaggccaaggtcttagcaaatctagctcacccgccagccgagtag

SEQ ID NO: 341331 - DNA, 3030 bp, Artificial Sequence
  derived and/or modified sequence
atgtcaggagtgtccgagccactatctagggtgaagcttgggaccctacgcaggcccgaggggcctgccgaacccatggttgtggtgccggttgatgtggagaaagaagacgtgcgcatactcaaggtgtgtttttattcaaacagtttcaatcctggaaagaacttcaagctggtgaagtgtaccgtgcagacagagattcgagaaataatcacgtcaattttacttagtggccgaattggtccaaatattagacttgccgagtgttatggcctaaggttgaagcacatgaagtccgacgagatccactggttgcacccacaaatgactgtaggggaagtgcaggacaaatacgaatgtctacatgtcgaggctgaatggcggtatgatctgcagatccgctatctgccagaagatttcatggaatctctgaaggaagaccgcaccacgctcctatatttttaccagcagctgagaaatgactacatgcagcgctatgctagtaaggtttctgagggcatggctctacaactcggctgcttagagttgaggcgtttctttaaggatatgcctcataatgccctggacaaaaagtcaaatttcgagctgctcgaaaaagaggtggggctggatctcttcttcccaaaacagatgcaggagaacctcaagcctaagcagtttagaaaaatgatccagcagacgtttcagcagtatgcctctctgcgggaagaagaatgtgtgatgaaattttttaacactctcgccggattcgctaatatagaccaggagacctatagatgtgagctgatccagggctggaatattacagtcgatctggtcattggcccaaaaggcattaggcagttaacttcgcaggacgccaaacccacctgcttagctgagttcaagcaaatacggagcatccgctgtctcccactcgaagaaggccaagccgtgctgcaactgggtatcgagggggcacctcaggcactctccattaaaaccagctctctggcagaggcagagaacatggccgatctcatcgacggttattgtcgcctgcaaggtgagcaccaaggttctttaatcattcaccctcgaaaggacggggagaagagaaatagcctgccccagattccaatgctaaatctggaggccagacgctcccaccttagcgaaagctgttctattgagagcgacatctacgccgaaattccggatgaaactctgagaagacccggaggcccacagtatggcatcgcccgagaggatgtggtgctcaaccggattctcggagagggatttttcggtgaggtctatgagggcgtctacaccaatcataagggcgagaagataaacgtggccgtcaaaacctgcaaaaaggactgcacattggacaataaagaaaagtttatgagtgaagctgttatcatgaagaatctggatcacccacacatcgtgaagcttatcggtataatcgaagaagagcctacatggattatcatggagctgtatccctatggggaactgggacactatttggaacggaacaagaactcactaaaggtgctaactctggtactgtattctctgcaaatttgcaaagcaatggcctacctggagtccataaactgcgtgcaccgagacattgcggtgcgcaacattcttgtggcatcccctgaatgcgttaaattgggggattttggtctgagcagatatatcgaggatgaggattattataaagctagcgtgacgcgcctgcccattaagtggatgtctccagaatcaattaattttcgcaggtttacgactgcgagtgacgtctggatgtttgctgtatgtatgtgggaaatactgtccttcgggaaacaaccctttttctggttggagaacaaagatgtcataggcgtgctggagaaaggcgatcgcctgccaaaaccagacctctgcccccctgtgctttacactctaatgaccagatgctgggattatgacccatccgatagaccacggtttactgaactggtgtgtagcctgtctgatgtgtaccaaatggaaaaagatattgccatggaacaggaacgcaatgccaggtaccggacaccaaagatactggaaccgactgcatttcaggagcccccaccaaaacccagccggccaaagtacagaccgccaccccagactaacctgctggctcctaaactgcagtttcaagtgcctgaggggctttgcgcgtctagccccacactgacatctcctatggaatacccgtctccagtcaactccctgcatacacccccattacataggcataatgtattcaagaggcacagcatgagagaagaagacttcatccagccaagtagccgcgaggaagcccagcagctgtgggaggctgaaaaagtgaagatgcggcagatacttgacaagcagcagaagcaaatggtagaagattatcagtggttgcgtcaagaggagaagtctttagacccaatggtttacatgaacgacaagagcccattgactccagagaaggaggttggttatctcgaatttacgggacctccccagaagccgcctcgactgggtgcacaatctattcagcctacagccaacctggatcgcaccgacgatctcgtatatcttaacgtcatggagctcgttcgcgctgtgcttgaactgaaaaatgaattgtgtcagctgccacccgaggggtatgtcgtcgtggtcaagaatgtgggattgacccttagaaaactgataggctcggtggatgacttactgccttctctcccttcatcaagccggactgagatcgaaggaactcaaaaattactgaataaagacctcgccgagctgattaacaagatgcgactcgctcaacagaacgccgtcacatctctctctgaggagtgcaagaggcagatgctgactgcctcccatactctggctgtggacgccaagaatctactcgacgcagtggaccaagccaaagtcctggctaacctggcgcatcccccagcggagtag

SEQ ID NO: 341332 - DNA, 3030 bp, Artificial Sequence
  derived and/or modified sequence
atgagtggggtgtctgagcccctctctagggtcaaactcgggaccctgcgccgtccggaagggcctgctgagcccatggttgtggttccagtggatgtagagaaggaagatgtcaggatactgaaggtatgcttctactctaatagctttaatcccggtaaaaacttcaagttagtgaagtgtacagtgcagactgagattagagaaattattacgtccatcctattgagcgggagaatcggtccgaacatacgcctcgcagaatgctacgggctccggctaaaacacatgaaatcagacgaaatccattggctgcaccctcaaatgacagtgggggaagtgcaagacaaatatgagtgtctgcatgtcgaggccgagtggagatacgatctgcaaatacgatatctacccgaagatttcatggaatccctaaaggaggacaggacgaccctactgtatttctaccaacagttgagaaacgattatatgcagcgttatgcatcaaaggtctccgagggaatggcactgcagctgggttgcctcgaattgcgcagatttttcaaggacatgccccacaacgcgttagacaagaagtccaacttcgagctgctcgagaaagaggtcggtttagacctgttctttccgaagcagatgcaggagaatcttaaaccaaagcagttccgaaaaatgatccaacagacgttccagcagtacgcatcccttcgcgaggaggagtgtgtgatgaagttctttaacacgctggccggatttgctaatattgatcaggaaacgtaccggtgtgagctcattcaagggtggaatatcacagtggacctggttatcgggcctaaggggatcaggcagctcacctctcaggatgccaagccaacatgcttggccgaattcaaacaaattagatcaatacgctgcctaccactggaggaaggccaggctgtgctgcagctggggatcgagggggcaccacaggcacttagtatcaaaacatcaagccttgcagaagctgagaacatggctgatctgattgacgggtattgtagacttcagggagagcaccaagggtcattgattatacacccgaggaaggacggcgagaagcggaatagccttcctcaaattcccatgctgaatcttgaggcgaggcgctctcacctatccgaatcgtgttcgattgaatccgacatttacgctgagattcctgacgagaccctcagacgtcccggagggcctcagtatgggatcgctcgagaggatgtcgtcctcaaccgcattctgggggagggattttttggagaggtatacgagggcgtttacaccaatcataaaggtgaaaagattaacgtcgctgtgaagacatgtaaaaaggattgtacactggacaacaaagagaaatttatgtcagaggccgtgattatgaaaaacctagaccaccctcacatcgtgaaactgatcggtatcatcgaagaggaaccaacatggataatcatggaactctatccatacggagaacttgggcattacctggaacgcaataagaattctctgaaggtgctgaccctggtgctgtactccctccaaatatgcaaggctatggcttacctcgaatcaattaattgtgtccatagagatattgctgttcgcaacatcctcgtggcaagcccagagtgcgtcaaacttggcgatttcgggctgtccagatatattgaggacgaggattattacaaggcctccgtgactcgtctccccattaagtggatgagccctgagtctattaactttcggcgttttacaaccgcctccgatgtgtggatgtttgctgtttgtatgtgggagatccttagtttcggcaagcaaccttttttttggctggagaataaggatgtgattggagtgctagagaagggagacagactgcccaaacccgatctctgcccgccagttctgtacacattaatgacacggtgctgggactatgaccccagcgaccgccctaggtttaccgagttggtctgctcactgtctgatgtataccaaatggaaaaggatattgcaatggagcaggagcgaaacgcccgataccgcacacctaagatcctggaaccaactgctttccaggagccaccacccaagcccagtaggccaaaataccggccaccacctcagaccaacctccttgcacccaagctgcagtttcaggtgcctgaaggcctttgcgcttcttctcctacgctgacgtctcccatggagtatccaagtcccgtgaactcattacacacgcctccgcttcaccggcataatgtatttaagagacactcaatgagggaggaggacttcattcagccttcgtctagggaggaagcccagcagctatgggaggctgaaaaggtgaaaatgcggcaaatactcgataagcaacagaaacagatggttgaggactatcaatggttgaggcaggaagagaaaagtttagaccctatggtttatatgaacgataagtcacctctgactcctgagaaggaagtgggttacctagaatttaccggtccgcctcaaaaacccccaagattgggggctcagtcaatccaaccgactgccaatctagaccgtaccgacgacttagtgtacctgaacgtgatggagctggtgcgagcagtcctggaactgaaaaacgagctttgccaattgcctccggagggctacgttgtcgttgtgaaaaatgtgggtctgacactgaggaagcttattggcagcgtggatgacctattaccatctctcccctcatcctccagaacagagatcgaagggactcaaaagctgctcaataaagacttggctgaactgattaacaagatgaggttggcccagcagaatgcagtgacgagtctgagtgaagagtgtaaacgacagatgctaacagcctcacatactttagccgtggacgctaagaatctgctggatgctgtcgaccaagccaaggttctcgccaatctcgcgcatcctccagcagagtag

SEQ ID NO: 341333 - DNA, 4147 bp, Artificial Sequence
  derived and/or modified sequence
aaggaagtggggaggagagcagcaggggtgtggttaacaactcagaggaggagggagaatctaacctgtcagcccttttactcagccacagcctccggagccgttgcacacctacctgcccggccgacttacctgtacttgccgccgtcccggctcacctggcggtgcccgaggagtagtcgctggagtccgcgcctccctgggactgcaatgtgccgatcttagctgctgcctgagaggatgtctggggtgtccgagcccctgagtcgagtaaagttgggcacgttacgccggcctgaaggccctgcagagcccatggtggtggtaccagtagatgtggaaaaggaggacgtgcgtatcctcaaggtctgcttctatagcaacagcttcaatcctgggaaaaacttcaaactggtcaaatgcactgtccagacggagatccgggagatcatcacctccatcctgctgagcgggcggatcgggcccaacatccggttggctgagtgctatgggctgaggctgaagcacatgaagtccgatgagatccactggctgcacccacagatgacggtgggtgaggtgcaggacaagtatgagtgtctgcacgtggaagccgagtggaggtatgaccttcaaatccgctacttgccagaagacttcatggagagcctgaaggaggacaggaccacgctgctctatttttaccaacagctccggaacgactacatgcagcgctacgccagcaaggtcagcgagggcatggccctgcagctgggctgcctggagctcaggcggttcttcaaggatatgccccacaatgcacttgacaagaagtccaacttcgagctcctagaaaaggaagtggggctggacttgtttttcccaaagcagatgcaggagaacttaaagcccaaacagttccggaagatgatccagcagaccttccagcagtacgcctcgctcagggaggaggagtgcgtcatgaagttcttcaacactctcgccggcttcgccaacatcgaccaggagacctaccgctgtgaactcattcaaggatggaacattactgtggacctggtcattggccctaaagggatccgccagctgactagtcaggacgcaaagcccacctgcctggccgagttcaagcagatcaggtccatcaggtgcctcccgctggaggagggccaggcagtacttcagctgggcattgaaggtgccccccaggccttgtccatcaaaacctcatccctagcagaggctgagaacatggctgacctcatagacggctactgccggctgcagggtgagcaccaaggctctctcatcatccatcctaggaaagatggtgagaagcggaacagcctgccccagatccccatgctaaacctggaggcccggcggtcccacctctcagagagctgcagcatagagtcagacatctacgcagagattcccgacgaaaccctgcgaaggcccggaggtccacagtatggcattgcccgtgaagatgtggtcctgaatcgtattcttggggaaggcttttttggggaggtctatgaaggtgtctacacaaatcacaaaggggagaaaatcaatgtagctgtcaagacctgcaagaaagactgcactctggacaacaaggagaagttcatgagcgaggcagtgatcatgaagaacctcgaccacccgcacatcgtgaagctgatcggcatcattgaagaggagcccacctggatcatcatggaattgtatccctatggggagctgggccactacctggagcggaacaagaactccctgaaggtgctcaccctcgtgctgtactcactgcagatatgcaaagccatggcctacctggagagcatcaactgcgtgcacagggacattgctgtccggaacatcctggtggcctcccctgagtgtgtgaagctgggggactttggtctttcccggtacattgaggacgaggactattacaaagcctctgtgactcgtctccccatcaaatggatgtccccagagtccattaacttccgacgcttcacgacagccagtgacgtctggatgttcgccgtgtgcatgtgggagatcctgagctttgggaagcagcccttcttctggctggagaacaaggatgtcatcggggtgctggagaaaggagaccggctgcccaagcctgatctctgtccaccggtcctttataccctcatgacccgctgctgggactacgaccccagtgaccggccccgcttcaccgagctggtgtgcagcctcagtgacgtttatcagatggagaaggacattgccatggagcaagagaggaatgctcgctaccgaacccccaaaatcttggagcccacagccttccaggaacccccacccaagcccagccgacctaagtacagaccccctccgcaaaccaacctcctggctccaaagctgcagttccaggttcctgagggtctgtgtgccagctctcctacgctcaccagccctatggagtatccatctcccgttaactcactgcacaccccacctctccaccggcacaatgtcttcaaacgccacagcatgcgggaggaggacttcatccaacccagcagccgagaagaggcccagcagctgtgggaggctgaaaaggtcaaaatgcggcaaatcctggacaaacagcagaagcagatggtggaggactaccagtggctcaggcaggaggagaagtccctggaccccatggtttatatgaatgataagtccccattgacgccagagaaggaggtcggctacctggagttcacagggcccccacagaagcccccgaggctgggcgcacagtccatccagcccacagctaacctggaccggactgatgacctggtgtacctcaatgtcatggagctggtgcgggccgtgctggagctcaagaatgagctctgtcagctgccccccgagggctacgtggtggtggtgaagaatgtggggctgaccctgcggaagctcatcgggagcgtggatgatctcctgccttccttgccgtcatcttcacggacagagatcgagggcacccagaaactgctcaacaaagacctggcagagctcatcaacaagatgcggctggcacagcagaacgccgtgacctccctaagtgaggagtgcaagaggcagatgctgacggcttcacacaccctggctgtggacgccaagaacctgctcgacgctgtggaccaggccaaggttctggccaatctggcccacccacctgcagagtgacggagggtgggggccacctgcctgcgtcttccgcccctgcctgccatgtacctcccctgccttgctgttggtcatgtgggtcttccagggggaaggccaaggggagtcaccttcccttgccactttgcacgacgccctctccccacccctacccctggctgtactgctcaggctgcagctggacagaggggactctgggctatggacacagggtgacggtgacaaagatggctcagagggggactgctgctgcctggccactgctccctaagccagcctggtccatgcagggggctcctgggggtggggaggtgtcacatggtgcccctagctttatatatggacatggcaggccgatttgggaaccaagctattcctttcccttcctcttcggccctcagatgtcccttgatgcacagagaagctggggaggagctttgttttgggggtcaggcagccagtgagatgagggatgggcctggcattcttgtacagtgtatattgaaatttatttaatgtgagtttggtctggactgacagcatgtgccctcctgagggaggacctggggcacagtccaggaacaagctaattgggagtccaggcacaggatgctgtgttgtcaacaaaccaagcatcagggggaagaagcagagagatgcggccaagataggaccttgggccaaatccgctctcttcctgcccctctttctctttcttcctttactttcccttgcttttccctcttttcttactcctcctctttctctccccaacccccattctcatctgcacccttcttttctcatgtgtttgcataaacattcttttaacttctttctatttgacttgtggttgaattaaaattgtcccatttgc

SEQ ID NO: 341334 - DNA, 4715 bp, Artificial Sequence
  derived and/or modified sequence
gcagttcccgcctcctcaggtccgggcgggtccctggccggggtagcacggaagggtctcccaggcggcgtagtagggcttccgtgttactggaaacctacttccggctgcaaatgggaaaaggagcctctaccttaaccaatccccgggaacctcaggcccgcggatgggagaaaccagagatgccaacttcctgcttccgaagtagtggctgggtcttaaagcaccgatgtttctgcattgaatagccctggaagacagaattcttgtctctccaaagatctggcagacttattcccaattataagagatccttgcaaaggaggtgtcttgcttcaccttcaccttccactgtgattgtaagttttctgaggcctcgccagccatgcggaactgaataggactagcaacttcatagacggttgtgaagacaagctagacggcagatgaaagttcttggcacagagtgaacacttgataaactatatggcagggagggctggaacggggcttgtttgaagagcaatatgagccagggttatagacctgagtttggggtaagagtggaacatccaaatggaagagtccagcagctgaaaggacatttgttcaaaggcctttttcattacagttttctccttcttctgatccagccacagcctccggagccgttgcacacctacctgcccggccgacttacctgtacttgccgccgtcccggctcacctggcggtgcccgaggagtagtcgctggagtccgcgcctccctgggactgcaatgtgccgatcttagctgctgcctgagaggatgtctggggtgtccgagcccctgagtcgagtaaagttgggcacgttacgccggcctgaaggccctgcagagcccatggtggtggtaccagtagatgtggaaaaggaggacgtgcgtatcctcaaggtctgcttctatagcaacagcttcaatcctgggaaaaacttcaaactggtcaaatgcactgtccagacggagatccgggagatcatcacctccatcctgctgagcgggcggatcgggcccaacatccggttggctgagtgctatgggctgaggctgaagcacatgaagtccgatgagatccactggctgcacccacagatgacggtgggtgaggtgcaggacaagtatgagtgtctgcacgtggaagccgagtggaggtatgaccttcaaatccgctacttgccagaagacttcatggagagcctgaaggaggacaggaccacgctgctctatttttaccaacagctccggaacgactacatgcagcgctacgccagcaaggtcagcgagggcatggccctgcagctgggctgcctggagctcaggcggttcttcaaggatatgccccacaatgcacttgacaagaagtccaacttcgagctcctagaaaaggaagtggggctggacttgtttttcccaaagcagatgcaggagaacttaaagcccaaacagttccggaagatgatccagcagaccttccagcagtacgcctcgctcagggaggaggagtgcgtcatgaagttcttcaacactctcgccggcttcgccaacatcgaccaggagacctaccgctgtgaactcattcaaggatggaacattactgtggacctggtcattggccctaaagggatccgccagctgactagtcaggacgcaaagcccacctgcctggccgagttcaagcagatcaggtccatcaggtgcctcccgctggaggagggccaggcagtacttcagctgggcattgaaggtgccccccaggccttgtccatcaaaacctcatccctagcagaggctgagaacatggctgacctcatagacggctactgccggctgcagggtgagcaccaaggctctctcatcatccatcctaggaaagatggtgagaagcggaacagcctgccccagatccccatgctaaacctggaggcccggcggtcccacctctcagagagctgcagcatagagtcagacatctacgcagagattcccgacgaaaccctgcgaaggcccggaggtccacagtatggcattgcccgtgaagatgtggtcctgaatcgtattcttggggaaggcttttttggggaggtctatgaaggtgtctacacaaatcacaaaggggagaaaatcaatgtagctgtcaagacctgcaagaaagactgcactctggacaacaaggagaagttcatgagcgaggcagtgatcatgaagaacctcgaccacccgcacatcgtgaagctgatcggcatcattgaagaggagcccacctggatcatcatggaattgtatccctatggggagctgggccactacctggagcggaacaagaactccctgaaggtgctcaccctcgtgctgtactcactgcagatatgcaaagccatggcctacctggagagcatcaactgcgtgcacagggacattgctgtccggaacatcctggtggcctcccctgagtgtgtgaagctgggggactttggtctttcccggtacattgaggacgaggactattacaaagcctctgtgactcgtctccccatcaaatggatgtccccagagtccattaacttccgacgcttcacgacagccagtgacgtctggatgttcgccgtgtgcatgtgggagatcctgagctttgggaagcagcccttcttctggctggagaacaaggatgtcatcggggtgctggagaaaggagaccggctgcccaagcctgatctctgtccaccggtcctttataccctcatgacccgctgctgggactacgaccccagtgaccggccccgcttcaccgagctggtgtgcagcctcagtgacgtttatcagatggagaaggacattgccatggagcaagagaggaatgctcgctaccgaacccccaaaatcttggagcccacagccttccaggaacccccacccaagcccagccgacctaagtacagaccccctccgcaaaccaacctcctggctccaaagctgcagttccaggttcctgagggtctgtgtgccagctctcctacgctcaccagccctatggagtatccatctcccgttaactcactgcacaccccacctctccaccggcacaatgtcttcaaacgccacagcatgcgggaggaggacttcatccaacccagcagccgagaagaggcccagcagctgtgggaggctgaaaaggtcaaaatgcggcaaatcctggacaaacagcagaagcagatggtggaggactaccagtggctcaggcaggaggagaagtccctggaccccatggtttatatgaatgataagtccccattgacgccagagaaggaggtcggctacctggagttcacagggcccccacagaagcccccgaggctgggcgcacagtccatccagcccacagctaacctggaccggactgatgacctggtgtacctcaatgtcatggagctggtgcgggccgtgctggagctcaagaatgagctctgtcagctgccccccgagggctacgtggtggtggtgaagaatgtggggctgaccctgcggaagctcatcgggagcgtggatgatctcctgccttccttgccgtcatcttcacggacagagatcgagggcacccagaaactgctcaacaaagacctggcagagctcatcaacaagatgcggctggcacagcagaacgccgtgacctccctaagtgaggagtgcaagaggcagatgctgacggcttcacacaccctggctgtggacgccaagaacctgctcgacgctgtggaccaggccaaggttctggccaatctggcccacccacctgcagagtgacggagggtgggggccacctgcctgcgtcttccgcccctgcctgccatgtacctcccctgccttgctgttggtcatgtgggtcttccagggggaaggccaaggggagtcaccttcccttgccactttgcacgacgccctctccccacccctacccctggctgtactgctcaggctgcagctggacagaggggactctgggctatggacacagggtgacggtgacaaagatggctcagagggggactgctgctgcctggccactgctccctaagccagcctggtccatgcagggggctcctgggggtggggaggtgtcacatggtgcccctagctttatatatggacatggcaggccgatttgggaaccaagctattcctttcccttcctcttcggccctcagatgtcccttgatgcacagagaagctggggaggagctttgttttgggggtcaggcagccagtgagatgagggatgggcctggcattcttgtacagtgtatattgaaatttatttaatgtgagtttggtctggactgacagcatgtgccctcctgagggaggacctggggcacagtccaggaacaagctaattgggagtccaggcacaggatgctgtgttgtcaacaaaccaagcatcagggggaagaagcagagagatgcggccaagataggaccttgggccaaatccgctctcttcctgcccctctttctctttcttcctttactttcccttgcttttccctcttttcttactcctcctctttctctccccaacccccattctcatctgcacccttcttttctcatgtgtttgcataaacattcttttaacttctttctatttgacttgtggttgaattaaaattgtcccatttgc

SEQ ID NO: 341335 - DNA, 4555 bp, Artificial Sequence
  derived and/or modified sequence
gcagttcccgcctcctcaggtccgggcgggtccctggccggggtagcacggaagggtctcccaggcggcgtagtagggcttccgtgttactggaaacctacttccggctgcaaatgggaaaaggagcctctaccttaaccaatccccgggaacctcaggcccgcggatgggagaaaccagagatgccaacttcctgcttccgaagtagtggctgggtcttaaagcaccgatgtttctgcattgaatagccctggaagacagaattcttgtctctccaaagatctggcagacttattcccaattataagagatccttgcaaaggaggtgtcttgcttcaccttcaccttccactgtgattgtaagttttctgaggcctcgccagccatgcggaactgaataggactagcaacttcatagacggttgtgaagacaagctagacggcagatgaaagttcttggcacagagtgaacacttgataaactatatggcagccacagcctccggagccgttgcacacctacctgcccggccgacttacctgtacttgccgccgtcccggctcacctggcggtgcccgaggagtagtcgctggagtccgcgcctccctgggactgcaatgtgccgatcttagctgctgcctgagaggatgtctggggtgtccgagcccctgagtcgagtaaagttgggcacgttacgccggcctgaaggccctgcagagcccatggtggtggtaccagtagatgtggaaaaggaggacgtgcgtatcctcaaggtctgcttctatagcaacagcttcaatcctgggaaaaacttcaaactggtcaaatgcactgtccagacggagatccgggagatcatcacctccatcctgctgagcgggcggatcgggcccaacatccggttggctgagtgctatgggctgaggctgaagcacatgaagtccgatgagatccactggctgcacccacagatgacggtgggtgaggtgcaggacaagtatgagtgtctgcacgtggaagccgagtggaggtatgaccttcaaatccgctacttgccagaagacttcatggagagcctgaaggaggacaggaccacgctgctctatttttaccaacagctccggaacgactacatgcagcgctacgccagcaaggtcagcgagggcatggccctgcagctgggctgcctggagctcaggcggttcttcaaggatatgccccacaatgcacttgacaagaagtccaacttcgagctcctagaaaaggaagtggggctggacttgtttttcccaaagcagatgcaggagaacttaaagcccaaacagttccggaagatgatccagcagaccttccagcagtacgcctcgctcagggaggaggagtgcgtcatgaagttcttcaacactctcgccggcttcgccaacatcgaccaggagacctaccgctgtgaactcattcaaggatggaacattactgtggacctggtcattggccctaaagggatccgccagctgactagtcaggacgcaaagcccacctgcctggccgagttcaagcagatcaggtccatcaggtgcctcccgctggaggagggccaggcagtacttcagctgggcattgaaggtgccccccaggccttgtccatcaaaacctcatccctagcagaggctgagaacatggctgacctcatagacggctactgccggctgcagggtgagcaccaaggctctctcatcatccatcctaggaaagatggtgagaagcggaacagcctgccccagatccccatgctaaacctggaggcccggcggtcccacctctcagagagctgcagcatagagtcagacatctacgcagagattcccgacgaaaccctgcgaaggcccggaggtccacagtatggcattgcccgtgaagatgtggtcctgaatcgtattcttggggaaggcttttttggggaggtctatgaaggtgtctacacaaatcacaaaggggagaaaatcaatgtagctgtcaagacctgcaagaaagactgcactctggacaacaaggagaagttcatgagcgaggcagtgatcatgaagaacctcgaccacccgcacatcgtgaagctgatcggcatcattgaagaggagcccacctggatcatcatggaattgtatccctatggggagctgggccactacctggagcggaacaagaactccctgaaggtgctcaccctcgtgctgtactcactgcagatatgcaaagccatggcctacctggagagcatcaactgcgtgcacagggacattgctgtccggaacatcctggtggcctcccctgagtgtgtgaagctgggggactttggtctttcccggtacattgaggacgaggactattacaaagcctctgtgactcgtctccccatcaaatggatgtccccagagtccattaacttccgacgcttcacgacagccagtgacgtctggatgttcgccgtgtgcatgtgggagatcctgagctttgggaagcagcccttcttctggctggagaacaaggatgtcatcggggtgctggagaaaggagaccggctgcccaagcctgatctctgtccaccggtcctttataccctcatgacccgctgctgggactacgaccccagtgaccggccccgcttcaccgagctggtgtgcagcctcagtgacgtttatcagatggagaaggacattgccatggagcaagagaggaatgctcgctaccgaacccccaaaatcttggagcccacagccttccaggaacccccacccaagcccagccgacctaagtacagaccccctccgcaaaccaacctcctggctccaaagctgcagttccaggttcctgagggtctgtgtgccagctctcctacgctcaccagccctatggagtatccatctcccgttaactcactgcacaccccacctctccaccggcacaatgtcttcaaacgccacagcatgcgggaggaggacttcatccaacccagcagccgagaagaggcccagcagctgtgggaggctgaaaaggtcaaaatgcggcaaatcctggacaaacagcagaagcagatggtggaggactaccagtggctcaggcaggaggagaagtccctggaccccatggtttatatgaatgataagtccccattgacgccagagaaggaggtcggctacctggagttcacagggcccccacagaagcccccgaggctgggcgcacagtccatccagcccacagctaacctggaccggactgatgacctggtgtacctcaatgtcatggagctggtgcgggccgtgctggagctcaagaatgagctctgtcagctgccccccgagggctacgtggtggtggtgaagaatgtggggctgaccctgcggaagctcatcgggagcgtggatgatctcctgccttccttgccgtcatcttcacggacagagatcgagggcacccagaaactgctcaacaaagacctggcagagctcatcaacaagatgcggctggcacagcagaacgccgtgacctccctaagtgaggagtgcaagaggcagatgctgacggcttcacacaccctggctgtggacgccaagaacctgctcgacgctgtggaccaggccaaggttctggccaatctggcccacccacctgcagagtgacggagggtgggggccacctgcctgcgtcttccgcccctgcctgccatgtacctcccctgccttgctgttggtcatgtgggtcttccagggggaaggccaaggggagtcaccttcccttgccactttgcacgacgccctctccccacccctacccctggctgtactgctcaggctgcagctggacagaggggactctgggctatggacacagggtgacggtgacaaagatggctcagagggggactgctgctgcctggccactgctccctaagccagcctggtccatgcagggggctcctgggggtggggaggtgtcacatggtgcccctagctttatatatggacatggcaggccgatttgggaaccaagctattcctttcccttcctcttcggccctcagatgtcccttgatgcacagagaagctggggaggagctttgttttgggggtcaggcagccagtgagatgagggatgggcctggcattcttgtacagtgtatattgaaatttatttaatgtgagtttggtctggactgacagcatgtgccctcctgagggaggacctggggcacagtccaggaacaagctaattgggagtccaggcacaggatgctgtgttgtcaacaaaccaagcatcagggggaagaagcagagagatgcggccaagataggaccttgggccaaatccgctctcttcctgcccctctttctctttcttcctttactttcccttgcttttccctcttttcttactcctcctctttctctccccaacccccattctcatctgcacccttcttttctcatgtgtttgcataaacattcttttaacttctttctatttgacttgtggttgaattaaaattgtcccatttgc

SEQ ID NO: 341336 - protein, 298 aa, Artificial Sequence
  derived and/or modified sequence
MWSWKCLLFWAVLVTATLCTARPSPTLPEQAQPWGAPVEVESFLVHPGDLLQLRCRLRDDVQSINWLRDGVQLAESNRTRITGEEVEVQDSVPADSGLYACVTSSPSGSDTTYFSVNVSDALPSSEDDDDDDDSSSEEKETDNTKPNRMPVAPYWTSPEKMEKKLHAVPAAKTVKFKCPSSGTPNPTLRWLKNGKEFKPDHRIGGYKVRYATWSIIMDSVVPSDKGNYTCIVENEYGSINHTYQLDVVERSPHRPILQAGLPANKTVALGSNVEFMCKVYSDPQPHIQWLKHIEVNGS

SEQ ID NO: 341337 - DNA, 5925 bp, Artificial Sequence
  derived and/or modified sequence
agatgcaggggcgcaaacgccaaaggagaccaggctgtaggaagagaagggcagagcgccggacagctcggcccgctccccgtcctttggggccgcggctggggaactacaaggcccagcaggcagctgcagggggcggaggcggaggagggaccagcgcgggtgggagtgagagagcgagccctcgcgccccgccggcgcatagcgctcggagcgctcttgcggccacaggcgcggcgtcctcggcggcgggcggcagctagcgggagccgggacgccggtgcagccgcagcgcgcggaggaacccgggtgtgccgggagctgggcggccacgtccggacgggaccgagacccctcgtagcgcattgcggcgacctcgccttccccggccgcgagcgcgccgctgcttgaaaagccgcggaacccaaggacttttctccggtccgagctcggggcgccccgcagggcgcacggtacccgtgctgcagtcgggcacgccgcggcgccggggcctccgcagggcgatggagcccggtctgcaaggaaagtgaggcgccgccgctgcgttctggaggaggggggcacaaggtctggagaccccgggtggcggacgggagccctccccccgccccgcctccggggcaccagctccggctccattgttcccgcccgggctggaggcgccgagcaccgagcgccgccgggagtcgagcgccggccgcggagctcttgcgaccccgccaggacccgaacagagcccgggggcggcgggccggagccggggacgcgggcacacgcccgctcgcacaagccacggcggactctcccgaggcggaacctccacgccgagcgagggtcagtttgaaaaggaggatcgagctcactgtggagtatccatggagatgtggagccttgtcaccaacctctaactgcagaactgggatgtggagctggaagtgcctcctcttctgggctgtgctggtcacagccacactctgcaccgctaggccgtccccgaccttgcctgaacaagcccagccctggggagcccctgtggaagtggagtccttcctggtccaccccggtgacctgctgcagcttcgctgtcggctgcgggacgatgtgcagagcatcaactggctgcgggacggggtgcagctggcggaaagcaaccgcacccgcatcacaggggaggaggtggaggtgcaggactccgtgcccgcagactccggcctctatgcttgcgtaaccagcagcccctcgggcagtgacaccacctacttctccgtcaatgtttcagatgctctcccctcctcggaggatgatgatgatgatgatgactcctcttcagaggagaaagaaacagataacaccaaaccaaaccgtatgcccgtagctccatattggacatccccagaaaagatggaaaagaaattgcatgcagtgccggctgccaagacagtgaagttcaaatgcccttccagtgggaccccaaaccccacactgcgctggttgaaaaatggcaaagaattcaaacctgaccacagaattggaggctacaaggtccgttatgccacctggagcatcataatggactctgtggtgccctctgacaagggcaactacacctgcattgtggagaatgagtacggcagcatcaaccacacataccagctggatgtcgtggagcggtcccctcaccggcccatcctgcaagcagggttgcccgccaacaaaacagtggccctgggtagcaacgtggagttcatgtgtaaggtgtacagtgacccgcagccgcacatccagtggctaaagcacatcgaggtgaatgggagcaagattggcccagacaacctgccttatgtccagatcttgaagactgctggagttaataccaccgacaaagagatggaggtgcttcacttaagaaatgtctcctttgaggacgcaggggagtatacgtgcttggcgggtaactctatcggactctcccatcactctgcatggttgaccgttctggaagccctggaagagaggccggcagtgatgacctcgcccctgtacctggagatcatcatctattgcacaggggccttcctcatctcctgcatggtggggtcggtcatcgtctacaagatgaagagtggtaccaagaagagtgacttccacagccagatggctgtgcacaagctggccaagagcatccctctgcgcagacaggtaacagtgtctgctgactccagtgcatccatgaactctggggttcttctggttcggccatcacggctctcctccagtgggactcccatgctagcaggggtctctgagtatgagcttcccgaagaccctcgctgggagctgcctcgggacagactggtcttaggcaaacccctgggagagggctgctttgggcaggtggtgttggcagaggctatcgggctggacaaggacaaacccaaccgtgtgaccaaagtggctgtgaagatgttgaagtcggacgcaacagagaaagacttgtcagacctgatctcagaaatggagatgatgaagatgatcgggaagcataagaatatcatcaacctgctgggggcctgcacgcaggatggtcccttgtatgtcatcgtggagtatgcctccaagggcaacctgcgggagtacctgcaggcccggaggcccccagggctggaatactgctacaaccccagccacaacccagaggagcagctctcctccaaggacctggtgtcctgcgcctaccaggtggcccgaggcatggagtatctggcctccaagaaggtgtggaacctgaaggctcccctggtgcatacaccgagacctggcagccaggaatgtcctggtgacagaggacaatgtgatgaagatagcagactttggcctcgcacgggacattcaccacatcgactactataaaaagacaaccaacggccgactgcctgtgaagtggatggcacccgaggcattatttgaccggatctacacccaccagagtgatgtgtggtctttcggggtgctcctgtgggagatcttcactctgggcggctccccataccccggtgtgcctgtggaggaacttttcaagctgctgaaggagggtcaccgcatggacaagcccagtaactgcaccaacgagctgtacatgatgatgcgggactgctggcatgcagtgccctcacagagacccaccttcaagcagctggtggaagacctggaccgcatcgtggccttgacctccaaccaggagtacctggacctgtccatgcccctggaccagtactcccccagctttcccgacacccggagctctacgtgctcctcaggggaggattccgtcttctctcatgagccgctgcccgaggagccctgcctgccccgacacccagcccagcttgccaatggcggactcaaacgccgctgactgccacccacacgccctccccagactccaccgtcagctgtaaccctcacccacagcccctgctgggcccaccacctgtccgtccctgtcccctttcctgctggcaggagccggctgcctaccaggggccttcctgtgtggcctgccttcaccccactcagctcacctctccctccacctcctctccacctgctggtgagaggtgcaaagaggcagatctttgctgccagccacttcatcccctcccagatgttggaccaacacccctccctgccaccaggcactgcctggagggcagggagtgggagccaatgaacaggcatgcaagtgagagcttcctgagctttctcctgtcggtttggtctgttttgccttcacccataagcccctcgcactctggtggcaggtgccttgtcctcagggctacagcagtagggaggtcagtgcttcgtgcctcgattgaaggtgacctctgccccagataggtggtgccagtggcttattaattccgatactagtttgctttgctgaccaaatgcctggtaccagaggatggtgaggcgaaggccaggttgggggcagtgttgtggccctggggcccagccccaaactgggggctctgtatatagctatgaagaaaacacaaagtgtataaatctgagtatatatttacatgtctttttaaaagggtcgttaccagagatttacccatcgggtaagatgctcctggtggctgggaggcatcagttgctatatattaaaaacaaaaaagaaaaaaaaggaaaatgtttttaaaaaggtcatatattttttgctacttttgctgttttatttttttaaattatgttctaaacctattttcagtttaggtccctcaataaaaattgctgctgcttcatttatctatgggctgtatgaaaagggtgggaatgtccactggaaagaagggacacccacgggccctggggctaggtctgtcccgagggcaccgcatgctcccggcgcaggttccttgtaacctcttcttcctaggtcctgcacccagacctcacgacgcacctcctgcctctccgctgcttttggaaagtcagaaaaagaagatgtctgcttcgagggcaggaaccccatccatgcagtagaggcgctgggcagagagtcaaggcccagcagccatcgaccatggatggtttcctccaaggaaaccggtggggttgggctggggagggggcacctacctaggaatagccacggggtagagctacagtgattaagaggaaagcaagggcgcggttgctcacgcctgtaatcccagcactttgggacaccgaggtgggcagatcacttcaggtcaggagtttgagaccagcctggccaacttagtgaaaccccatctctactaaaaatgcaaaaattatccaggcatggtggcacacgcctgtaatcccagctccacaggaggctgaggcagaatcccttgaagctgggaggcggaggttgcagtgagccgagattgcgccattgcactccagcctgggcaacagagaaaacaaaaaggaaaacaaatgatgaaggtctgcagaaactgaaacccagacatgtgtctgccccctctatgtgggcatggttttgccagtgcttctaagtgcaggagaacatgtcacctgaggctagttttgcattcaggtccctggcttcgtttcttgttggtatgcctccccagatcgtccttcctgtatccatgtgaccagactgtatttgttgggactgtcgcagatcttggcttcttacagttcttcctgtccaaactccatcctgtccctcaggaacggggggaaaattctccgaatgtttttggttttttggctgcttggaatttacttctgccacctgctggtcatcactgtcctcactaagtggattctggctcccccgtacctcatggctcaaactaccactcctcagtcgctatattaaagcttatattttgctggattactgctaaatacaaaagaaagttcaatatgttttcatttctgtagggaaaatgggattgctgctttaaatttctgagctagggattttttggcagctgcagtgttggcgactattgtaaaattctctttgtttctctctgtaaatagcacctgctaacattacaatttgtatttatgtttaaagaaggcatcatttggtgaacagaactaggaaatgaatttttagctcttaaaagcatttgctttgagaccgcacaggagtgtctttccttgtaaaacagtgatgataatttctgccttggccctaccttgaagcaatgttgtgtgaagggatgaagaatctaaaagtcttcataagtccttgggagaggtgctagaaaaatataaggcactatcataattacagtgatgtccttgctgttactactcaaatcacccacaaatttccccaaagactgcgctagctgtcaaataaaagacagtgaaattgacctg

SEQ ID NO: 341338 - DNA, 5900 bp, Artificial Sequence
  derived and/or modified sequence
agatgcaggggcgcaaacgccaaaggagaccaggctgtaggaagagaagggcagagcgccggacagctcggcccgctccccgtcctttggggccgcggctggggaactacaaggcccagcaggcagctgcagggggcggaggcggaggagggaccagcgcgggtgggagtgagagagcgagccctcgcgccccgccggcgcatagcgctcggagcgctcttgcggccacaggcgcggcgtcctcggcggcgggcggcagctagcgggagccgggacgccggtgcagccgcagcgcgcggaggaacccgggtgtgccgggagctgggcggccacgtccggacgggaccgagacccctcgtagcgcattgcggcgacctcgccttccccggccgcgagcgcgccgctgcttgaaaagccgcggaacccaaggacttttctccggtccgagctcggggcgccccgcagggcgcacggtacccgtgctgcagtcgggcacgccgcggcgccggggcctccgcagggcgatggagcccggtctgcaaggaaagtgaggcgccgccgctgcgttctggaggaggggggcacaaggtctggagaccccgggtggcggacgggagccctccccccgccccgcctccggggcaccagctccggctccattgttcccgcccgggctggaggcgccgagcaccgagcgccgccgggagtcgagcgccggccgcggagctcttgcgaccccgccaggacccgaacagagcccgggggcggcgggccggagccggggacgcgggcacacgcccgctcgcacaagccacggcggactctcccgaggcggaacctccacgccgagcgagggtcagtttgaaaaggaggatcgagctcactgtggagtatccatggagatgtggagccttgtcaccaacctctaactgcagaactgggatgtggagctggaagtgcctcctcttctgggctgtgctggtcacagccacactctgcaccgctaggccgtccccgaccttgcctgaacaagcccagccctggggagcccctgtggaagtggagtccttcctggtccaccccggtgacctgctgcagcttcgctgtcggctgcgggacgatgtgcagagcatcaactggctgcgggacggggtgcagctggcggaaagcaaccgcacccgcatcacaggggaggaggtggaggtgcaggactccgtgcccgcagactccggcctctatgcttgcgtaaccagcagcccctcgggcagtgacaccacctacttctccgtcaatgtttcagatgctctcccctcctcggaggatgatgatgatgatgatgactcctcttcagaggagaaagaaacagataacaccaaaccaaaccgtatgcccgtagctccatattggacatccccagaaaagatggaaaagaaattgcatgcagtgccggctgccaagacagtgaagttcaaatgcccttccagtgggaccccaaaccccacactgcgctggttgaaaaatggcaaagaattcaaacctgaccacagaattggaggctacaaggtccgttatgccacctggagcatcataatggactctgtggtgccctctgacaagggcaactacacctgcattgtggagaatgagtacggcagcatcaaccacacataccagctggatgtcgtggagcggtcccctcaccggcccatcctgcaagcagggttgcccgccaacaaaacagtggccctgggtagcaacgtggagttcatgtgtaaggtgtacagtgacccgcagccgcacatccagtggctaaagcacatcgaggtgaatgggagcaagattggcccagacaacctgccttatgtccagatcttgaagactgctggagttaataccaccgacaaagagatggaggtgcttcacttaagaaatgtctcctttgaggacgcaggggagtatacgtgcttggcgggtaactctatcggactctcccatcactctgcatggttgaccgttctggaagccctggaagagaggccggcagtgatgacctcgcccctgtacctggagatcatcatctattgcacaggggccttcctcatctcctgcatggtggggtcggtcatcgtctacaagatgaagagtggtaccaagaagagtgacttccacagccagatggctgtgcacaagctggccaagagcatccctctgcgcagacaggtaacagtgtctgctgactccagtgcatccatgaactctggggttcttctggttcggccatcacggctctcctccagtgggactcccatgctagcaggggtctctgagtatgagcttcccgaagaccctcgctgggagctgcctcgggacagactggtcttaggcaaacccctgggagagggctgctttgggcaggtggtgttggcagaggctatcgggctggacaaggacaaacccaaccgtgtgaccaaagtggctgtgaagatgttgaagtcggacgcaacagagaaagacttgtcagacctgatctcagaaatggagatgatgaagatgatcgggaagcataagaatatcatcaacctgctgggggcctgcacgcaggatggtcccttgtatgtcatcgtggagtatgcctccaagggcaacctgcgggagtacctgcaggcccggaggcccccagggctggaatactgctacaaccccagccacaacccagaggagcagctctcctccaaggacctggtgtcctgcgcctaccaggtggcccgaggcatggagtatctggcctccaagaagtgcatacaccgagacctggcagccaggaatgtcctggtgacagaggacaatgtgatgaagatagcagactttggcctcgcacgggacattcaccacatcgactactataaaaagacaaccaacggccgactgcctgtgaagtggatggcacccgaggcattatttgaccggatctacacccaccagagtgatgtgtggtctttcggggtgctcctgtgggagatcttcactctgggcggctccccataccccggtgtgcctgtggaggaacttttcaagctgctgaaggagggtcaccgcatggacaagcccagtaactgcaccaacgagctgtacatgatgatgcgggactgctggcatgcagtgccctcacagagacccaccttcaagcagctggtggaagacctggaccgcatcgtggccttgacctccaaccaggagtacctggacctgtccatgcccctggaccagtactcccccagctttcccgacacccggagctctacgtgctcctcaggggaggattccgtcttctctcatgagccgctgcccgaggagccctgcctgccccgacacccagcccagcttgccaatggcggactcaaacgccgctgactgccacccacacgccctccccagactccaccgtcagctgtaaccctcacccacagcccctgctgggcccaccacctgtccgtccctgtcccctttcctgctggcaggagccggctgcctaccaggggccttcctgtgtggcctgccttcaccccactcagctcacctctccctccacctcctctccacctgctggtgagaggtgcaaagaggcagatctttgctgccagccacttcatcccctcccagatgttggaccaacacccctccctgccaccaggcactgcctggagggcagggagtgggagccaatgaacaggcatgcaagtgagagcttcctgagctttctcctgtcggtttggtctgttttgccttcacccataagcccctcgcactctggtggcaggtgccttgtcctcagggctacagcagtagggaggtcagtgcttcgtgcctcgattgaaggtgacctctgccccagataggtggtgccagtggcttattaattccgatactagtttgctttgctgaccaaatgcctggtaccagaggatggtgaggcgaaggccaggttgggggcagtgttgtggccctggggcccagccccaaactgggggctctgtatatagctatgaagaaaacacaaagtgtataaatctgagtatatatttacatgtctttttaaaagggtcgttaccagagatttacccatcgggtaagatgctcctggtggctgggaggcatcagttgctatatattaaaaacaaaaaagaaaaaaaaggaaaatgtttttaaaaaggtcatatattttttgctacttttgctgttttatttttttaaattatgttctaaacctattttcagtttaggtccctcaataaaaattgctgctgcttcatttatctatgggctgtatgaaaagggtgggaatgtccactggaaagaagggacacccacgggccctggggctaggtctgtcccgagggcaccgcatgctcccggcgcaggttccttgtaacctcttcttcctaggtcctgcacccagacctcacgacgcacctcctgcctctccgctgcttttggaaagtcagaaaaagaagatgtctgcttcgagggcaggaaccccatccatgcagtagaggcgctgggcagagagtcaaggcccagcagccatcgaccatggatggtttcctccaaggaaaccggtggggttgggctggggagggggcacctacctaggaatagccacggggtagagctacagtgattaagaggaaagcaagggcgcggttgctcacgcctgtaatcccagcactttgggacaccgaggtgggcagatcacttcaggtcaggagtttgagaccagcctggccaacttagtgaaaccccatctctactaaaaatgcaaaaattatccaggcatggtggcacacgcctgtaatcccagctccacaggaggctgaggcagaatcccttgaagctgggaggcggaggttgcagtgagccgagattgcgccattgcactccagcctgggcaacagagaaaacaaaaaggaaaacaaatgatgaaggtctgcagaaactgaaacccagacatgtgtctgccccctctatgtgggcatggttttgccagtgcttctaagtgcaggagaacatgtcacctgaggctagttttgcattcaggtccctggcttcgtttcttgttggtatgcctccccagatcgtccttcctgtatccatgtgaccagactgtatttgttgggactgtcgcagatcttggcttcttacagttcttcctgtccaaactccatcctgtccctcaggaacggggggaaaattctccgaatgtttttggttttttggctgcttggaatttacttctgccacctgctggtcatcactgtcctcactaagtggattctggctcccccgtacctcatggctcaaactaccactcctcagtcgctatattaaagcttatattttgctggattactgctaaatacaaaagaaagttcaatatgttttcatttctgtagggaaaatgggattgctgctttaaatttctgagctagggattttttggcagctgcagtgttggcgactattgtaaaattctctttgtttctctctgtaaatagcacctgctaacattacaatttgtatttatgtttaaagaaggcatcatttggtgaacagaactaggaaatgaatttttagctcttaaaagcatttgctttgagaccgcacaggagtgtctttccttgtaaaacagtgatgataatttctgccttggccctaccttgaagcaatgttgtgtgaagggatgaagaatctaaaagtcttcataagtccttgggagaggtgctagaaaaatataaggcactatcataattacagtgatgtccttgctgttactactcaaatcacccacaaatttccccaaagactgcgctagctgtcaaataaaagacagtgaaattgacctg

SEQ ID NO: 341339 - DNA, 2469 bp, Artificial Sequence
  derived and/or modified sequence
atgtggagctggaagtgtctgctattctgggccgtgctcgtgactgctacattgtgcacagctcgcccatcgcccaccctgcctgagcaggcccagccgtggggtgccccagtcgaggtagagtcattcctggtccaccccggcgatcttctccagctccgctgccggctgcgtgacgatgtccaaagcattaactggctgagagatggtgtccagctggccgagtcaaaccggaccagaatcaccggggaagaagtggaggttcaggatagcgtccccgcggattccggtctgtatgcgtgtgtgaccagttccccaagcggctctgacactacctacttcagtgtgaatgtatctgacgcgcttccttcttccgaagatgatgacgacgacgatgatagttctagtgaagagaaggagacagacaacactaagcccaatcgcatgcctgtcgccccttattggacttctcccgaaaagatggagaaaaaattgcatgcggtgcccgccgcgaagacagtgaaatttaaatgcccctcaagcgggacaccgaatccaaccctgcggtggcttaaaaatggaaaggaattcaagccagatcacaggatcgggggctataaggtcagatatgccacatggtctatcattatggactcagttgtaccctctgataagggcaattatacatgtatcgtggaaaatgagtacgggtctataaatcatacctaccagctagacgtagtggaacggtctcctcaccgaccaattctgcaagcaggtctgcccgcaaataaaactgttgcactgggtagtaacgtggagtttatgtgcaaggtgtacagcgaccctcagccgcatattcagtggctgaagcacattgaggttaacggcagcaagataggtccagacaatttaccttacgtgcaaatcctgaaaaccgctggtgttaatacaactgacaaggagatggaagtacttcatctgagaaacgtttcttttgaggatgccggtgagtacacttgccttgccggaaactccattggactttcacaccactcagcttggctgaccgtgcttgaggcactggaggagcgtcctgctgtgatgaccagcccgctgtatctggagattatcatctattgtactggtgcttttttaatctcatgtatggtgggttccgtgatcgtctacaagatgaagagcggaacaaagaagagcgacttccatagtcagatggctgtgcacaaactcgccaaatccatacccttaaggagacaggtgacagtcagtgctgactcctctgcttcaatgaattctggcgtgctcctggtcagaccgtccaggctatccagctctgggactcccatgctggcgggcgtaagcgaatatgaactgccagaggacccacgctgggaactccccagggacagactcgtgcttggtaaaccccttggcgagggatgtttcggacaggtcgttctcgcggaagccatcggcctcgacaaggataaacctaatcgggtgaccaaagtggctgttaagatgttgaaatccgacgccacagagaaggacctttccgacttaattagtgagatggaaatgatgaagatgattggcaagcacaaaaacatcatcaatctgctaggggcttgcacccaggacggcccactctatgtcatcgtggagtatgcgtccaaaggcaacttaagggagtaccttcaggcccgcagaccacccggcttagagtattgttacaacccctcgcacaaccctgaagagcaattgtcttcgaaggatctggtgagctgtgcttaccaggtggctcggggcatggaatatctggcttccaaaaagtgcatacatcgggatctggccgcgagaaatgttctggtgactgaggataatgtgatgaagattgctgatttcgggctcgcgcgggacatacatcatatagattattacaagaagaccactaacggccgcctcccagtgaagtggatggcccctgaagcactctttgatagaatatacacccatcaatccgacgtttggagtttcggcgtactactatgggagatctttactctaggcggctcaccctacccaggagtgcccgttgaggagctcttcaaactgctgaaagaaggacaccggatggataagccaagcaattgcaccaacgagctatatatgatgatgcgggactgctggcacgccgtgcccagccagcgcccaaccttcaagcaactggtggaggatttggatagaattgttgcactcacatccaatcaggagtatcttgacctcagtatgcctctggaccagtactccccatcattccccgatactcggagctccacatgttcatcaggtgaggatagcgtgttctctcatgagccattgcccgaagagccttgtttaccacggcatcctgcccagctggcaaatggaggactcaaacgccgttag

SEQ ID NO: 341340 - DNA, 2469 bp, Artificial Sequence
  derived and/or modified sequence
atgtggagctggaagtgcctgctcttctgggccgtgctggtgacagccaccctgtgcacagcccggcccagccccaccctgcctgagcaggcccagccctggggcgcccctgtggaggtggagagcttcctggtgcaccctggggacctgctgcagctgcgctgccgcctgagagatgatgtgcagagcatcaactggctgagagatggagtgcagctggccgagagcaacagaacccgcatcaccggggaggaggtggaggtgcaggacagcgtgcctgctgacagcggcctgtatgcctgtgtgaccagcagccccagcggcagtgacaccacctacttctctgtgaatgtgtctgatgccctgcccagcagtgaagatgatgatgatgatgatgacagcagcagcgaggagaaggagacagacaacaccaagcccaacaggatgcctgtggccccctactggaccagccctgagaagatggagaagaagctgcatgctgtgcctgctgccaagacagtgaagttcaagtgccccagcagcggcacccccaaccccaccctgcgctggctgaagaatggcaaggagttcaagccagaccacagaattggaggctacaaggtgcgctatgccacctggagcatcatcatggattctgtggtgcccagcgacaagggcaactacacctgcatcgtggagaatgaatatggcagcatcaaccacacctaccagctggatgtggtggagaggagcccccaccggcccatcctgcaggccggcctgcctgccaacaagacagtggccctgggcagcaatgtggagttcatgtgcaaggtgtacagcgacccccagccccacatccagtggctgaagcacatcgaggtgaatggcagcaagattggccctgacaacctgccctacgtgcagatcctgaagacagctggggtgaacaccacagacaaggagatggaggtgctgcacctgagaaatgtgtcctttgaagatgctggggagtacacctgcctggccggcaacagcatcggcctgagccaccacagcgcctggctgactgtgctggaggccctggaggagaggcctgctgtgatgaccagccccctgtacctggagatcatcatctactgcaccggggccttcctgatcagctgcatggtgggctctgtgattgtgtacaagatgaagagcggcaccaagaagagtgacttccacagccagatggctgtgcacaagctggccaagagcatccccctgcggcggcaggtgacagtgtctgctgacagcagcgcctccatgaacagcggcgtgctgctggtgcggcccagccggctgagcagcagcggcacccccatgctggccggcgtgtctgaatatgagctgcctgaggacccccgctgggagctgccccgggaccggctggtgctgggcaagcccctgggggagggctgcttcggccaggtggtgctggccgaggccatcggcctggacaaggacaagcccaacagagtgaccaaggtggccgtgaagatgctgaagagtgatgccacagagaaggacctgagtgacctgatcagcgagatggagatgatgaagatgattggcaagcacaagaacatcatcaacctgctgggcgcctgcacccaggacggccccctgtatgtgattgtggagtatgccagcaagggcaacctgcgggagtacctgcaggcccggcggcccccaggcctggagtactgctacaaccccagccacaaccctgaggagcagctgagcagcaaggacctggtgtcctgtgcctaccaggtggcccggggcatggagtacctggccagcaagaagtgcatccaccgggacctggccgccagaaatgtgctggtgacagaagataatgtgatgaagattgctgactttggcctggcccgggacatccaccacatcgactactacaagaagaccaccaacggccgcctgcctgtgaagtggatggcccctgaggccctgtttgaccgcatctacacccaccagagtgatgtgtggagctttggagtgctgctgtgggagatcttcaccctgggcggcagcccctacccaggagtgcctgtggaggagctgttcaagctgctgaaggagggccacaggatggacaagcccagcaactgcaccaatgagctgtacatgatgatgagggactgctggcatgctgtgcccagccagaggcccaccttcaagcagctggtggaggacctggacagaattgtggccctgaccagcaaccaggagtacctggacctgtccatgcccctggaccagtacagccccagcttcccagacaccaggagcagcacctgcagcagcggggaggacagcgtcttcagccatgagcccctgcctgaggagccctgcctgcccaggcacccagcccagctggccaacggcggcctgaagagaagatag

SEQ ID NO: 341341 - DNA, 2469 bp, Artificial Sequence
  derived and/or modified sequence
atgtggagctggaagtgcctgctgttctgggccgtgctggtgaccgctacactttgtacagcgcgcccctccccaactttacctgaacaggcacaaccctggggagcccccgtggaggtagaatctttcctggtccacccgggagatctgctgcaacttagatgcaggcttagggatgatgttcaatcgataaattggctaagagatggcgtacagctggcagaaagcaaccggacaagaatcaccggagaagaagttgaagttcaagattctgtcccggccgacagcggcctctatgcttgcgtgacttcttctcctagcgggtctgacaccacctattttagcgttaacgtgagtgatgctctcccctcttccgaagatgacgacgacgacgatgatagctcaagcgaggagaaggagactgacaataccaagccgaacaggatgccggtcgccccatattggacttcccccgagaagatggaaaagaaactccacgccgtccccgctgcaaagaccgttaaatttaagtgcccatcatctggtacacccaatcccaccctgcgctggttaaaaaacggaaaggagtttaaacccgaccaccggatcggcggctacaaagtaaggtatgcaacctggtcaatcatcatggacagcgttgttccatccgacaagggcaactatacttgtattgtggagaacgagtatgggtccatcaatcacacgtaccagctcgatgtggtggagcgctctccacaccgtcctatcctacaggctggcctgcccgctaataagacagtagcgctaggcagcaatgtggaatttatgtgtaaagtgtacagtgatccacagccccatatccaatggttgaaacacatcgaggtcaatggctccaaaatcgggccagacaacctgccctatgtacagattctgaaaactgctggagtcaacacaacagataaagaaatggaggtgttgcacttgcgcaacgtctccttcgaggacgcaggagaatatacatgtctcgctggcaattctattggactgagtcatcactcagcatggctgaccgtactggaagccttggaggaaaggcccgccgtaatgacgtcacccctttatctcgagatcatcatctactgtaccggtgccttcctgatatcctgcatggttggatcagtgattgtttacaaaatgaagtctggcaccaagaaatcggacttccatagtcagatggctgttcacaagctcgccaagtcaattcccttacgccgccaggtgactgtgtccgctgactcaagtgcctctatgaattccggggtacttctcgtgcgcccctctagactctcttcatcaggcacacctatgcttgcgggcgtgagtgagtatgagctgcctgaagaccctagatgggaattgccccgggacagacttgttctggggaaaccacttggagaggggtgcttcgggcaggtagtgctcgccgaggccattggcctggacaaggacaaacctaaccgggttacaaaagtggcagtcaagatgctgaagtctgacgccacagagaaagacctttccgacctcatatctgaaatggagatgatgaagatgattggcaaacataagaacatcattaatctgctgggcgcctgcacacaggacggtccgctgtacgtcatcgtcgagtacgcttccaagggaaatctgcgagaatacttacaagcgaggcgccctccaggcctcgagtactgctacaacccctctcacaaccctgaggaacaattgagttcgaaggacctggtcagttgtgcctatcaggtggctcgggggatggagtacctcgcctccaagaaatgcatacacagagaccttgccgcccgcaatgtgctcgtcaccgaagacaatgtgatgaagattgcagatttcgggctcgcccgagatatccaccacatcgactattacaaaaagacgacgaacgggagactgcctgttaagtggatggccccagaagccttattcgacaggatctacacccatcaatccgatgtgtggtcattcggggttttgctttgggagatctttacgctaggggggagcccctatccaggcgtgcccgtagaagagctgtttaagcttctgaaggaaggtcatagaatggacaagccgtcgaactgcactaatgaactctatatgatgatgagagactgctggcatgctgtaccaagccagcggcccactttcaaacagctggtcgaagatctcgatcgcattgtggcgctgaccagcaatcaagagtaccttgatctgagcatgcccctcgaccaatacagcccatccttcccagatacacgctctagtacgtgttcttcaggagaggatagcgtcttctcccacgagcctctgccagaagagccttgtctgccccgccaccccgcccaactggctaatggaggcctaaagcgacgctag

SEQ ID NO: 341342 - DNA, 2469 bp, Artificial Sequence
  derived and/or modified sequence
atgtggtcatggaagtgtctgcttttctgggccgtcctggttaccgcaactctatgcaccgcgagacccagccctactctgccggagcaagcccagccttggggggcacccgtggaggtggaaagctttctcgtgcaccccggtgatctgcttcaattgagatgtcgcctccgcgatgatgtacaaagtatcaactggctgagggatggtgtacaactggctgagagtaataggacccgcattacgggcgaggaagtggaagttcaggactcggttcccgcagacagcggtctgtacgcctgcgtgacgagctctcctagcggatccgacactacttactttagcgtcaacgtgagcgatgctcttccctctagcgaggacgacgatgacgatgatgactcctccagtgaagagaaagagacagataatacaaagcctaaccgtatgccagtggcgccatactggacgtctcccgaaaaaatggagaagaagctccacgcagtgccagccgctaagaccgtgaagtttaagtgtccttctagcgggacaccaaatcctacccttcgctggcttaagaatggcaaggaatttaagcctgaccatcgcattggaggatacaaagtgaggtatgctacatggagtattattatggattcggtcgtgccgtcagataaggggaattatacctgtatcgttgaaaatgaatatgggtctataaaccatacatatcaactggacgttgtagagcgatcgcctcataggcccattctgcaggctgggcttcccgcaaacaagactgtcgcactaggctcaaatgtcgagttcatgtgtaaggtttactctgacccccagccacatatccagtggctaaaacatattgaggtaaatggctctaaaatcggaccagataaccttccttatgtgcagatcctgaagactgccggagtcaacacaaccgacaaagagatggaagtgctgcatctaagaaatgtctcttttgaagacgcaggtgagtacacctgccttgcgggaaactcaatcgggttaagtcaccactctgcctggctaactgttctcgaagctctggaggagagacccgctgtcatgacatcacccctgtacctggaaattatcatctactgtaccggcgcttttctgatttcatgcatggtgggttccgtgatcgtgtacaagatgaagtctggaacaaagaaatcagactttcatagccaaatggccgtgcataagctggctaaatcaatcccattgaggagacaggtgaccgtgagcgcagactcttccgcgtccatgaacagcggtgtgctgctggtgagaccaagccgcctcagcagttccggcactcctatgctggctggcgtaagtgagtatgaactcccagaggaccccaggtgggagctccctcgagatagacttgtactcggaaaacccctgggcgaggggtgctttgggcaggtggtgctggccgaagcaataggactagataaagataaacccaatagagtgacgaaggtggcagttaagatgctcaagtccgatgcaacggagaaggatctcagtgatttgattagcgaaatggagatgatgaaaatgattgggaagcacaagaatatcataaacttgctgggagcctgcactcaggatgggcctttgtacgtcattgtcgaatatgcgagcaaagggaatctgcgtgaatacttgcaggccaggagaccgcctgggcttgaatattgctataatcctagccataaccctgaagagcagctgtcttcaaaggacctggtttcctgtgcctatcaggtggcacgagggatggaatacctggcaagtaagaaatgtatacaccgagacctggctgccagaaacgtcttagtcaccgaagacaacgttatgaagattgctgattttggcctcgcaagggacattcaccatatcgactattataagaaaacaactaacgggagactcccagtgaagtggatggcgccagaggccctcttcgatcgtatctatactcaccagtctgacgtgtggtcattcggcgtcctgctgtgggaaattttcacattaggcggaagcccttatcctggcgtgccagtcgaggagctgtttaaacttctgaaggaagggcaccggatggataagccgagtaattgcactaacgaactgtacatgatgatgagggattgctggcacgccgtgccatcccaaagaccaacatttaagcaacttgtcgaggatttggatagaattgtggcgctcacatctaaccaggagtacctggacttatcaatgcccctggatcagtacagcccttccttcccagacacgaggtcctcaacatgctctagcggtgaagatagcgttttctcgcacgaacccctccccgaagaaccctgtctcccccgacacccagcacaactcgctaatggcggtcttaagcggagatag

SEQ ID NO: 341343 - DNA, 2469 bp, Artificial Sequence
  derived and/or modified sequence
atgtggagctggaagtgcctgctgttctgggccgtgctggtgaccgccaccctgtgcaccgccagacccagccccaccctgcccgagcaggcccagccctggggcgcccccgtggaggtggagagcttcctggtgcaccccggcgacctgctgcagctgagatgcagactgagagacgacgtgcagagcatcaactggctgagagacggcgtgcagctggccgagagcaacagaaccagaatcaccggcgaggaggtggaggtgcaggacagcgtgcccgccgacagcggcctgtacgcctgcgtgaccagcagccccagcggcagcgacaccacctacttcagcgtgaacgtgagcgacgccctgcccagcagcgaggacgacgacgacgacgacgacagcagcagcgaggagaaggagaccgacaacaccaagcccaacagaatgcccgtggccccctactggaccagccccgagaagatggagaagaagctgcacgccgtgcccgccgccaagaccgtgaagttcaagtgccccagcagcggcacccccaaccccaccctgagatggctgaagaacggcaaggagttcaagcccgaccacagaatcggcggctacaaggtgagatacgccacctggagcatcatcatggacagcgtggtgcccagcgacaagggcaactacacctgcatcgtggagaacgagtacggcagcatcaaccacacctaccagctggacgtggtggagagaagcccccacagacccatcctgcaggccggcctgcccgccaacaagaccgtggccctgggcagcaacgtggagttcatgtgcaaggtgtacagcgacccccagccccacatccagtggctgaagcacatcgaggtgaacggcagcaagatcggccccgacaacctgccctacgtgcagatcctgaagaccgccggcgtgaacaccaccgacaaggagatggaggtgctgcacctgagaaacgtgagcttcgaggacgccggcgagtacacctgcctggccggcaacagcatcggcctgagccaccacagcgcctggctgaccgtgctggaggccctggaggagagacccgccgtgatgaccagccccctgtacctggagatcatcatctactgcaccggcgccttcctgatcagctgcatggtgggcagcgtgatcgtgtacaagatgaagagcggcaccaagaagagcgacttccacagccagatggccgtgcacaagctggccaagagcatccccctgagaagacaggtgaccgtgagcgccgacagcagcgccagcatgaacagcggcgtgctgctggtgagacccagcagactgagcagcagcggcacccccatgctggccggcgtgagcgagtacgagctgcccgaggaccccagatgggagctgcccagagacagactggtgctgggcaagcccctgggcgagggctgcttcggccaggtggtgctggccgaggccatcggcctggacaaggacaagcccaacagagtgaccaaggtggccgtgaagatgctgaagagcgacgccaccgagaaggacctgagcgacctgatcagcgagatggagatgatgaagatgatcggcaagcacaagaacatcatcaacctgctgggcgcctgcacccaggacggccccctgtacgtgatcgtggagtacgccagcaagggcaacctgagagagtacctgcaggccagaagaccccccggcctggagtactgctacaaccccagccacaaccccgaggagcagctgagcagcaaggacctggtgagctgcgcctaccaggtggccagaggcatggagtacctggccagcaagaagtgcatccacagagacctggccgccagaaacgtgctggtgaccgaggacaacgtgatgaagatcgccgacttcggcctggccagagacatccaccacatcgactactacaagaagaccaccaacggcagactgcccgtgaagtggatggcccccgaggccctgttcgacagaatctacacccaccagagcgacgtgtggagcttcggcgtgctgctgtgggagatcttcaccctgggcggcagcccctaccccggcgtgcccgtggaggagctgttcaagctgctgaaggagggccacagaatggacaagcccagcaactgcaccaacgagctgtacatgatgatgagagactgctggcacgccgtgcccagccagagacccaccttcaagcagctggtggaggacctggacagaatcgtggccctgaccagcaaccaggagtacctggacctgagcatgcccctggaccagtacagccccagcttccccgacaccagaagcagcacctgcagcagcggcgaggacagcgtgttcagccacgagcccctgcccgaggagccctgcctgcccagacaccccgcccagctggccaacggcggcctgaagagaagatag

SEQ ID NO: 341344 - protein, 820 aa, Artificial Sequence
  derived and/or modified sequence
MWSWKCLLFWAVLVTATLCTARPSPTLPEQAQPWGAPVEVESFLVHPGDLLQLRCRLRDDVQSINWLRDGVQLAESNRTRITGEEVEVQDSVPADSGLYACVTSSPSGSDTTYFSVNVSDALPSSEDDDDDDDSSSEEKETDNTKPNRMPVAPYWTSPEKMEKKLHAVPAAKTVKFKCPSSGTPNPTLRWLKNGKEFKPDHRIGGYKVRYATWSIIMDSVVPSDKGNYTCIVENEYGSINHTYQLDVVERSPHRPILQAGLPANKTVALGSNVEFMCKVYSDPQPHIQWLKHIEVNGSKIGPDNLPYVQILKTAGVNTTDKEMEVLHLRNVSFEDAGEYTCLAGNSIGLSHHSAWLTVLEALEERPAVMTSPLYLEIIIYCTGAFLISCMVGSVIVYKMKSGTKKSDFHSQMAVHKLAKSIPLRRQVSADSSASMNSGVLLVRPSRLSSSGTPMLAGVSEYELPEDPRWELPRDRLVLGKPLGEGCFGQVVLAEAIGLDKDKPNRVTKVAVKMLKSDATEKDLSDLISEMEMMKMIGKHKNIINLLGACTQDGPLYVIVEYASKGNLREYLQARRPPGLEYCYNPSHNPEEQLSSKDLVSCAYQVARGMEYLASKKCIHRDLAARNVLVTEDNVMKIADFGLARDIHHIDYYKKTTNGRLPVKWMAPEALFDRIYTHQSDVWSFGVLLWEIFTLGGSPYPGVPVEELFKLLKEGHRMDKPSNCTNELYMMMRDCWHAVPSQRPTFKQLVEDLDRIVALTSNQEYLDLSMPLDQYSPSFPDTRSSTCSSGEDSVFSHEPLPEEPCLPRHPAQLANGGLKRR

SEQ ID NO: 341345 - DNA, 5590 bp, Artificial Sequence
  derived and/or modified sequence
agcgctcttgcggccacaggcgcggcgtcctcggcggcgggcggcagctagcgggagccgggacgccggtgcagccgcagcgcgcggaggaacccgggtgtgccgggagctgggcggccacgtccggacgggaccgagacccctcgtagcgcattgcggcgacctcgccttccccggccgcgagcgcgccgctgcttgaaaagccgcggaacccaaggacttttctccggtccgagctcggggcgccccgcagggcgcacggtacccgtgctgcagtcgggcacgccgcggcgccggggcctccgcagggcgatggagcccggtctgcaaggaaagtgaggcgccgccgctgcgttctggaggaggggggcacaaggtctggagaccccgggtggcggacgggagccctccccccgccccgcctccggggcaccagctccggctccattgttcccgcccgggctggaggcgccgagcaccgagcgccgccgggagtcgagcgccggccgcggagctcttgcgaccccgccaggacccgaacagagcccgggggcggcgggccggagccggggacgcgggcacacgcccgctcgcacaagccacggcggactctcccgaggcggaacctccacgccgagcgagggtcagtttgaaaaggaggatcgagctcactgtggagtatccatggagatgtggagccttgtcaccaacctctaactgcagaactgggatgtggagctggaagtgcctcctcttctgggctgtgctggtcacagccacactctgcaccgctaggccgtccccgaccttgcctgaacaagcccagccctggggagcccctgtggaagtggagtccttcctggtccaccccggtgacctgctgcagcttcgctgtcggctgcgggacgatgtgcagagcatcaactggctgcgggacggggtgcagctggcggaaagcaaccgcacccgcatcacaggggaggaggtggaggtgcaggactccgtgcccgcagactccggcctctatgcttgcgtaaccagcagcccctcgggcagtgacaccacctacttctccgtcaatgtttcagatgctctcccctcctcggaggatgatgatgatgatgatgactcctcttcagaggagaaagaaacagataacaccaaaccaaaccgtatgcccgtagctccatattggacatccccagaaaagatggaaaagaaattgcatgcagtgccggctgccaagacagtgaagttcaaatgcccttccagtgggaccccaaaccccacactgcgctggttgaaaaatggcaaagaattcaaacctgaccacagaattggaggctacaaggtccgttatgccacctggagcatcataatggactctgtggtgccctctgacaagggcaactacacctgcattgtggagaatgagtacggcagcatcaaccacacataccagctggatgtcgtggagcggtcccctcaccggcccatcctgcaagcagggttgcccgccaacaaaacagtggccctgggtagcaacgtggagttcatgtgtaaggtgtacagtgacccgcagccgcacatccagtggctaaagcacatcgaggtgaatgggagcaagattggcccagacaacctgccttatgtccagatcttgaagactgctggagttaataccaccgacaaagagatggaggtgcttcacttaagaaatgtctcctttgaggacgcaggggagtatacgtgcttggcgggtaactctatcggactctcccatcactctgcatggttgaccgttctggaagccctggaagagaggccggcagtgatgacctcgcccctgtacctggagatcatcatctattgcacaggggccttcctcatctcctgcatggtggggtcggtcatcgtctacaagatgaagagtggtaccaagaagagtgacttccacagccagatggctgtgcacaagctggccaagagcatccctctgcgcagacaggtgtctgctgactccagtgcatccatgaactctggggttcttctggttcggccatcacggctctcctccagtgggactcccatgctagcaggggtctctgagtatgagcttcccgaagaccctcgctgggagctgcctcgggacagactggtcttaggcaaacccctgggagagggctgctttgggcaggtggtgttggcagaggctatcgggctggacaaggacaaacccaaccgtgtgaccaaagtggctgtgaagatgttgaagtcggacgcaacagagaaagacttgtcagacctgatctcagaaatggagatgatgaagatgatcgggaagcataagaatatcatcaacctgctgggggcctgcacgcaggatggtcccttgtatgtcatcgtggagtatgcctccaagggcaacctgcgggagtacctgcaggcccggaggcccccagggctggaatactgctacaaccccagccacaacccagaggagcagctctcctccaaggacctggtgtcctgcgcctaccaggtggcccgaggcatggagtatctggcctccaagaagtgcatacaccgagacctggcagccaggaatgtcctggtgacagaggacaatgtgatgaagatagcagactttggcctcgcacgggacattcaccacatcgactactataaaaagacaaccaacggccgactgcctgtgaagtggatggcacccgaggcattatttgaccggatctacacccaccagagtgatgtgtggtctttcggggtgctcctgtgggagatcttcactctgggcggctccccataccccggtgtgcctgtggaggaacttttcaagctgctgaaggagggtcaccgcatggacaagcccagtaactgcaccaacgagctgtacatgatgatgcgggactgctggcatgcagtgccctcacagagacccaccttcaagcagctggtggaagacctggaccgcatcgtggccttgacctccaaccaggagtacctggacctgtccatgcccctggaccagtactcccccagctttcccgacacccggagctctacgtgctcctcaggggaggattccgtcttctctcatgagccgctgcccgaggagccctgcctgccccgacacccagcccagcttgccaatggcggactcaaacgccgctgactgccacccacacgccctccccagactccaccgtcagctgtaaccctcacccacagcccctgctgggcccaccacctgtccgtccctgtcccctttcctgctggcaggagccggctgcctaccaggggccttcctgtgtggcctgccttcaccccactcagctcacctctccctccacctcctctccacctgctggtgagaggtgcaaagaggcagatctttgctgccagccacttcatcccctcccagatgttggaccaacacccctccctgccaccaggcactgcctggagggcagggagtgggagccaatgaacaggcatgcaagtgagagcttcctgagctttctcctgtcggtttggtctgttttgccttcacccataagcccctcgcactctggtggcaggtgccttgtcctcagggctacagcagtagggaggtcagtgcttcgtgcctcgattgaaggtgacctctgccccagataggtggtgccagtggcttattaattccgatactagtttgctttgctgaccaaatgcctggtaccagaggatggtgaggcgaaggccaggttgggggcagtgttgtggccctggggcccagccccaaactgggggctctgtatatagctatgaagaaaacacaaagtgtataaatctgagtatatatttacatgtctttttaaaagggtcgttaccagagatttacccatcgggtaagatgctcctggtggctgggaggcatcagttgctatatattaaaaacaaaaaagaaaaaaaaggaaaatgtttttaaaaaggtcatatattttttgctacttttgctgttttatttttttaaattatgttctaaacctattttcagtttaggtccctcaataaaaattgctgctgcttcatttatctatgggctgtatgaaaagggtgggaatgtccactggaaagaagggacacccacgggccctggggctaggtctgtcccgagggcaccgcatgctcccggcgcaggttccttgtaacctcttcttcctaggtcctgcacccagacctcacgacgcacctcctgcctctccgctgcttttggaaagtcagaaaaagaagatgtctgcttcgagggcaggaaccccatccatgcagtagaggcgctgggcagagagtcaaggcccagcagccatcgaccatggatggtttcctccaaggaaaccggtggggttgggctggggagggggcacctacctaggaatagccacggggtagagctacagtgattaagaggaaagcaagggcgcggttgctcacgcctgtaatcccagcactttgggacaccgaggtgggcagatcacttcaggtcaggagtttgagaccagcctggccaacttagtgaaaccccatctctactaaaaatgcaaaaattatccaggcatggtggcacacgcctgtaatcccagctccacaggaggctgaggcagaatcccttgaagctgggaggcggaggttgcagtgagccgagattgcgccattgcactccagcctgggcaacagagaaaacaaaaaggaaaacaaatgatgaaggtctgcagaaactgaaacccagacatgtgtctgccccctctatgtgggcatggttttgccagtgcttctaagtgcaggagaacatgtcacctgaggctagttttgcattcaggtccctggcttcgtttcttgttggtatgcctccccagatcgtccttcctgtatccatgtgaccagactgtatttgttgggactgtcgcagatcttggcttcttacagttcttcctgtccaaactccatcctgtccctcaggaacggggggaaaattctccgaatgtttttggttttttggctgcttggaatttacttctgccacctgctggtcatcactgtcctcactaagtggattctggctcccccgtacctcatggctcaaactaccactcctcagtcgctatattaaagcttatattttgctggattactgctaaatacaaaagaaagttcaatatgttttcatttctgtagggaaaatgggattgctgctttaaatttctgagctagggattttttggcagctgcagtgttggcgactattgtaaaattctctttgtttctctctgtaaatagcacctgctaacattacaatttgtatttatgtttaaagaaggcatcatttggtgaacagaactaggaaatgaatttttagctcttaaaagcatttgctttgagaccgcacaggagtgtctttccttgtaaaacagtgatgataatttctgccttggccctaccttgaagcaatgttgtgtgaagggatgaagaatctaaaagtcttcataagtccttgggagaggtgctagaaaaatataaggcactatcataatta

SEQ ID NO: 341346 - DNA, 2463 bp, Artificial Sequence
  derived and/or modified sequence
atgtggtcttggaaatgtcttctgttctgggcggtgctggttacggccacactgtgcacagcaaggccaagtcctacccttcctgagcaggctcagccctggggtgcaccggtggaagttgagtcatttttagtgcacccgggagatctgctccaattgagatgccgcctccgggacgacgtccaatcaattaactggcttagagatggcgttcagctggcagaaagcaaccgtacacgaatcactggcgaagaagtggaggtgcaggattctgtgcctgctgacagcggcctgtacgcttgcgttacatctagcccatccgggagcgacactacgtacttttccgttaacgtctctgatgcactgccatcctccgaagacgatgatgatgatgatgatagcagttcagaagagaaggagactgacaacaccaagcctaacaggatgccggtggcgccgtattggaccagcccagagaagatggagaagaagctccacgctgtgcccgctgcaaaaacggtgaagtttaaatgccccagctccggcacccccaacccaaccctgcggtggctgaaaaacggcaaggaattcaaaccagaccatagaatcggaggatataaggtccgttatgcaacctggtctatcatcatggactcagtagtcccttccgacaaagggaactatacttgcattgtggagaatgaatacggcagcattaatcatacctatcagctggacgtggtggaacgctctccccatcgaccgatcctgcaagctggcctgcctgccaataaaactgttgcactcgggtccaacgttgagttcatgtgtaaggtgtacagcgatcctcagccccacatacagtggctcaaacacattgaagttaatgggagcaagattgggcccgacaatttaccctacgtgcagatcttgaagactgctggtgtgaacactacagataaggagatggaggttctgcacctgcgaaatgtgtcctttgaggatgcaggtgaatacacatgcctcgccggtaattctatcggattatcccatcactcagcatggcttaccgtcttagaggccctggaagagaggccggctgttatgactagtcctctctacctggagattattatttactgcacaggcgcttttctcatcagctgcatggtcggctccgtcattgtctacaagatgaagtctggcaccaagaagtcagatttccattcacaaatggctgtgcacaaactcgccaagtccattccactccgaagacaggtctctgctgatagtagcgcaagcatgaattcaggagtcctcctggtacgcccatcccggctgtcctcaagtggaacccccatgctggctggcgtgtcagagtacgagctgccggaagatcccaggtgggaactcccaagggatcgtctcgtactcgggaaaccccttggcgagggatgctttgggcaggtcgttcttgccgaagccatcggacttgacaaagataagcccaacagggtcacgaaggtggctgtgaagatgttaaagtctgacgcaacagaaaaggatcttagtgacctgatctctgaaatggagatgatgaaaatgatcgggaaacataagaatataataaaccttctcggagcttgcacccaggacggccccctctatgtgattgtggagtatgcctccaaggggaatctccgtgaatacctgcaggcaaggaggcctcctggcctcgaatattgttacaacccctcgcataatcctgaggaacagctcagctctaaggacttagtgtcttgtgcttatcaagtggctagggggatggagtatctggcgagtaagaagtgtatccatcgcgatttagccgccagaaacgtcttggtaaccgaggataatgtaatgaagatagctgactttgggctcgccagagacatccatcacatagattactataagaaaactaccaatggccgcctgcccgttaagtggatggctcccgaagccctctttgaccgcatctatactcaccagtccgacgtgtggagttttggggtgctgctgtgggaaatttttactctgggaggtagtccgtacccaggggttccagttgaggaactgttcaagcttctgaaggagggacatcgtatggacaaaccatccaactgcacaaacgagctgtatatgatgatgagagactgttggcatgctgtgcccagtcagcgcccaaccttcaaacagttggtggaggacttagaccgcatcgttgccctaacaagtaaccaggagtatctggatctgagtatgccccttgatcagtatagtcctagtttccccgatactaggagttctacatgctcctccggggaggacagtgtcttcagccatgagccactgcccgaagaaccctgcctcccacgccatcccgctcagctagcgaacgggggtctcaagcgtcgctag

SEQ ID NO: 341347 - DNA, 2463 bp, Artificial Sequence
  derived and/or modified sequence
atgtggagctggaagtgcctgctcttctgggccgtgctggtgacagccaccctgtgcacagcccggcccagccccaccctgcctgagcaggcccagccctggggcgcccctgtggaggtggagagcttcctggtgcaccctggggacctgctgcagctgcgctgccgcctgagagatgatgtgcagagcatcaactggctgagagatggagtgcagctggccgagagcaacagaacccgcatcaccggggaggaggtggaggtgcaggacagcgtgcctgctgacagcggcctgtatgcctgtgtgaccagcagccccagcggcagtgacaccacctacttctctgtgaatgtgtctgatgccctgcccagcagtgaagatgatgatgatgatgatgacagcagcagcgaggagaaggagacagacaacaccaagcccaacaggatgcctgtggccccctactggaccagccctgagaagatggagaagaagctgcatgctgtgcctgctgccaagacagtgaagttcaagtgccccagcagcggcacccccaaccccaccctgcgctggctgaagaatggcaaggagttcaagccagaccacagaattggaggctacaaggtgcgctatgccacctggagcatcatcatggattctgtggtgcccagcgacaagggcaactacacctgcatcgtggagaatgaatatggcagcatcaaccacacctaccagctggatgtggtggagaggagcccccaccggcccatcctgcaggccggcctgcctgccaacaagacagtggccctgggcagcaatgtggagttcatgtgcaaggtgtacagcgacccccagccccacatccagtggctgaagcacatcgaggtgaatggcagcaagattggccctgacaacctgccctacgtgcagatcctgaagacagctggggtgaacaccacagacaaggagatggaggtgctgcacctgagaaatgtgtcctttgaagatgctggggagtacacctgcctggccggcaacagcatcggcctgagccaccacagcgcctggctgactgtgctggaggccctggaggagaggcctgctgtgatgaccagccccctgtacctggagatcatcatctactgcaccggggccttcctgatcagctgcatggtgggctctgtgattgtgtacaagatgaagagcggcaccaagaagagtgacttccacagccagatggctgtgcacaagctggccaagagcatccccctgcggcggcaggtgtctgctgacagcagcgcctccatgaacagcggcgtgctgctggtgcggcccagccggctgagcagcagcggcacccccatgctggccggcgtgtctgaatatgagctgcctgaggacccccgctgggagctgccccgggaccggctggtgctgggcaagcccctgggggagggctgcttcggccaggtggtgctggccgaggccatcggcctggacaaggacaagcccaacagagtgaccaaggtggccgtgaagatgctgaagagtgatgccacagagaaggacctgagtgacctgatcagcgagatggagatgatgaagatgattggcaagcacaagaacatcatcaacctgctgggcgcctgcacccaggacggccccctgtatgtgattgtggagtatgccagcaagggcaacctgcgggagtacctgcaggcccggcggcccccaggcctggagtactgctacaaccccagccacaaccctgaggagcagctgagcagcaaggacctggtgtcctgtgcctaccaggtggcccggggcatggagtacctggccagcaagaagtgcatccaccgggacctggccgccagaaatgtgctggtgacagaagataatgtgatgaagattgctgactttggcctggcccgggacatccaccacatcgactactacaagaagaccaccaacggccgcctgcctgtgaagtggatggcccctgaggccctgtttgaccgcatctacacccaccagagtgatgtgtggagctttggagtgctgctgtgggagatcttcaccctgggcggcagcccctacccaggagtgcctgtggaggagctgttcaagctgctgaaggagggccacaggatggacaagcccagcaactgcaccaatgagctgtacatgatgatgagggactgctggcatgctgtgcccagccagaggcccaccttcaagcagctggtggaggacctggacagaattgtggccctgaccagcaaccaggagtacctggacctgtccatgcccctggaccagtacagccccagcttcccagacaccaggagcagcacctgcagcagcggggaggacagcgtcttcagccatgagcccctgcctgaggagccctgcctgcccaggcacccagcccagctggccaacggcggcctgaagagaagatag

SEQ ID NO: 341348 - DNA, 2463 bp, Artificial Sequence
  derived and/or modified sequence
atgtggagctggaagtgcctgctgttctgggccgtgctggtgaccgccactctttgtactgcaagaccttcccccacgctgcccgaacaggcccaaccttggggggcccccgtggaggtagagtctttcctggtgcatcccggggatctgctgcaattgcggtgcaggcttcgcgatgatgtacagtccatcaactggttgagagacggtgtccagctggccgagagtaatagaactcgcataaccggtgaggaagtagaggtccaggattcggttcctgctgatagcgggctctatgcttgcgtaacttctagccccagcgggtcagataccacatatttctctgtcaacgtcagtgatgctctcccatcttcggaggacgacgacgacgacgatgacagttcgtccgaggaaaaggaaaccgacaataccaagcccaacaggatgccagttgccccctactggacgtcacccgagaagatggagaagaaactgcatgcggtgcctgctgccaaaacagttaagttcaaatgcccatcctccggcaccccaaacccgactctgcgctggctgaaaaatggtaaagaattcaaaccagaccatagaatcggagggtacaaggtgcgctacgctacttggagtatcatcatggatagcgtcgttcctagtgacaaggggaactacacttgtattgtcgagaatgagtacggcagcattaaccatacctatcagctcgatgtggtggaacgctcaccacatcggcctatcctccaagcaggtctgcctgctaacaagacagtagctttaggatctaacgtggagttcatgtgtaaggtgtactccgaccctcagcctcacattcagtggctgaagcacatcgaggtcaatggttcaaagattgggccggacaacttaccctacgtacaaatcctgaagacagcgggtgtgaatacaactgataaggaaatggaggttctgcatctgcgcaacgtgagtttcgaagatgctggagagtacacatgtctggcaggtaactctattgggctgtcacatcacagcgcctggctgacagtattagaggcgctggaggagagaccggctgtcatgacatcccccctgtatctggagatcatcatatactgtaccggagcattcctaatcagctgtatggtggggagcgtgattgtgtataagatgaagtcaggcacaaagaagagcgacttccacagtcaaatggcagtgcacaagcttgcaaaatctatacccctgagaaggcaggtgtccgcggattcatccgcatccatgaactccggcgtgcttctcgtgcgcccttcccgcctctcttcgtctggaacaccaatgttggctggtgtttcagagtacgaacttccagaggacccacgctgggagttaccacgagaccgactggtcctgggaaagccgctaggggagggctgttttggtcaggtggttctggcagaggctatcggcttagacaaagataaaccaaatcgggttacaaaagtggcggtgaagatgctaaagtccgatgcaacagaaaaagacttgtcggacttaatctccgagatggagatgatgaaaatgatcggtaaacacaagaatatcatcaatctgcttggcgcttgcacccaagacgggcctctctacgtaatcgtggagtacgcttccaaaggcaacctgcgcgagtacctccaggctcgccggcctcccgggctcgaatattgctacaaccccagccacaatccagaggagcaactgagcagcaaagacttagtttcttgcgcctaccaggtggccagggggatggaataccttgcctccaagaagtgcatccacagagatctcgcagccagaaacgtgctcgtaaccgaggataatgtaatgaagattgctgatttcggcctcgcccgcgatatccatcacatcgactattacaagaaaacaaccaatggcagacttcccgtcaaatggatggcccctgaagccctatttgatcgtatatacacacaccagtcagacgtgtggtcgtttggcgtcctgctctgggaaatctttacactgggagggtcaccgtatccaggagtacccgtcgaagagctgttcaagctgctcaaggaaggacacagaatggacaagcccagcaattgtacaaacgaattatatatgatgatgagggactgttggcacgccgtgccctcacaaaggccgacattcaagcagctcgtggaggatcttgaccggatcgtagcactgaccagcaatcaagaatacctagacttgtctatgcctcttgaccaatacagtcccagcttccccgatacccgatctagcacatgcagctcaggagaagactccgtgttcagccatgaacctctccccgaagagccctgtctcccgcgtcaccccgcccaactcgccaatggcggcctaaaaaggcgctag

SEQ ID NO: 341349 - DNA, 2463 bp, Artificial Sequence
  derived and/or modified sequence
atgtggagctggaaatgcctgctgttttgggccgtcctggtcacagcaactctatgtacagcacgccctagtcccaccctccccgaacaggcacaaccatggggagcaccagttgaggtcgagagtttcctggtgcaccccggagacttgctgcagcttcggtgtcgcctgagggacgatgttcagtccataaactggctccgagatggcgtccagctagcagaatctaatcggacacgaattacgggcgaggaggtggaggtacaagactccgttcctgccgatagtggcctctatgcctgcgtgacttccagcccctcaggctctgatacaacttattttagcgtaaacgtctcagatgcgctcccttcgtccgaggacgacgatgacgatgacgattctagcagtgaggagaaagaaacagacaatacgaaacctaaccggatgcctgtggccccatattggacatctcctgaaaaaatggaaaaaaagcttcacgctgtcccggctgccaagactgttaagtttaagtgtccctcttccgggacaccgaacccgacactaaggtggctgaaaaacgggaaggagttcaagcccgatcataggatcggtggctacaaagtgcgttacgcaacatggagcatcatcatggatagtgtggtgccttctgataaagggaattacacttgtatagtggagaacgagtacggaagcataaatcacacctaccagcttgacgttgttgaacggagcccacacagacccatcctgcaggcaggccttccagcaaataaaactgtcgcgctgggctccaacgttgagtttatgtgtaaagtgtatagtgacccccaacctcacatccaatggctcaagcacatcgaggtaaatggttccaagatcggccctgacaacctcccatatgtccagattctaaagacagctggcgtgaacactacagataaggaaatggaggtcctgcacctgcgaaatgtgagtttcgaagacgccggagaatatacctgcttagctggaaattcaattggactgtcacaccatagtgcctggctgaccgtgctggaagccctggaagaacgccctgccgtgatgacatctcccctatacctggaaattattatctactgtaccggagccttcctcatttcctgtatggtgggcagcgtgattgtatacaaaatgaagtctgggactaagaagagcgacttccactctcagatggccgtccacaagcttgccaagagcatcccactcaggcgacaggtgagtgccgacagctctgcctcaatgaactctggagtgctgctggtgcggcctagcagattgagctcttccggcaccccgatgctagctggagttagcgagtatgaactgcccgaggacccgcgttgggagctgccaagagaccggttggtgttggggaagcctctcggtgagggatgtttcgggcaagtcgtcttagccgaggcgatcggcctcgacaaagacaaaccgaatagagtgacaaaggttgcagtgaaaatgctaaagtcagatgcaacagagaaagatctcagtgatctgatatctgaaatggaaatgatgaagatgattggcaagcacaaaaacataatcaatctgttgggtgcatgtacgcaggatgggccactgtacgtaatcgttgaatacgcaagcaaaggaaatctccgggaatatctccaggcacggagacccccaggccttgaatattgttacaaccccagtcataatcctgaggagcagctttcgtcaaaagatttggtttcttgcgcttaccaagtcgctcggggaatggaatatcttgcgtcgaaaaagtgcatccacagggacctagcggcaaggaacgttctggtgactgaagacaatgtgatgaagatcgccgacttcggcctcgcaagagacattcatcatatcgattattataaaaaaaccaccaatggtcggcttccagtaaagtggatggctcccgaggcccttttcgacagaatttatacacatcagtcggacgtgtggtcttttggtgtgctgctgtgggaaattttcaccctgggcggatcaccataccccggtgtgcctgtggaggagctcttcaagctcctaaaggagggtcatcgcatggataagccctctaattgcacaaacgagttgtacatgatgatgcgcgattgctggcacgccgtgcctagtcagagaccgacatttaaacagctcgtagaggacctagatagaatagtcgcgctaacgtccaatcaggaatatcttgacttatccatgccacttgatcagtactctcccagttttcccgacaccaggtcttctacctgtagctccggagaggatagtgtgttctcacacgagccactgccggaggaaccatgtctgcccaggcacccagcccagctggcgaatggcggtctgaagaggcggtag

SEQ ID NO: 341350 - DNA, 2463 bp, Artificial Sequence
  derived and/or modified sequence
atgtggagctggaagtgcctgctgttctgggccgtgctggtgaccgccaccctgtgcaccgccagacccagccccaccctgcccgagcaggcccagccctggggcgcccccgtggaggtggagagcttcctggtgcaccccggcgacctgctgcagctgagatgcagactgagagacgacgtgcagagcatcaactggctgagagacggcgtgcagctggccgagagcaacagaaccagaatcaccggcgaggaggtggaggtgcaggacagcgtgcccgccgacagcggcctgtacgcctgcgtgaccagcagccccagcggcagcgacaccacctacttcagcgtgaacgtgagcgacgccctgcccagcagcgaggacgacgacgacgacgacgacagcagcagcgaggagaaggagaccgacaacaccaagcccaacagaatgcccgtggccccctactggaccagccccgagaagatggagaagaagctgcacgccgtgcccgccgccaagaccgtgaagttcaagtgccccagcagcggcacccccaaccccaccctgagatggctgaagaacggcaaggagttcaagcccgaccacagaatcggcggctacaaggtgagatacgccacctggagcatcatcatggacagcgtggtgcccagcgacaagggcaactacacctgcatcgtggagaacgagtacggcagcatcaaccacacctaccagctggacgtggtggagagaagcccccacagacccatcctgcaggccggcctgcccgccaacaagaccgtggccctgggcagcaacgtggagttcatgtgcaaggtgtacagcgacccccagccccacatccagtggctgaagcacatcgaggtgaacggcagcaagatcggccccgacaacctgccctacgtgcagatcctgaagaccgccggcgtgaacaccaccgacaaggagatggaggtgctgcacctgagaaacgtgagcttcgaggacgccggcgagtacacctgcctggccggcaacagcatcggcctgagccaccacagcgcctggctgaccgtgctggaggccctggaggagagacccgccgtgatgaccagccccctgtacctggagatcatcatctactgcaccggcgccttcctgatcagctgcatggtgggcagcgtgatcgtgtacaagatgaagagcggcaccaagaagagcgacttccacagccagatggccgtgcacaagctggccaagagcatccccctgagaagacaggtgagcgccgacagcagcgccagcatgaacagcggcgtgctgctggtgagacccagcagactgagcagcagcggcacccccatgctggccggcgtgagcgagtacgagctgcccgaggaccccagatgggagctgcccagagacagactggtgctgggcaagcccctgggcgagggctgcttcggccaggtggtgctggccgaggccatcggcctggacaaggacaagcccaacagagtgaccaaggtggccgtgaagatgctgaagagcgacgccaccgagaaggacctgagcgacctgatcagcgagatggagatgatgaagatgatcggcaagcacaagaacatcatcaacctgctgggcgcctgcacccaggacggccccctgtacgtgatcgtggagtacgccagcaagggcaacctgagagagtacctgcaggccagaagaccccccggcctggagtactgctacaaccccagccacaaccccgaggagcagctgagcagcaaggacctggtgagctgcgcctaccaggtggccagaggcatggagtacctggccagcaagaagtgcatccacagagacctggccgccagaaacgtgctggtgaccgaggacaacgtgatgaagatcgccgacttcggcctggccagagacatccaccacatcgactactacaagaagaccaccaacggcagactgcccgtgaagtggatggcccccgaggccctgttcgacagaatctacacccaccagagcgacgtgtggagcttcggcgtgctgctgtgggagatcttcaccctgggcggcagcccctaccccggcgtgcccgtggaggagctgttcaagctgctgaaggagggccacagaatggacaagcccagcaactgcaccaacgagctgtacatgatgatgagagactgctggcacgccgtgcccagccagagacccaccttcaagcagctggtggaggacctggacagaatcgtggccctgaccagcaaccaggagtacctggacctgagcatgcccctggaccagtacagccccagcttccccgacaccagaagcagcacctgcagcagcggcgaggacagcgtgttcagccacgagcccctgcccgaggagccctgcctgcccagacaccccgcccagctggccaacggcggcctgaagagaagatag

SEQ ID NO: 341351 - DNA, 688 bp, Artificial Sequence
  derived and/or modified sequence
ccctttcacctcctggctccctcccgggcgatccgcgccccttgggtctcccctcccttccctccgtccgcgtctcctgcgccccctccctgcgctcgtcccgccgctcttcccgccgcccaacttttcctccaactcgcgctcgggagctggcgaggcggcggcggctcctcaggtcagtttgaaaaggaggatcgagctcactgtggagtatccatggagatgtggagccttgtcaccaacctctaactgcagaactgggatgtggagctggaagtgcctcctcttctgggctgtgctggtcacagccacactctgcaccgctaggccgtccccgaccttgcctgaacaagatgctctcccctcctcggaggatgatgatgatgatgatgactcctcttcagaggagaaagaaacagataacaccaaaccaaaccgtatgcccgtagctccatattggacatccccagaaaagatggaaaagaaattgcatgcagtgccggctgccaagacagtgaagttcaaatgcccttccagtgggaccccaaaccccacactgcgctggttgaaaaatggcaaagaattcaaacctgaccacagaattggaggctacaaggtccgttatgccacctggagcatcataatggactctgtggtgccctctgacaagggcaactacacctgcatt

SEQ ID NO: 341352 - protein, 731 aa, Artificial Sequence
  derived and/or modified sequence
MWSWKCLLFWAVLVTATLCTARPSPTLPEQDALPSSEDDDDDDDSSSEEKETDNTKPNPVAPYWTSPEKMEKKLHAVPAAKTVKFKCPSSGTPNPTLRWLKNGKEFKPDHRIGGYKVRYATWSIIMDSVVPSDKGNYTCIVENEYGSINHTYQLDVVERSPHRPILQAGLPANKTVALGSNVEFMCKVYSDPQPHIQWLKHIEVNGSKIGPDNLPYVQILKTAGVNTTDKEMEVLHLRNVSFEDAGEYTCLAGNSIGLSHHSAWLTVLEALEERPAVMTSPLYLEIIIYCTGAFLISCMVGSVIVYKMKSGTKKSDFHSQMAVHKLAKSIPLRRQVTVSADSSASMNSGVLLVRPSRLSSSGTPMLAGVSEYELPEDPRWELPRDRLVLGKPLGEGCFGQVVLAEAIGLDKDKPNRVTKVAVKMLKSDATEKDLSDLISEMEMMKMIGKHKNIINLLGACTQDGPLYVIVEYASKGNLREYLQARRPPGLEYCYNPSHNPEEQLSSKDLVSCAYQVARGMEYLASKKCIHRDLAARNVLVTEDNVMKIADFGLARDIHHIDYYKKTTNGRLPVKWMAPEALFDRIYTHQSDVWSFGVLLWEIFTLGGSPYPGVPVEELFKLLKEGHRMDKPSNCTNELYMMMRDCWHAVPSQRPTFKQLVEDLDRIVALTSNQEYLDLSMPLDQYSPSFPDTRSSTCSSGEDSVFSHEPLPEEPCLPRHPAQLANGGLKRR

SEQ ID NO: 341353 - DNA, 3816 bp, Artificial Sequence
  derived and/or modified sequence
cttgcggccacaggcgcggcgtcctcggcggcgggcggcagctagcgggagccgggacgccggtgcagccgcagcgcgcggaggaacccgggtgtgccgggagctgggcggccacgtccggacgggaccgagacccctcgtagcgcattgcggcgacctcgccttccccggccgcgagcgcgccgctgcttgaaaagccgcggaacccaaggacttttctccggtccgagctcggggcgccccgcagggcgcacggtacccgtgctgcagtcgggcacgccgcggcgccggggcctccgcagggcgatggagcccggtctgcaaggaaagtgaggcgccgccgctgcgttctggaggaggggggcacaaggtctggagaccccgggtggcggacgggagccctccccccgccccgcctccggggcaccagctccggctccattgttcccgcccgggctggaggcgccgagcaccgagcgccgccgggagtcgagcgccggccgcggagctcttgcgaccccgccaggacccgaacagagcccgggggcggcgggccggagccggggacgcgggcacacgcccgctcgcacaagccacggcggactctcccgaggcggaacctccacgccgagcgagggtcagtttgaaaaggaggatcgagctcactgtggagtatccatggagatgtggagccttgtcaccaacctctaactgcagaactgggatgtggagctggaagtgcctcctcttctgggctgtgctggtcacagccacactctgcaccgctaggccgtccccgaccttgcctgaacaagatgctctcccctcctcggaggatgatgatgatgatgatgactcctcttcagaggagaaagaaacagataacaccaaaccaaaccccgtagctccatattggacatccccagaaaagatggaaaagaaattgcatgcagtgccggctgccaagacagtgaagttcaaatgcccttccagtgggaccccaaaccccacactgcgctggttgaaaaatggcaaagaattcaaacctgaccacagaattggaggctacaaggtccgttatgccacctggagcatcataatggactctgtggtgccctctgacaagggcaactacacctgcattgtggagaatgagtacggcagcatcaaccacacataccagctggatgtcgtggagcggtcccctcaccggcccatcctgcaagcagggttgcccgccaacaaaacagtggccctgggtagcaacgtggagttcatgtgtaaggtgtacagtgacccgcagccgcacatccagtggctaaagcacatcgaggtgaatgggagcaagattggcccagacaacctgccttatgtccagatcttgaagactgctggagttaataccaccgacaaagagatggaggtgcttcacttaagaaatgtctcctttgaggacgcaggggagtatacgtgcttggcgggtaactctatcggactctcccatcactctgcatggttgaccgttctggaagccctggaagagaggccggcagtgatgacctcgcccctgtacctggagatcatcatctattgcacaggggccttcctcatctcctgcatggtggggtcggtcatcgtctacaagatgaagagtggtaccaagaagagtgacttccacagccagatggctgtgcacaagctggccaagagcatccctctgcgcagacaggtaacagtgtctgctgactccagtgcatccatgaactctggggttcttctggttcggccatcacggctctcctccagtgggactcccatgctagcaggggtctctgagtatgagcttcccgaagaccctcgctgggagctgcctcgggacagactggtcttaggcaaacccctgggagagggctgctttgggcaggtggtgttggcagaggctatcgggctggacaaggacaaacccaaccgtgtgaccaaagtggctgtgaagatgttgaagtcggacgcaacagagaaagacttgtcagacctgatctcagaaatggagatgatgaagatgatcgggaagcataagaatatcatcaacctgctgggggcctgcacgcaggatggtcccttgtatgtcatcgtggagtatgcctccaagggcaacctgcgggagtacctgcaggcccggaggcccccagggctggaatactgctacaaccccagccacaacccagaggagcagctctcctccaaggacctggtgtcctgcgcctaccaggtggcccgaggcatggagtatctggcctccaagaagtgcatacaccgagacctggcagccaggaatgtcctggtgacagaggacaatgtgatgaagatagcagactttggcctcgcacgggacattcaccacatcgactactataaaaagacaaccaacggccgactgcctgtgaagtggatggcacccgaggcattatttgaccggatctacacccaccagagtgatgtgtggtctttcggggtgctcctgtgggagatcttcactctgggcggctccccataccccggtgtgcctgtggaggaacttttcaagctgctgaaggagggtcaccgcatggacaagcccagtaactgcaccaacgagctgtacatgatgatgcgggactgctggcatgcagtgccctcacagagacccaccttcaagcagctggtggaagacctggaccgcatcgtggccttgacctccaaccaggagtacctggacctgtccatgcccctggaccagtactcccccagctttcccgacacccggagctctacgtgctcctcaggggaggattccgtcttctctcatgagccgctgcccgaggagccctgcctgccccgacacccagcccagcttgccaatggcggactcaaacgccgctgactgccacccacacgccctccccagactccaccgtcagctgtaaccctcacccacagcccctgctgggcccaccacctgtccgtccctgtcccctttcctgctggcaggagccggctgcctaccaggggccttcctgtgtggcctgccttcaccccactcagctcacctctccctccacctcctctccacctgctggtgagaggtgcaaagaggcagatctttgctgccagccacttcatcccctcccagatgttggaccaacacccctccctgccaccaggcactgcctggagggcagggagtgggagccaatgaacaggcatgcaagtgagagcttcctgagctttctcctgtcggtttggtctgttttgccttcacccataagcccctcgcactctggtggcaggtgccttgtcctcagggctacagcagtagggaggtcagtgcttcgtgcctcgattgaaggtgacctctgccccagataggtggtgccagtggcttattaattccgatactagtttgctttgctgaccaaatgcctggtaccagaggatggtgaggcgaaggccaggttgggggcagtgttgtggccctggggcccagccccaaactgggggctctgtatatagctatgaagaaaacacaaagtgtataaatctgagtatatatttacatgtctttttaaaagggtcgttaccagagatttacccatcgggtaagatgctcctggtggctgggaggcatcagttgctatatattaaaaacaaaaaagaaaaaaaaggaaaatgtttttaaaaaggtcatatattttttgctacttttgctgttttatttttttaaattatgttctaaacctattttcagtttaggtccctcaataaaaattgctgctgctt

SEQ ID NO: 341354 - DNA, 3824 bp, Artificial Sequence
  derived and/or modified sequence
cttgcggccacaggcgcggcgtcctcggcggcgggcggcagctagcgggagccgggacgccggtgcagccgcagcgcgcggaggaacccgggtgtgccgggagctgggcggccacgtccggacgggaccgagacccctcgtagcgcattgcggcgacctcgccttccccggccgcgagcgcgccgctgcttgaaaagccgcggaacccaaggacttttctccggtccgagctcggggcgccccgcagggcgcacggtacccgtgctgcagtcgggcacgccgcggcgccggggcctccgcagggcgatggagcccggtctgcaaggaaagtgaggcgccgccgctgcgttctggaggaggggggcacaaggtctggagaccccgggtggcggacgggagccctccccccgccccgcctccggggcaccagctccggctccattgttcccgcccgggctggaggcgccgagcaccgagcgccgccgggagtcgagcgccggccgcggagctcttgcgaccccgccaggacccgaacagagcccgggggcggcgggccggagccggggacgcgggcacacgcccgctcgcacaagccacggcggactctcccgaggcggaacctccacgccgagcgagggtcagtttgaaaaggaggatcgagctcactgtggagtatccatggagatgtggagccttgtcaccaacctctaactgcagaactgggatgtggagctggaagtgcctcctcttctgggctgtgctggtcacagccacactctgcaccgctaggccgtccccgaccttgcctgaacaagatgctctcccctcctcggaggatgatgatgatgatgatgactcctcttcagaggagaaagaaacagataacaccaaaccaaaccgtatgcccgtagctccatattggacatccccagaaaagatggaaaagaaattgcatgcagtgccggctgccaagacagtgaagttcaaatgcccttccagtgggaccccaaaccccacactgcgctggttgaaaaatggcaaagaattcaaacctgaccacagaattggaggctacaaggtccgttatgccacctggagcatcataatggactctgtggtgccctctgacaagggcaactacacctgcattgtggagaatgagtacggcagcatcaaccacacataccagctggatgtcgtggagcggtcccctcaccggcccatcctgcaagcagggttgcccgccaacaaaacagtggccctgggtagcaacgtggagttcatgtgtaaggtgtacagtgacccgcagccgcacatccagtggctaaagcacatcgaggtgaatgggagcaagattggcccagacaacctgccttatgtccagatcttgaagactgctggagttaataccaccgacaaagagatggaggtgcttcacttaagaaatgtctcctttgaggacgcaggggagtatacgtgcttggcgggtaactctatcggactctcccatcactctgcatggttgaccgttctggaagccctggaagagaggccggcagtgatgacctcgcccctgtacctggagatcatcatctattgcacaggggccttcctcatctcctgcatggtggggtcggtcatcgtctacaagatgaagagtggtaccaagaagagtgacttccacagccagatggctgtgcacaagctggccaagagcatccctctgcgcagacaggtaacagtgtctgctgactccagtgcatccatgaactctggggttcttctggttcggccatcacggctctcctccagtgggactcccatgctagcaggggtctctgagtatgagcttcccgaagaccctcgctgggagctgcctcgggacagactggtcttaggcaaacccctgggagagggctgctttgggcaggtggtgttggcagaggctatcgggctggacaaggacaaacccaaccgtgtgaccaaagtggctgtgaagatgttgaagtcggacgcaacagagaaagacttgtcagacctgatctcagaaatggagatgatgaagatgatcgggaagcataagaatatcatcaacctgctgggggcctgcacgcaggatggtcccttgtatgtcatcgtggagtatgcctccaagggcaacctgcgggagtacctgcaggcccggaggcccccagggctggaatactgctacaaccccagccacaacccagaggagcagctctcctccaaggacctggtgtcctgcgcctaccaggtggcccgaggcatggagtatctggcctccaagaagtgcatacaccgagacctggcagccaggaatgtcctggtgacagaggacaatgtgatgaagatagcagactttggcctcgcacgggacattcaccacatcgactactataaaaagacaaccaacggccgactgcctgtgaagtggatggcacccgaggcattatttgaccggatctacacccaccagagtgatgtgtggtctttcggggtgctcctgtgggagatcttcactctgggcggctccccataccccggtgtgcctgtggaggaacttttcaagctgctgaaggagggtcaccgcatggacaagcccagtaactgcaccaacgagctgtacatgatgatgcgggactgctggcatgcagtgccctcacagagacccaccttcaagcagctggtggaagacctggaccgcatcgtggccttgacctccaaccaggagtacctggacctgtccatgcccctggaccagtactcccccagctttcccgacacccggagctctacgtgctcctcaggggaggattccgtcttctctcatgagccgctgcccgaggagccctgcctgccccgacacccagcccagcttgccaatggcggactcaaacgccgctgactgccacccacacgccctccccagactccaccgtcagctgtaaccctcacccacagcccctgctgggcccaccacctgtccgtccctgtcccctttcctgctggcaggagccggctgcctaccaggggccttcctgtgtggcctgccttcaccccactcagctcacctctccctccacctcctctccacctgctggtgagaggtgcaaagaggcagatctttgctgccagccacttcatcccctcccagatgttggaccaacacccctccctgccaccaggcactgcctggagggcagggagtgggagccaatgaacaggcatgcaagtgagagcttcctgagctttctcctgtcggtttggtctgttttgccttcacccataagcccctcgcactctggtggcaggtgccttgtcctcagggctacagcagtagggaggtcagtgcttcgtgcctcgattgaaggtgacctctgccccagataggtggtgccagtggcttattaattccgatactagtttgctttgctgaccaaatgcctggtaccagaggatggtgaggcgaaggccaggttgggggcagtgttgtggccctggggcccagccccaaactgggggctctgtatatagctatgaagaaaacacaaagtgtataaatctgagtatatatttacatgtctttttaaaagggtcgttaccagagatttacccatcgggtaagatgctcctggtggctgggaggcatcagttgctatatattaaaaacaaaaaagaaaaaaaaggaaaatgtttttaaaaaggtcatatattttttgctacttttgctgttttatttttttaaattatgttctaaacctattttcagtttaggtccctcaataaaaattgctgctgcttca

SEQ ID NO: 341355 - DNA, 2953 bp, Artificial Sequence
  derived and/or modified sequence
gtggagtatccatggagatgtggagccttgtcaccaacctctaactgcagaactgggatgtggagctggaagtgcctcctcttctgggctgtgctggtcacagccacactctgcaccgctaggccgtccccgaccttgcctgaacaagatgctctcccctcctcggaggatgatgatgatgatgatgactcctcttcagaggagaaagaaacagataacaccaaaccaaaccccgtagctccatattggacatccccagaaaagatggaaaagaaattgcatgcagtgccggctgccaagacagtgaagttcaaatgcccttccagtgggaccccaaaccccacactgcgctggttgaaaaatggcaaagaattcaaacctgaccacagaattggaggctacaaggtccgttatgccacctggagcatcataatggactctgtggtgccctctgacaagggcaactacacctgcattgtggagaatgagtacggcagcatcaaccacacataccagctggatgtcgtggagcggtcccctcaccggcccatcctgcaagcagggttgcccgccaacaaaacagtggccctgggtagcaacgtggagttcatgtgtaaggtgtacagtgacccgcagccgcacatccagtggctaaagcacatcgaggtgaatgggagcaagattggcccagacaacctgccttatgtccagatcttgaagcattcggggattaatagctcggatgcggaggtgctgaccctgttcaatgtgacagaggcccagagcggggagtatgtgtgtaaggtttccaattatattggtgaagctaaccagtctgcgtggctcactgtcaccagacctgtggcaaaagccctggaagagaggccggcagtgatgacctcgcccctgtacctggagatcatcatctattgcacaggggccttcctcatctcctgcatggtggggtcggtcatcgtctacaagatgaagagtggtaccaagaagagtgacttccacagccagatggctgtgcacaagctggccaagagcatccctctgcgcagacaggtaacagtgtctgctgactccagtgcatccatgaactctggggttcttctggttcggccatcacggctctcctccagtgggactcccatgctagcaggggtctctgagtatgagcttcccgaagaccctcgctgggagctgcctcgggacagactggtcttaggcaaacccctgggagagggctgctttgggcaggtggtgttggcagaggctatcgggctggacaaggacaaacccaaccgtgtgaccaaagtggctgtgaagatgttgaagtcggacgcaacagagaaagacttgtcagacctgatctcagaaatggagatgatgaagatgatcgggaagcataagaatatcatcaacctgctgggggcctgcacgcaggatggtcccttgtatgtcatcgtggagtatgcctccaagggcaacctgcgggagtacctgcaggcccggaggcccccagggctggaatactgctacaaccccagccacaacccagaggagcagctctcctccaaggacctggtgtcctgcgcctaccaggtggcccgaggcatggagtatctggcctccaagaagtgcatacaccgagacctggcagccaggaatgtcctggtgacagaggacaatgtgatgaagatagcagactttggcctcgcacgggacattcaccacatcgactactataaaaagacaaccaacggccgactgcctgtgaagtggatggcacccgaggcattatttgaccggatctacacccaccagagtgatgtgtggtctttcggggtgctcctgtgggagatcttcactctgggcggctccccataccccggtgtgcctgtggaggaacttttcaagctgctgaaggagggtcaccgcatggacaagcccagtaactgcaccaacgagctgtacatgatgatgcgggactgctggcatgcagtgccctcacagagacccaccttcaagcagctggtggaagacctggaccgcatcgtggccttgacctccaaccaggagtacctggacctgtccatgcccctggaccagtactcccccagctttcccgacacccggagctctacgtgctcctcaggggaggattccgtcttctctcatgagccgctgcccgaggagccctgcctgccccgacacccagcccagcttgccaatggcggactcaaacgccgctgactgccacccacacgccctccccagactccaccgtcagctgtaaccctcacccacagcccctgctgggcccaccacctgtccgtccctgtcccctttcctgctggcaggagccggctgcctaccaggggccttcctgtgtggcctgccttcaccccactcagctcacctctccctccacctcctctccacctgctggtgagaggtgcaaagaggcagatctttgctgccagccacttcatcccctcccagatgttggaccaacacccctccctgccaccaggcactgcctggagggcagggagtgggagccaatgaacaggcatgcaagtgagagcttcctgagctttctcctgtcggtttggtctgttttgccttcacccataagcccctcgcactctggtggcaggtgccttgtcctcagggctacagcagtagggaggtcagtgcttcgtgcctcgattgaaggtgacctctgccccagataggtggtgccagtggcttattaattccgatactagtttgctttgctgaccaaatgcctggtaccagaggatggtgaggcgaaggccaggttgggggcagtgttgtggccctggggcccagccccaaactgggggctctgtatatagctatgaagaaaacacaaagtgtataaatctgagtatatatttacatgtctttttaaaagggtcgt

SEQ ID NO: 341356 - DNA, 529 bp, Artificial Sequence
  derived and/or modified sequence
aaattaaaactcagattcttcagcctgtcttgaccacctccctccttaacatttctggagacttggagatgcggcgttgagattcgggggagaaaagaaagttcccttggatcccgagttatttaagatctcaccaagttattcgccgccgctgtgggacctcccaggcccccttgccccccgcaacttctggactcatatccgtcagacatcacttgtcaccttccagcatcagggagaactggatccctcctggctccacactcttaggctctttggtcagtttgaaaaggaggatcgagctcactgtggagtatccatggagatgtggagccttgtcaccaacctctaactgcagaactgggatgtggagctggaagtgcctcctcttctgggctgtgctggtcacagccacactctgcaccgctaggccgtccccgaccttgcctgaacaagatgctctcccctcctcggaggatgatgatgatgatgatgactcctcttcagaggagaaagaaacagataacac

SEQ ID NO: 341357 - DNA, 657 bp, Artificial Sequence
  derived and/or modified sequence
ttgggtctcccctcccttccctccgtccgcgtctcctgcgccccctccctgcgctcgtcccgccgctcttcccgccgcccaacttttcctccaactcgcgctcgggagctggcgaggcggcggcggctcctcaggtcagtttgaaaaggaggatcgagctcactgtggagtatccatggagatgtggagccttgtcaccaacctctaactgcagaactgggatgtggagctggaagtgcctcctcttctgggctgtgctggtcacagccacactctgcaccgctaggccgtccccgaccttgcctgaacaagatgctctcccctcctcggaggatgatgatgatgatgatgactcctcttcagaggagaaagaaacagataacaccaaaccaaaccccgtagctccatattggacatccccagaaaagatggaaaagaaattgcatgcagtgccggctgccaagacagtgaagttcaaatgcccttccagtgggaccccaaaccccacactgcgctggttgaaaaatggcaaagaattcaaacctgaccacagaattggaggctacaaggtccgttatgccacctggagcatcataatggactctgtggtgccctctgacaagggcaactacacctgcattgtggagaatgagtacg

SEQ ID NO: 341358 - DNA, 467 bp, Artificial Sequence
  derived and/or modified sequence
accacctccctccttaacatttctggagacttggagatgcggcgttgagattcgggggagaaaagaaagttcccttggatcccgagttatttaagatctcaccaagttattcgccgccgctgggtcagtttgaaaaggaggatcgagctcactgtggagtatccatggagatgtggagccttgtcaccaacctctaactgcagaactgggatgtggagctggaagtgcctcctcttctgggctgtgctggtcacagccacactctgcaccgctaggccgtccccgaccttgcctgaacaagatgctctcccctcctcggaggatgatgatgatgatgatgactcctcttcagaggagaaagaaacagataacaccaaaccaaaccccgtagctccatattggacatccccagaaaagatggaaaagaaattgcatgcagtgccggctgccaagacagtgaagttcaa

SEQ ID NO: 341359 - DNA, 2196 bp, Artificial Sequence
  derived and/or modified sequence
atgtggtcatggaagtgtctgcttttttgggcggtgcttgtgacagccactttgtgtactgcgcgacccagtcctaccctgccagagcaagacgcactacctagttctgaggatgatgacgatgacgacgacagctcatctgaagaaaaagagactgataacacaaaacccaacccagtggcgccctattggacttcacctgagaagatggagaagaagttgcatgctgtgcctgctgccaaaaccgtcaaatttaaatgccctagttccgggacacccaatccgactctccggtggctgaagaatggaaaggagttcaagcctgatcatcggatcggcggctacaaagttaggtatgccacctggtccattattatggactctgtggttccttctgacaagggaaattatacatgcatcgttgagaacgagtacgggagcatcaaccacacctaccagttggacgtggtcgagcgcagtccacatagaccaatcctgcaagctgggctgccagctaacaaaacagtcgctcttggcagcaacgtagagttcatgtgtaaggtgtattccgaccctcagcctcacatccagtggctgaaacacattgaggtgaatggcagcaagatagggcccgataatttgccatatgtgcagattttaaagactgccggtgtgaataccaccgacaaggagatggaggttctgcacctgaggaatgtatccttcgaggatgccggggaatacacctgcctggcggggaattccattggactcagtcaccactcagcttggctgacagttcttgaggcactagaagagcgccccgcggtaatgacctccccgctctacttagagattattatctattgtaccggtgcgttcctcatttcttgtatggtggggtctgtcatagtctacaaaatgaaaagcggcacgaaaaagtcagattttcatagtcaaatggctgtccacaagttggctaagtcaattcctctaagaaggcaggtcacagtatcagcagatagctccgcctccatgaactctggcgtcctgctggtcagacctagccgcctgtcttctagcggcacccctatgctcgcaggcgtctctgagtacgagctcccagaggatcccaggtgggagctacctagggaccggcttgtgctgggtaaaccattaggcgaaggatgtttcggtcaagttgtgctcgcagaagcgatcggtctggacaaggataagcctaatcgcgtgactaaggtcgcggtaaagatgttaaagagcgatgcaacagagaaggacctctctgacttaataagcgaaatggaaatgatgaagatgattggaaaacacaagaatataatcaacctgctgggtgcctgtacgcaagatgggcctctttacgttattgtggagtacgcatcgaaagggaatctccgggagtacctacaggccagacgcccccccgggctggagtattgctacaatccttcacataatccagaggaacagctttccagcaaggatctagtgtcatgcgcttaccaggtggcaagaggaatggaatatttagcgtccaaaaagtgtatccatcgggatcttgccgctagaaacgtcctggtaacagaggacaacgtgatgaagatcgctgactttggattggcccgcgatattcaccacattgattattacaagaagaccacaaatggacgactgccggtgaagtggatggcaccggaagcgctattcgaccgtatatatacacaccagtcggacgtctggagttttggtgtcctattgtgggaaatttttacattgggagggtcaccctatcccggtgtcccagttgaagaacttttcaagctgttaaaggaagggcatagaatggataagccaagtaactgcactaatgagttgtatatgatgatgagagattgttggcatgctgtgcccagccagaggccgacttttaaacagctagtggaagatctggaccgcattgttgccctcactagtaatcaggaataccttgatctgtccatgcccctggaccagtattctccgagttttccagacacaaggtctagtacatgctcttcaggggaagactccgtctttagccacgaaccgctgcctgaagaaccatgccttccaaggcacccagcacagctcgccaacggggggctgaaaagaagatag

SEQ ID NO: 341360 - DNA, 2202 bp, Artificial Sequence
  derived and/or modified sequence
atgtggtcctggaagtgcttgctgttttgggctgtgttggtgacagcaactctctgcacagcaagaccctcgccgactcttcccgaacaggacgccctcccctcttcagaagacgacgatgacgacgacgactcaagttctgaggaaaaagaaactgacaacacgaaacccaatccagtagctccctattggactagtcctgagaagatggagaaaaagctccacgccgtacccgctgctaagaccgttaagttcaaatgccccagtagcggtacccccaaccctacgctgagatggctgaaaaacggcaaggagttcaaacccgatcatcgcatcgggggatataaagtacgttacgccacctggagcattatcatggattctgtggtgccttctgacaaggggaattatacctgcattgtggaaaacgagtacggtagtatcaatcatacctaccagctagacgtcgtggagagatcccctcataggcccattctgcaggctggcctcccagcaaataagactgtggccctcggctccaatgtggagtttatgtgtaaggtatattcagaccctcagcctcacattcagtggttaaagcacattgaggttaacggttccaagatcggtccagacaacttaccttatgtgcaaatccttaagcattcagggatcaatagttcagatgccgaagtgcttacactgttcaacgttaccgaggctcaatcaggcgaatacgtgtgcaaggtcagcaactatattggagaggcgaatcaatcagcatggctgactgttacaagaccagtcgcgaaagcgttggaggaaaggcctgctgtcatgacctctcccctctatctggaaattatcatttattgcacaggcgccttccttatatcatgcatggtgggcagtgtgattgtatataagatgaagagtgggactaaaaagagtgattttcattctcaaatggccgtacacaagttggccaagtctatccctttgcgtcgacaggttaccgtcagcgccgattctagcgcatctatgaacagcggcgtgctactggtccggccttcacgcctatcatctagcggaacgcctatgctggcgggcgtcagcgaatacgaactgccggaagatccacgatgggaactccccagagataggctcgttcttggtaaacctcttggcgaggggtgctttggccaggttgttctagccgaagccatcggcttggacaaggataaacctaaccgagtcacaaaggttgctgttaagatgctgaagtccgacgctactgagaaggatctgtctgacctcatctcagagatggagatgatgaaaatgattggaaagcacaagaatattattaatctcctcggtgcatgcacgcaggacggaccactctacgtgattgtggagtatgctagcaagggcaatctgcgagaatacctgcaagcgagacgcccgcctggtttggaatactgttacaacccatcccataaccctgaggagcagctctctagcaaggacctggtctcgtgtgcctaccaggtcgcacgcggcatggagtatctggcttccaagaagtgcatacatcgggatctagctgctaggaatgtgctggtcaccgaagacaacgtgatgaagatcgccgacttcgggctggccagggatatacaccatattgattactacaaaaagaccacaaacggcaggctccctgtgaaatggatggccccggaggctctctttgaccggatctacacgcaccagtctgacgtgtggtcatttggagtcttgctgtgggagatctttaccctgggtgggtccccatatcctggcgttcccgttgaagaactctttaaactcctgaaggaaggacatcggatggacaaaccctccaactgcaccaacgagctatacatgatgatgcgcgattgctggcatgccgtgcccagccagcgtccaacctttaagcaattagtcgaggacctggatcgaattgtggcattgacgtccaaccaggagtatctggatctgtcgatgcccctggatcagtacagtccatcttttccagatacccgaagctctacctgctccagcggtgaggactcggtatttagccatgaacccctgccggaggagccttgcctcccaagacatcccgctcaacttgccaacggcggcctgaagcgtcggtag

SEQ ID NO: 341361 - DNA, 2196 bp, Artificial Sequence
  derived and/or modified sequence
atgtggagctggaagtgcctgctcttctgggccgtgctggtgacagccaccctgtgcacagcccggcccagccccaccctgcctgagcaggatgccctgcccagcagtgaagatgatgatgatgatgatgacagcagcagcgaggagaaggagacagacaacaccaagcccaaccctgtggccccctactggaccagccctgagaagatggagaagaagctgcatgctgtgcctgctgccaagacagtgaagttcaagtgccccagcagcggcacccccaaccccaccctgcgctggctgaagaatggcaaggagttcaagccagaccaccgcatcggcggctacaaggtgcgctatgccacctggagcatcatcatggacagcgtggtgcccagcgacaagggcaactacacctgcatcgtggagaatgaatatggcagcatcaaccacacctaccagctggatgtggtggagaggagcccccaccggcccatcctgcaggccggcctgcctgccaacaagacagtggccctgggcagcaatgtggagttcatgtgcaaggtgtacagcgacccccagccccacatccagtggctgaagcacatcgaggtgaatggcagcaagattggaccagacaacctgccctacgtgcagatcctgaagacagctggggtgaacaccacagacaaggagatggaggtgctgcacctgagaaatgtgtcctttgaagatgctggggagtacacctgcctggccggcaacagcatcggcctgagccaccacagcgcctggctgactgtgctggaggccctggaggagaggcctgctgtgatgaccagccccctgtacctggagatcatcatctactgcacaggagccttcctgatcagctgcatggtgggcagcgtcatcgtgtacaagatgaagagcggcaccaagaagagtgacttccacagccagatggctgtgcacaagctggccaagagcatccccctgcggcggcaggtgacagtgtctgctgacagcagcgcctccatgaacagcggcgtgctgctggtgcggcccagccggctgagcagcagcggcacccccatgctggccggcgtgtctgaatatgagctgcctgaggacccccgctgggagctgccccgggaccggctggtgctgggcaagcccctgggggagggctgcttcggccaggtggtgctggccgaggccatcggcctggacaaggacaagcccaacagagtgaccaaggtggccgtgaagatgctgaagagtgatgccacagagaaggacctgagtgacctgatcagcgagatggagatgatgaagatgattggcaagcacaagaacatcatcaacctgctgggcgcctgcacccaggacggccccctgtatgtgattgtggagtatgccagcaaaggaaacctgcgggagtacctgcaggcccggcggcccccaggcctggagtactgctacaaccccagccacaaccctgaggagcagctgagcagcaaggacctggtgtcctgtgcctaccaggtggcccggggcatggagtacctggccagcaagaagtgcatccaccgggacctggccgccagaaatgtgctggtgacagaggacaacgtgatgaagattgctgactttggcctggcccgggacatccaccacatcgactactacaagaagaccaccaacggccgcctgcctgtgaagtggatggcccctgaggccctgtttgaccgcatctacacccaccagagtgatgtgtggagctttggagtgctgctgtgggagatcttcaccctgggcggcagcccctacccaggagtgcctgtggaggagctgttcaagctgctgaaggagggccacaggatggacaagcccagcaactgcaccaatgagctgtacatgatgatgagggactgctggcatgctgtgcccagccagaggcccaccttcaagcagctggtggaggacctggaccgcatcgtggccctgaccagcaaccaggagtacctggacctgtccatgcccctggaccagtacagccccagcttcccagacaccaggagcagcacctgcagcagtggagaagattctgtgttcagccatgagcccctgcctgaggagccctgcctgcccaggcacccagcccagctggccaatggaggcctgaagagaagatag

SEQ ID NO: 341362 - DNA, 2202 bp, Artificial Sequence
  derived and/or modified sequence
atgtggagctggaagtgcctgctcttctgggccgtgctggtgacagccaccctgtgcacagcccggcccagccccaccctgcctgagcaggatgccctgcccagcagtgaagatgatgatgatgatgatgacagcagcagcgaggagaaggagacagacaacaccaagcccaaccctgtggccccctactggaccagccctgagaagatggagaagaagctgcatgctgtgcctgctgccaagacagtgaagttcaagtgccccagcagcggcacccccaaccccaccctgcgctggctgaagaatggcaaggagttcaagccagaccaccgcatcggcggctacaaggtgcgctatgccacctggagcatcatcatggacagcgtggtgcccagcgacaagggcaactacacctgcatcgtggagaatgaatatggcagcatcaaccacacctaccagctggatgtggtggagaggagcccccaccggcccatcctgcaggccggcctgcctgccaacaagacagtggccctgggcagcaatgtggagttcatgtgcaaggtgtacagcgacccccagccccacatccagtggctgaagcacatcgaggtgaatggcagcaagattggaccagacaacctgccctacgtgcagatcctgaagcacagcggcatcaacagcagtgatgctgaggtgctgaccctcttcaacgtgacagaggcccagagcggggagtatgtgtgcaaggtgagcaactacatcggggaggccaaccagagcgcctggctgactgtgaccaggcctgtggccaaggccctggaggagaggcctgctgtgatgaccagccccctgtacctggagatcatcatctactgcacaggagccttcctgatcagctgcatggtgggcagcgtcatcgtgtacaagatgaagagcggcaccaagaagagtgacttccacagccagatggctgtgcacaagctggccaagagcatccccctgcggcggcaggtgacagtgtctgctgacagcagcgcctccatgaacagcggcgtgctgctggtgcggcccagccggctgagcagcagcggcacccccatgctggccggcgtgtctgaatatgagctgcctgaggacccccgctgggagctgccccgggaccggctggtgctgggcaagcccctgggggagggctgcttcggccaggtggtgctggccgaggccatcggcctggacaaggacaagcccaacagagtgaccaaggtggccgtgaagatgctgaagagtgatgccacagagaaggacctgagtgacctgatcagcgagatggagatgatgaagatgattggcaagcacaagaacatcatcaacctgctgggcgcctgcacccaggacggccccctgtatgtgattgtggagtatgccagcaaaggaaacctgcgggagtacctgcaggcccggcggcccccaggcctggagtactgctacaaccccagccacaaccctgaggagcagctgagcagcaaggacctggtgtcctgtgcctaccaggtggcccggggcatggagtacctggccagcaagaagtgcatccaccgggacctggccgccagaaatgtgctggtgacagaggacaacgtgatgaagattgctgactttggcctggcccgggacatccaccacatcgactactacaagaagaccaccaacggccgcctgcctgtgaagtggatggcccctgaggccctgtttgaccgcatctacacccaccagagtgatgtgtggagctttggagtgctgctgtgggagatcttcaccctgggcggcagcccctacccaggagtgcctgtggaggagctgttcaagctgctgaaggagggccacaggatggacaagcccagcaactgcaccaatgagctgtacatgatgatgagggactgctggcatgctgtgcccagccagaggcccaccttcaagcagctggtggaggacctggaccgcatcgtggccctgaccagcaaccaggagtacctggacctgtccatgcccctggaccagtacagccccagcttcccagacaccaggagcagcacctgcagcagtggagaagattctgtgttcagccatgagcccctgcctgaggagccctgcctgcccaggcacccagcccagctggccaatggaggcctgaagagaagatag

SEQ ID NO: 341363 - DNA, 2196 bp, Artificial Sequence
  derived and/or modified sequence
atgtggagctggaagtgcctgctgttctgggccgtgctggtgaccgcaactctttgtacagcgcggcccagtcccaccctgccagagcaggatgctctgccttcctccgaagatgatgacgatgacgatgattccagcagcgaagaaaaggagacggacaacaccaaaccgaatcctgtcgccccatattggacaagccctgaaaagatggagaagaaattacacgctgtgcctgccgccaagacagtgaagtttaagtgtccatcttctggaacgcccaacccaaccctgaggtggctgaaaaatggcaaggaatttaagcccgaccaccggataggggggtataaggtccgttatgccacctggtctattataatggactctgtggtccccagcgataaaggcaactatacttgtatcgtcgagaatgaatatggttcaattaatcatacgtaccagctggatgtggtggagcgatcaccacatcgtccaatcctgcaggctggcctgccagccaataaaacagtcgccttgggctcaaacgttgaatttatgtgtaaggtctactccgacccacaaccgcacatccagtggctgaagcacatagaggtgaatggcagcaaaatcggcccagataatcttccatatgtccaaattctcaagaccgctggagttaataccaccgataaagagatggaagtccttcaccttcgcaatgtttctttcgaggatgccggagagtatacctgcctagcaggtaactcaattggcttgagccaccacagcgcctggttaacagtcctggaagccttggaagagcgccccgcggtgatgacatcccctctctatttagagatcattatctattgtacaggcgccttcctgatttcatgcatggttggttctgtcatcgtatacaagatgaagtccggtactaagaagtctgattttcacagtcaaatggctgtacataaactcgccaagtctatacctctgaggagacaggtcaccgtgagcgctgactccagcgcaagcatgaatagcggcgtgctactggtgcgcccttcaagactctcatcatccggcacgccaatgttggctggagtatcagagtacgaactcccagaggaccccaggtgggaattgccgcgggatcgcctggttttgggaaaaccccttggagagggctgtttcggccaggtagtgctggcagaagccattgggctggacaaagacaaacctaatcgagttacaaaagtagcagtgaaaatgctgaagtctgacgcaaccgaaaaagatctcagcgatctgatctccgagatggagatgatgaaaatgatcggaaagcataagaatatcatcaacctgctgggagcctgtacacaggacggtccactgtacgtgatagtcgagtacgcaagcaagggtaatctccgagagtacctgcaggcccgtagaccaccaggcctggaatactgctataatcccagccacaacccagaagaacagctgagtagtaaagatctcgtcagctgcgcatatcaggtcgcccggggtatggaatacctggcttcgaagaaatgcattcaccgggatctcgcggcccgtaacgtgctggtaactgaggacaatgttatgaagatcgcagacttcggcttggcgagagacatacatcacattgattattacaagaaaactactaacggtagattgccggtgaagtggatggcccccgaagccctgttcgaccgaatctatacccatcagagcgatgtatggagtttcggcgtgctgctttgggagatcttcaccctgggaggcagcccttacccgggggtaccagttgaagaactgttcaagctcctcaaagagggtcatcggatggacaagcccagcaattgtacaaatgagctatacatgatgatgagagattgctggcatgccgtgcctagtcagcggcccacattcaaacagctggtggaagatctggataggatcgttgccctgacctctaaccaggagtacctcgatctttcaatgccattagatcagtattcacctagcttccctgacaccaggagctctacttgcagcagtggagaagacagtgtattctctcatgagccactgcccgaagagccttgtctgcctcggcatcccgcacagttggccaatggagggctcaagagacgttag

SEQ ID NO: 341364 - DNA, 2202 bp, Artificial Sequence
  derived and/or modified sequence
atgtggagctggaagtgcctgctgttctgggccgtgctggtgaccgccactctatgtacagctcgaccttcccctacccttccagaacaagacgcccttccatcctctgaagatgatgatgacgatgatgattcctcctccgaggagaaggagacagataataccaaacccaatcctgttgccccgtactggacttcgccagagaaaatggagaagaagcttcatgcagtcccagctgcaaagaccgtgaaatttaagtgtcctagcagtggtacacccaatcctactctccgttggctgaagaacgggaaagagttcaagccggaccaccggattggcggatataaagtgaggtatgccacctggtccatcattatggacagcgtggtcccttctgacaaaggcaattacacttgtattgtcgaaaacgagtatggctctatcaaccacacttaccaactagatgtcgtggaacgatcaccacatcgacccattttacaggcgggcctgccggccaacaagaccgttgcattgggctcaaatgtcgagttcatgtgcaaggtctattctgacccccaaccacatattcagtggctgaagcatatcgaggtgaacggctcgaagatcggacccgataacctgccatacgtacagatacttaagcattccgggattaacagcagcgacgcggaggtactgactttgtttaatgtgactgaagctcaatctggggaatacgtgtgtaaagtgagcaattatataggagaagctaatcaatccgcctggctgactgtgaccagacctgtggctaaagcgctggaagaaagacccgcagtcatgacgagccctctgtatctcgagattataatttactgtaccggagctttccttatatcctgcatggtagggtcagtgatagtttataagatgaagtctggcaccaagaagtcagactttcactctcaaatggcggtgcacaaactggcaaaatccattcccctgagacgacaggtgaccgtgagcgccgatagttctgcaagcatgaatagcggggttctgcttgttagaccttctcgcctttcatcaagcggaacccctatgcttgcaggagtttccgagtatgagctgccagaagaccctaggtgggagttgcctcgcgaccgcttggtgctgggtaagcctctgggcgagggttgtttcgggcaggtcgtgctcgctgaggcaatcgggttggacaaggacaagccaaaccgagtgacgaaggttgccgtaaagatgctgaagtccgacgccactgagaaggatttgagcgatcttatttcagagatggaaatgatgaaaatgatcgggaaacacaagaacatcattaatctcctgggtgcatgcacgcaggatggccctctgtacgtaatcgtcgagtacgcctctaaaggtaacctccgcgagtacctgcaagccagaagaccacccgggttagagtactgctacaacccaagccataaccctgaggagcaactatcttccaaagatttggtttcttgtgcctaccaagtcgcacgtggtatggagtacctggcctccaaaaaatgtattcacagagatctggctgccagaaacgttctcgtcactgaagacaacgtgatgaagatcgccgacttcggtttggcgcgagatattcatcatatcgactactataaaaagacaacaaacggccgactgcccgtcaaatggatggcaccggaagcattgttcgacagaatttatacccaccagagcgatgtgtggagctttggcgtgctgttatgggagatcttcacgttgggggggtcaccttatccgggggttcctgtggaggagctgttcaagctgttgaaggagggccatcggatggataaaccttcaaattgcacaaatgaactttacatgatgatgcgggattgttggcatgctgtgcctagccagagaccaacttttaaacagctggtagaggacctggatcgcatcgttgccttaacgagtaaccaggagtacctcgacctctccatgccccttgaccagtactccccttcattccctgacactcgctcttctacctgtagttcaggagaggacagcgtgttctcacatgaaccccttcctgaagaaccctgcctgccccgacaccccgcccagttagccaacggcggccttaaaaggagatag

SEQ ID NO: 341365 - DNA, 2196 bp, Artificial Sequence
  derived and/or modified sequence
atgtggagctggaaatgcttgcttttctgggctgtgctggtcactgctacactctgtactgcacggccttctccaacactgcccgagcaagatgccctgcccagctctgaggacgacgacgatgatgatgattccagcagcgaagagaaggagactgacaacaccaaaccgaatccggtggccccttactggaccagtcccgagaaaatggagaaaaaactgcacgccgtgccggcagccaaaacggtgaagttcaagtgcccatctagcgggactccaaatcccactctcagatggttaaagaacggtaaggagttcaagcctgaccacaggattggaggctataaggtgcgatacgcgacctggtcaatcatcatggactctgtggtcccgtcagataaggggaactacacgtgcatagttgagaacgaatacggaagtataaaccacacttaccagcttgatgtcgttgagcggtccccgcacaggcccatcttacaggccggtctgcccgctaataagacggtggccctcgggtctaacgtggagtttatgtgcaaggtgtactcagatccgcagcctcatatccagtggctcaaacacattgaagtgaatgggagcaagatcgggcctgataacttgccgtacgtgcaaatccttaagacagcaggggttaacaccaccgataaagaaatggaagttctgcatcttcggaatgtatcgttcgaggatgcaggagaatatacttgtctggctggcaacagcatcggtttaagccaccacagcgcttggctgacagtactcgaagcccttgaggaaagacccgctgtaatgacctccccgctgtacctagaaattattatatactgtacgggcgcttttctgatcagttgcatggtggggtccgtgattgtatacaaaatgaagtccggaactaagaaatccgacttccactcacagatggctgtccacaagctcgccaagtcaataccactgagacggcaggtaaccgtctccgctgactcctccgcctcaatgaatagcggagtgctgctggtccggcctagcagactcagtagctctggcacaccaatgctggctggagtaagcgagtatgagttgcctgaggacccaaggtgggagctgcctcgggatcgccttgtcttaggtaagccactgggcgaagggtgttttggacaggttgttctcgctgaggccattgggctcgataaagataagcccaacagggtgacaaaggtggccgtaaagatgcttaagagcgacgcaacagagaaggacttaagcgaccttatcagcgagatggaaatgatgaagatgattggcaaacacaaaaatataatcaatttgttgggtgcctgtactcaggatggccctctgtatgtgattgttgagtatgccagtaagggaaacctgagggagtatttacaggcccgtcgcccacctggactcgagtattgttacaatccttcccataaccccgaggaacagcttagcagcaaggatctagttagctgcgcgtatcaggtggccagaggcatggagtacctcgcatcaaagaagtgcatacaccgtgacctggccgctagaaatgtgctggtcacagaggacaatgtaatgaagatcgcagatttcgggctggctcgtgatatacaccacatcgactattataagaagactacaaacgggaggctgccggttaagtggatggcacccgaggctctgtttgacaggatctacacccaccaaagcgacgtgtggtcgtttggggtgctattgtgggagatttttacactgggaggtagcccctatcccggagtaccagtcgaagaactgttcaagctactgaaggagggacacaggatggataaaccttctaactgtaccaacgaattgtacatgatgatgagagattgctggcacgccgttccctcccaaagacccactttcaaacagctggtggaggatttagaccgcatcgtggcgctgacatccaatcaggaatacttagacttaagcatgcctctcgaccaatacagtcccagcttcccagacacgcggtcctcaacttgctcttccggagaagactctgtgttcagccatgagccattgcccgaggaaccgtgccttccccgacacccggcacaacttgctaatggaggacttaagaggcgctag

SEQ ID NO: 341366 - DNA, 2202 bp, Artificial Sequence
  derived and/or modified sequence
atgtggtcttggaagtgcctactgttctgggcagtgctcgtgaccgctaccctttgtacagcccgaccgtcgccgaccctacctgagcaggatgctctgcccagctccgaagatgatgatgacgatgacgacagtagtagcgaggagaaagagactgataacactaaaccaaacccggtggcgccttactggacttcccctgagaagatggagaagaagctgcacgccgtccccgcagccaagacggtgaagttcaagtgtccatcttccggtacacccaaccctaccttgagatggctcaaaaacggcaaggaattcaagcctgatcaccgcattgggggatataaagttaggtacgccacttggagcattatcatggactctgtggttccctccgataaggggaactatacttgtatcgttgagaatgagtacggcagtattaaccatacgtatcagctggatgttgtggagagaagcccccacagaccaatcctgcaggctgggctgcctgctaacaagaccgttgcacttggttctaacgtggaattcatgtgcaaggtgtacagcgatcctcagccccatatccagtggctgaaacatatcgaggtgaacgggagcaagatcgggccagacaacttgccgtacgtacagatcttgaaacactccgggatcaattctagcgacgctgaggtcttaactctgtttaatgtgaccgaggcacaaagcggcgaatacgtatgtaaggtttctaactatatcggagaagctaaccagtccgcatggctgaccgttacgaggcccgtggcaaaagccctggaggaacggccagctgtcatgaccagtcctttatacttggaaatcatcatctactgcactggggcttttctaatcagctgtatggtcggatccgtcatcgtgtacaagatgaaatctggcacaaaaaaaagtgacttccattcccagatggctgtccacaaactggctaagtcaatccccctacgcaggcaagtgacggtcagcgccgactcttcagccagcatgaactccggcgtactgctggtacggccatctcgcctctcgagctctgggactccaatgcttgccggtgtctcggagtatgagctgcccgaggaccctagatgggagttacccagggaccgactagtcctcggcaagccacttggagagggttgcttcggacaagtcgtgctagccgaagcaatcggcttggacaaagacaaacctaaccgcgtgaccaaagttgcagtgaaaatgctgaagtccgacgccaccgaaaaagacctcagtgacctgataagcgaaatggagatgatgaagatgataggcaaacacaaaaatataataaacctcctcggtgcatgcacccaggacggccctctgtatgttatcgtggaatacgctagcaagggcaacttaagggagtatttgcaggctaggaggccccctggcttagagtactgctataatccttcgcataacccagaggagcaattgtcatccaaagatctagtgagctgtgcctatcaggtggcaaggggaatggaatatctggccagtaaaaaatgtatacatagggatctggccgcaagaaatgttctcgtgaccgaagacaatgtgatgaaaattgccgatttcggtctggcacgggatatccaccacattgactactacaagaaaaccacgaatgggcgtctgccagtgaagtggatggcacccgaagccctctttgatcggatttacacacaccaatctgacgtctggtcattcggggttctgctgtgggaaatctttactctgggtggcagcccctacccaggagtgccagtggaggaactgttcaagctccttaaggagggccatcgaatggacaaaccttcaaactgcaccaacgaactgtatatgatgatgagggattgctggcacgccgtccctagtcagaggccaacattcaagcagttggtggaggacctcgatcgcattgtggctcttacaagtaaccaggagtacctcgatctcagcatgcccctggaccagtacagtccctcctttccagacacacggagcagtacatgctcatcaggcgaggattcggtcttctctcacgagccactgcccgaagagccgtgccttcccaggcaccctgctcagctggctaacgggggtttaaagcgccgttag

SEQ ID NO: 341367 - DNA, 2196 bp, Artificial Sequence
  derived and/or modified sequence
atgtggagctggaagtgcctgctgttctgggccgtgctggtgaccgccaccctgtgcaccgccagacccagccccaccctgcccgagcaggacgccctgcccagcagcgaggacgacgacgacgacgacgacagcagcagcgaggagaaggagaccgacaacaccaagcccaaccccgtggccccctactggaccagccccgagaagatggagaagaagctgcacgccgtgcccgccgccaagaccgtgaagttcaagtgccccagcagcggcacccccaaccccaccctgagatggctgaagaacggcaaggagttcaagcccgaccacagaatcggcggctacaaggtgagatacgccacctggagcatcatcatggacagcgtggtgcccagcgacaagggcaactacacctgcatcgtggagaacgagtacggcagcatcaaccacacctaccagctggacgtggtggagagaagcccccacagacccatcctgcaggccggcctgcccgccaacaagaccgtggccctgggcagcaacgtggagttcatgtgcaaggtgtacagcgacccccagccccacatccagtggctgaagcacatcgaggtgaacggcagcaagatcggccccgacaacctgccctacgtgcagatcctgaagaccgccggcgtgaacaccaccgacaaggagatggaggtgctgcacctgagaaacgtgagcttcgaggacgccggcgagtacacctgcctggccggcaacagcatcggcctgagccaccacagcgcctggctgaccgtgctggaggccctggaggagagacccgccgtgatgaccagccccctgtacctggagatcatcatctactgcaccggcgccttcctgatcagctgcatggtgggcagcgtgatcgtgtacaagatgaagagcggcaccaagaagagcgacttccacagccagatggccgtgcacaagctggccaagagcatccccctgagaagacaggtgaccgtgagcgccgacagcagcgccagcatgaacagcggcgtgctgctggtgagacccagcagactgagcagcagcggcacccccatgctggccggcgtgagcgagtacgagctgcccgaggaccccagatgggagctgcccagagacagactggtgctgggcaagcccctgggcgagggctgcttcggccaggtggtgctggccgaggccatcggcctggacaaggacaagcccaacagagtgaccaaggtggccgtgaagatgctgaagagcgacgccaccgagaaggacctgagcgacctgatcagcgagatggagatgatgaagatgatcggcaagcacaagaacatcatcaacctgctgggcgcctgcacccaggacggccccctgtacgtgatcgtggagtacgccagcaagggcaacctgagagagtacctgcaggccagaagaccccccggcctggagtactgctacaaccccagccacaaccccgaggagcagctgagcagcaaggacctggtgagctgcgcctaccaggtggccagaggcatggagtacctggccagcaagaagtgcatccacagagacctggccgccagaaacgtgctggtgaccgaggacaacgtgatgaagatcgccgacttcggcctggccagagacatccaccacatcgactactacaagaagaccaccaacggcagactgcccgtgaagtggatggcccccgaggccctgttcgacagaatctacacccaccagagcgacgtgtggagcttcggcgtgctgctgtgggagatcttcaccctgggcggcagcccctaccccggcgtgcccgtggaggagctgttcaagctgctgaaggagggccacagaatggacaagcccagcaactgcaccaacgagctgtacatgatgatgagagactgctggcacgccgtgcccagccagagacccaccttcaagcagctggtggaggacctggacagaatcgtggccctgaccagcaaccaggagtacctggacctgagcatgcccctggaccagtacagccccagcttccccgacaccagaagcagcacctgcagcagcggcgaggacagcgtgttcagccacgagcccctgcccgaggagccctgcctgcccagacaccccgcccagctggccaacggcggcctgaagagaagatag

SEQ ID NO: 341368 - DNA, 2202 bp, Artificial Sequence
  derived and/or modified sequence
atgtggagctggaagtgcctgctgttctgggccgtgctggtgaccgccaccctgtgcaccgccagacccagccccaccctgcccgagcaggacgccctgcccagcagcgaggacgacgacgacgacgacgacagcagcagcgaggagaaggagaccgacaacaccaagcccaaccccgtggccccctactggaccagccccgagaagatggagaagaagctgcacgccgtgcccgccgccaagaccgtgaagttcaagtgccccagcagcggcacccccaaccccaccctgagatggctgaagaacggcaaggagttcaagcccgaccacagaatcggcggctacaaggtgagatacgccacctggagcatcatcatggacagcgtggtgcccagcgacaagggcaactacacctgcatcgtggagaacgagtacggcagcatcaaccacacctaccagctggacgtggtggagagaagcccccacagacccatcctgcaggccggcctgcccgccaacaagaccgtggccctgggcagcaacgtggagttcatgtgcaaggtgtacagcgacccccagccccacatccagtggctgaagcacatcgaggtgaacggcagcaagatcggccccgacaacctgccctacgtgcagatcctgaagcacagcggcatcaacagcagcgacgccgaggtgctgaccctgttcaacgtgaccgaggcccagagcggcgagtacgtgtgcaaggtgagcaactacatcggcgaggccaaccagagcgcctggctgaccgtgaccagacccgtggccaaggccctggaggagagacccgccgtgatgaccagccccctgtacctggagatcatcatctactgcaccggcgccttcctgatcagctgcatggtgggcagcgtgatcgtgtacaagatgaagagcggcaccaagaagagcgacttccacagccagatggccgtgcacaagctggccaagagcatccccctgagaagacaggtgaccgtgagcgccgacagcagcgccagcatgaacagcggcgtgctgctggtgagacccagcagactgagcagcagcggcacccccatgctggccggcgtgagcgagtacgagctgcccgaggaccccagatgggagctgcccagagacagactggtgctgggcaagcccctgggcgagggctgcttcggccaggtggtgctggccgaggccatcggcctggacaaggacaagcccaacagagtgaccaaggtggccgtgaagatgctgaagagcgacgccaccgagaaggacctgagcgacctgatcagcgagatggagatgatgaagatgatcggcaagcacaagaacatcatcaacctgctgggcgcctgcacccaggacggccccctgtacgtgatcgtggagtacgccagcaagggcaacctgagagagtacctgcaggccagaagaccccccggcctggagtactgctacaaccccagccacaaccccgaggagcagctgagcagcaaggacctggtgagctgcgcctaccaggtggccagaggcatggagtacctggccagcaagaagtgcatccacagagacctggccgccagaaacgtgctggtgaccgaggacaacgtgatgaagatcgccgacttcggcctggccagagacatccaccacatcgactactacaagaagaccaccaacggcagactgcccgtgaagtggatggcccccgaggccctgttcgacagaatctacacccaccagagcgacgtgtggagcttcggcgtgctgctgtgggagatcttcaccctgggcggcagcccctaccccggcgtgcccgtggaggagctgttcaagctgctgaaggagggccacagaatggacaagcccagcaactgcaccaacgagctgtacatgatgatgagagactgctggcacgccgtgcccagccagagacccaccttcaagcagctggtggaggacctggacagaatcgtggccctgaccagcaaccaggagtacctggacctgagcatgcccctggaccagtacagccccagcttccccgacaccagaagcagcacctgcagcagcggcgaggacagcgtgttcagccacgagcccctgcccgaggagccctgcctgcccagacaccccgcccagctggccaacggcggcctgaagagaagatag

SEQ ID NO: 341369 - protein, 367 aa, Artificial Sequence
  derived and/or modified sequence
MWSWKCLLFWAVLVTATLCTARPSPTLPEQAQPWGAPVEVESFLVHPGDLLQLRCRLRDDVQSINWLRDGVQLAESNRTRITGEEVEVQDSVPADSGLYACVTSSPSGSDTTYFSVNVSVPIDALPSSEDDDDDDDSSSEEKETDNTKPNPVAPYWTSPEKMEKKLHAVPAAKTVKFKCPSSGTPNPTLRWLKNGKEFKPDHRIGGYKVRYATWSIIMDSVVPSDKGNYTCIVENEYGSINHTYQLDVVERSPHRPILQAGLPANKTVALGSNVEFMCKVYSDPQPHIQWLKHIEVNGSKIGPDNLPYVQILKHSGINSSDAEVLTLFNVTEAQSGEYVCKVSNYIGEANQSAWLTVTRPVAKDCWS

SEQ ID NO: 341370 - DNA, 2380 bp, Artificial Sequence
  derived and/or modified sequence
agatgcaggggcgcaaacgccaaaggagaccaggctgtaggaagagaagggcagagcgccggacagctcggcccgctccccgtcctttggggccgcggctggggaactacaaggcccagcaggcagctgcagggggcggaggcggaggagggaccagcgcgggtgggagtgagagagcgagccctcgcgccccgccggcgcatagcgctcggagcgctcttgcggccacaggcgcggcgtcctcggcggcgggcggcagctagcgggagccgggacgccggtgcagccgcagcgcgcggaggaacccgggtgtgccgggagctgggcggccacgtccggacgggaccgagacccctcgtagcgcattgcggcgacctcgccttccccggccgcgagcgcgccgctgcttgaaaagccgcggaacccaaggacttttctccggtccgagctcggggcgccccgcagggcgcacggtacccgtgctgcagtcgggcacgccgcggcgccggggcctccgcagggcgatggagcccggtctgcaaggaaagtgaggcgccgccgctgcgttctggaggaggggggcacaaggtctggagaccccgggtggcggacgggagccctccccccgccccgcctccggggcaccagctccggctccattgttcccgcccgggctggaggcgccgagcaccgagcgccgccgggagtcgagcgccggccgcggagctcttgcgaccccgccaggacccgaacagagcccgggggcggcgggccggagccggggacgcgggcacacgcccgctcgcacaagccacggcggactctcccgaggcggaacctccacgccgagcgagggtcagtttgaaaaggaggatcgagctcactgtggagtatccatggagatgtggagccttgtcaccaacctctaactgcagaactgggatgtggagctggaagtgcctcctcttctgggctgtgctggtcacagccacactctgcaccgctaggccgtccccgaccttgcctgaacaagcccagccctggggagcccctgtggaagtggagtccttcctggtccaccccggtgacctgctgcagcttcgctgtcggctgcgggacgatgtgcagagcatcaactggctgcgggacggggtgcagctggcggaaagcaaccgcacccgcatcacaggggaggaggtggaggtgcaggactccgtgcccgcagactccggcctctatgcttgcgtaaccagcagcccctcgggcagtgacaccacctacttctccgtcaatgtttcagttcccatagatgctctcccctcctcggaggatgatgatgatgatgatgactcctcttcagaggagaaagaaacagataacaccaaaccaaaccccgtagctccatattggacatccccagaaaagatggaaaagaaattgcatgcagtgccggctgccaagacagtgaagttcaaatgcccttccagtgggaccccaaaccccacactgcgctggttgaaaaatggcaaagaattcaaacctgaccacagaattggaggctacaaggtccgttatgccacctggagcatcataatggactctgtggtgccctctgacaagggcaactacacctgcattgtggagaatgagtacggcagcatcaaccacacataccagctggatgtcgtggagcggtcccctcaccggcccatcctgcaagcagggttgcccgccaacaaaacagtggccctgggtagcaacgtggagttcatgtgtaaggtgtacagtgacccgcagccgcacatccagtggctaaagcacatcgaggtgaatgggagcaagattggcccagacaacctgccttatgtccagatcttgaagcattcggggattaatagctcggatgcggaggtgctgaccctgttcaatgtgacagaggcccagagcggggagtatgtgtgtaaggtttccaattatattggtgaagctaaccagtctgcgtggctcactgtcaccagacctgtggcaaaagactgctggagttaataccaccgacaaagagatggaggtgcttcacttaagaaatgtctcctttgaggacgcaggggagtatacgtgcttggcgggtaactctatcggactctcccatcactctgcatggttgaccgttctggaagccctggaagagaggccggcagtgatgacctcgcccctgtacctggagatcatcatctattgcacaggggccttcctcatctcctgcatggtggggtcggtcatcgtctacaagatgaagagtggtaccaagaagagtgacttccacagccagatggctgtgcacaagctggccaagagcatccctctgcgcagacaggtaaca

SEQ ID NO: 341371 - DNA, 587 bp, Artificial Sequence
  derived and/or modified sequence
aactcgcgctcgggagctggcgaggcggcggcggctcctcaaccttgattctgcagtgggacctcccaggcccccttgccccccgcaacttctggactcatatccgtcagacatcacttgtcaccttccagcatcagggagaactggatccctcctggctccacactcttaggctctttggtcagtttgaaaaggaggatcgagctcactgtggagtatccatggagatgtggagccttgtcaccaacctctaactgcagaactgggatgtggagctggaagtgcctcctcttctgggctgtgctggtcacagccacactctgcaccgctaggccgtccccgaccttgcctgaacaagcccagccctggggagcccctgtggaagtggagtccttcctggtccaccccggtgacctgctgcagcttcgctgtcggctgcgggacgatgtgcagagcatcaactggctgcgggacggggtgcagctggcggaaagcaaccgcacccgcatcacaggggaggaggtggaggtgcaggactccgtgcccgcagactccggcctctatgcttgcgtaaccagcagcccctc

SEQ ID NO: 341372 - DNA, 389 bp, Artificial Sequence
  derived and/or modified sequence
caaatttggaggaatgaaattctccagctagaaggcccaagaaagtcttatggaagaaacagcttcttaaggtggggttcagagaaaagggaagggctggcctgttgcagaacaaggaatggcatgaagaaagtcttgcacagaggcatggatgttgcttcgagctgtggcgccctatagaaatagaacatgagcagctggtcacagtggctcatgcctgtaatcccagcactttgggaggccaaggcaggcggattgcttgagcccatgagatggagatgagcctggacaacatgggtcagtttgaaaaggaggatcgagctcactgtggagtatccatggagatgtggagccttgtcaccaacctctaactgcagaactgggatgtg

SEQ ID NO: 341373 - DNA, 1155 bp, Artificial Sequence
  derived and/or modified sequence
tttcacctcctggctccctcccgggcgatccgcgccccttgggtctcccctcccttccctccgtccgcgtctcctgcgccccctccctgcgctcgtcccgccgctcttcccgccgcccaacttttcctccaactcgcgctcgggagctggcgaggcggcggcggctcctcaggtcagtttgaaaaggaggatcgagctcactgtggagtatccatggagatgtggagccttgtcaccaacctctaactgcagaactgggatgtggagctggaagtgcctcctcttctgggctgtgctggtcacagccacactctgcaccgctaggccgtccccgaccttgcctgaacaagcccagccctggggagcccctgtggaagtggagtccttcctggtccaccccggtgacctgctgcagcttcgctgtcggctgcgggacgatgtgcagagcatcaactggctgcgggacggggtgcagctggcggaaagcaaccgcacccgcatcacaggggaggaggtggaggtgcaggactccgtgcccgcagactccggcctctatgcttgcgtaaccagcagcccctcgggcagtgacaccacctacttctccgtcaatgtttcagatgctctcccctcctcggaggatgatgatgatgatgatgactcctcttcagaggagaaagaaacagataacaccaaaccaaaccgtatgcccgtagctccatattggacatccccagaaaagatggaaaagaaattgcatgcagtgccggctgccaagacagtgaagttcaaatgcccttccagtgggaccccaaaccccacactgcgctggttgaaaaatggcaaagaattcaaacctgaccacagaattggaggctacaaggtccgttatgccacctggagcatcataatggactctgtggtgccctctgacaagggcaactacacctgcattgtggagaatgagtacggcagcatcaaccacacataccagctggatgtcgtggagcggtcccctcaccggcccatcctgcaagcagggttgcccgccaacaaaacagtggccctgggtagcaacgtggagttcatgtgtaaggtgtacagtgacccgcagccgcacatccagtggctaaagcacatcgaggtgaatgggagcaa

SEQ ID NO: 341374 - DNA, 1104 bp, Artificial Sequence
  derived and/or modified sequence
atgtggagctggaagtgtttactcttctgggctgtgctggtgacggctactctgtgcacggccagaccgtcaccaactctgccagaacaggctcagccatggggcgcacccgtcgaggtggagtcatttctcgtacacccgggggacctcctccagctgcgctgtagattgcgggacgatgtgcagagtatcaactggctgcgggacggtgtgcagctggccgagtccaacagaacgcgcattaccggagaggaggtggaggtgcaggatagtgttcccgctgactccgggctttacgcctgtgtgacgagttccccctcgggaagcgatacgacttacttttctgtaaacgtcagcgtgcctatagatgcattgccttcttcagaagatgacgacgacgatgacgactcatcctccgaggagaaggagacagacaacactaagccaaaccccgtggctccatactggacctcacccgagaaaatggagaagaagttgcatgctgtgccagccgctaaaaccgtgaaattcaagtgcccatcgtcaggtacgcccaacccaactcttcgctggctgaaaaatgggaaagaatttaagccagaccatcggattggcgggtacaaagtaagatacgctacctggagtatcatcatggattctgtcgtcccttctgacaaaggtaactatacttgcatcgtcgaaaatgagtacgggtcaatcaaccacacttaccagctggacgtggtagaacgctcccctcaccggcctattctccaggcgggcctgcccgcaaacaaaacagtggctctcggtagcaacgtggagtttatgtgcaaggtctacagtgacccacagcctcacatccagtggctgaagcacatcgaggttaacggtagtaagatcggacccgacaatttaccttatgttcagatactgaaacacagcggaatcaattcaagcgacgctgaagtgctcactctgttcaatgttactgaagcacagagcggcgagtacgtgtgcaaagttagcaattatattggcgaagccaaccagtctgcctggcttacggtgacaagaccggtggccaaagattgttggtcctag

SEQ ID NO: 341375 - DNA, 324 bp, Artificial Sequence
  derived and/or modified sequence
atgtggtcttggaaatgtttactattctgggccgtgctggtgactgccaccctatgcaccgcccggccttcccctacccttcctgagcaagcccagccttggggcgcacccgtggaggtcgagagtttcctggtccatccaggggatctgcttcagctgaggtgccggttacgggacgacgtacagtcaatcaactggttgagagacggcgtgcagctcgcagagagtaaccggacccgaatcaccggcgaggaagtcgaagtgcaagatagcgtgcccgccgattccggtctgtatgcctgcgtcacttcttccccttcctag

SEQ ID NO: 341376 - DNA, 897 bp, Artificial Sequence
  derived and/or modified sequence
atgtggagttggaagtgcctccttttttgggctgttttggtgaccgctacactctgcaccgctcgcccatccccaactctgccagagcaggcccagccatggggcgcaccagttgaagtggagtctttcctcgtgcacccaggtgatctgctccagctgcggtgtcgtttgcgagacgatgtgcagtcaataaattggctgcgtgacggggtgcagcttgctgagtccaatcgtaccagaataactggcgaagaagtggaggtgcaagattcagtccctgccgatagcggtctatatgcctgcgttactagcagcccatcgggctctgacacgacatacttttctgtgaatgtctcagacgccctgccttcatctgaggacgatgacgacgacgacgacagcagtagtgaagagaaagagacagacaacacaaaaccaaacaggatgcccgtggccccctattggaccagcccagaaaagatggaaaaaaaattgcatgcggtgcccgctgctaagaccgtgaaattcaagtgtccgagttcaggcacccctaacccaacactgcggtggcttaaaaatggtaaggaattcaagcccgaccacagaatcggcggatacaaggtacggtatgccacatggtcaataattatggactctgtggtgcccagcgacaaaggtaattatacgtgcatcgtggagaacgagtatgggagtatcaatcatacataccaactggatgtggtcgaaaggtctccgcaccgtcctatcctccaggcgggcctacctgccaacaaaactgtggctctggggtctaatgttgaatttatgtgtaaagtgtacagtgatccacagccacacatccaatggctgaagcacatcgaggtgaatgggtcttag

SEQ ID NO: 341377 - DNA, 1104 bp, Artificial Sequence
  derived and/or modified sequence
atgtggagctggaagtgcctgctcttctgggccgtgctggtgacagccaccctgtgcacagcccggcccagccccaccctgcctgagcaggcccagccctggggcgcccctgtggaggtggagagcttcctggtgcaccctggggacctgctgcagctgcgctgccgcctgagagatgatgtgcagagcatcaactggctgagagatggagtgcagctggccgagagcaacagaacccgcatcaccggggaggaggtggaggtgcaggacagcgtgcctgctgacagcggcctgtatgcctgtgtgaccagcagccccagcggcagtgacaccacctacttctctgtgaatgtgtctgtgcccattgatgccctgcccagcagtgaagatgatgatgatgatgatgacagcagcagcgaggagaaggagacagacaacaccaagcccaaccctgtggccccctactggaccagccctgagaagatggagaagaagctgcatgctgtgcctgctgccaagacagtgaagttcaagtgccccagcagcggcacccccaaccccaccctgcgctggctgaagaatggcaaggagttcaagccagaccaccgcatcggcggctacaaggtgcgctatgccacctggagcatcatcatggacagcgtggtgcccagcgacaagggcaactacacctgcatcgtggagaatgaatatggcagcatcaaccacacctaccagctggatgtggtggagaggagcccccaccggcccatcctgcaggccggcctgcctgccaacaagacagtggccctgggcagcaatgtggagttcatgtgcaaggtgtacagcgacccccagccccacatccagtggctgaagcacatcgaggtgaatggcagcaagattggaccagacaacctgccctacgtgcagatcctgaagcacagcggcatcaacagcagtgatgctgaggtgctgaccctcttcaacgtgacagaggcccagagcggggagtatgtgtgcaaggtgagcaactacatcggggaggccaaccagagcgcctggctgactgtgaccaggcctgtggccaaggactgctggagctag

SEQ ID NO: 341378 - DNA, 324 bp, Artificial Sequence
  derived and/or modified sequence
atgtggagctggaagtgcctgctcttctgggccgtgctggtgacagccaccctgtgcacagcccggcccagccccaccctgcctgagcaggcccagccctggggcgcccctgtggaggtggagagcttcctggtgcaccctggggacctgctgcagctgcgctgccgcctgagagatgatgtgcagagcatcaactggctgagagatggagtgcagctggccgagagcaacagaacccgcatcaccggggaggaggtggaggtgcaggacagcgtgcctgctgacagcggcctgtatgcctgtgtgaccagcagccccagctag

SEQ ID NO: 341379 - DNA, 897 bp, Artificial Sequence
  derived and/or modified sequence
atgtggagctggaagtgcctgctcttctgggccgtgctggtgacagccaccctgtgcacagcccggcccagccccaccctgcctgagcaggcccagccctggggcgcccctgtggaggtggagagcttcctggtgcaccctggggacctgctgcagctgcgctgccgcctgagagatgatgtgcagagcatcaactggctgagagatggagtgcagctggccgagagcaacagaacccgcatcaccggggaggaggtggaggtgcaggacagcgtgcctgctgacagcggcctgtatgcctgtgtgaccagcagccccagcggcagtgacaccacctacttctctgtgaatgtgtctgatgccctgcccagcagtgaagatgatgatgatgatgatgacagcagcagcgaggagaaggagacagacaacaccaagcccaacaggatgcctgtggccccctactggaccagccctgagaagatggagaagaagctgcatgctgtgcctgctgccaagacagtgaagttcaagtgccccagcagcggcacccccaaccccaccctgcgctggctgaagaatggcaaggagttcaagccagaccacagaattggaggctacaaggtgcgctatgccacctggagcatcatcatggattctgtggtgcccagcgacaagggcaactacacctgcatcgtggagaatgaatatggcagcatcaaccacacctaccagctggatgtggtggagaggagcccccaccggcccatcctgcaggccggcctgcctgccaacaagacagtggccctgggcagcaatgtggagttcatgtgcaaggtgtacagcgacccccagccccacatccagtggctgaagcacatcgaggtgaatggcagctag

SEQ ID NO: 341380 - DNA, 1104 bp, Artificial Sequence
  derived and/or modified sequence
atgtggagctggaagtgcctgctgttctgggccgtgctggtgaccgctactctatgtacagcacggccttcccctactctgccagaacaggcacagccctggggcgcccctgtggaagttgagtcatttctagtgcatcccggagacctcctgcaactccggtgtcgactgagggacgacgtgcagtctatcaattggctccgcgacggggtccagttagccgaaagcaatcgaacacggattactggtgaggaggtagaggtccaggattccgtgccagcggacagtggcttgtacgcatgtgttaccagctccccctcgggctcggacaccacctacttttccgtgaacgtgtccgtgccgatcgacgctctacccagctctgaggacgatgacgacgatgatgatagcagcagcgaggagaaagagacagacaatacaaaaccaaacccagtggccccgtattggaccagccctgagaaaatggagaaaaagcttcacgccgttcccgccgccaagacagtcaagtttaaatgcccaagcagcgggacccctaacccgactcttcgctggctcaagaacggtaaagaatttaaaccagatcacagaattggtgggtataaagtaaggtatgccacctggagcattatcatggacagcgtggtccccagcgataagggcaactatacctgcattgttgagaacgagtacggaagtattaaccacacgtaccagctcgacgtggttgaaagatctccgcaccggcctattctgcaagctggccttccagctaataaaacagtcgccctggggtcaaacgtggaattcatgtgtaaggtctattccgacccacagccacacatacagtggctcaaacacattgaagtgaacggatccaagatcgggccagacaacctaccgtacgtgcagattctgaagcatagtggcataaacagctcagatgcagaggtcctgacactgttcaatgtcacagaagcccagagtggagagtatgtctgcaaggtcagcaactatatcggggaggccaaccagtccgcttggctcacagtgactcgcccagtcgccaaggactgttggagttag

SEQ ID NO: 341381 - DNA, 324 bp, Artificial Sequence
  derived and/or modified sequence
atgtggagctggaagtgcctgctgttctgggccgtgctggtgaccgcaactctgtgtacggccagaccatctccaacactgcccgaacaggctcagccatggggggcgcctgtagaggtggaatcgtttcttgttcaccccggggacctactgcagctgaggtgtagactgcgcgacgacgttcaatccatcaattggcttcgggacggcgttcagctggcggagtcaaatagaacaaggatcacaggagaagaagtggaggtgcaggatagtgtcccagccgactcagggctgtatgcatgtgttacttcttcgccttcttag

SEQ ID NO: 341382 - DNA, 897 bp, Artificial Sequence
  derived and/or modified sequence
atgtggagctggaagtgcctgctgttctgggccgtgctggtgaccgctacactttgcacagcgcgcccatcacccaccctaccagagcaggcgcagccttggggagctccagtagaggtagaaagctttcttgttcaccccggggatcttctgcagctcaggtgccggctgcgcgacgacgtacaatccatcaactggctgcgcgatggagtgcagttagccgaaagcaataggactcgaatcactggagaagaggtagaagttcaagattctgtgccggcagactctggattatatgcctgcgtgacgtcttccccttccggcagcgatacaacgtacttcagcgttaacgtatccgatgccttgcccagcagcgaggatgacgatgacgatgacgactcttccagcgaggagaaagaaactgataacaccaagcccaaccgcatgcccgttgcaccctactggacatcacctgagaagatggaaaaaaagttacacgctgtgcccgccgcaaagacggtaaaattcaagtgcccctcttccggaacacctaacccaaccctgcgttggttgaaaaacggcaaggaatttaagcctgatcaccgcatcggcggctacaaggtgcgatatgcgacttggtccattatcatggactcagtggttccgtccgataaaggaaattacacatgtattgtggaaaatgagtatgggtctattaaccacacttatcagttggatgtggtagaaagatctccacataggccgatacttcaagcagggctgcccgcaaacaaaactgtggccctaggttcgaatgtcgaatttatgtgtaaggtctactctgacccacagccgcatatccagtggctcaagcacattgaggtaaatggaagttag

SEQ ID NO: 341383 - DNA, 1104 bp, Artificial Sequence
  derived and/or modified sequence
atgtggagctggaagtgcctcctgttttgggcagtactcgtgacagccacattatgtacagctaggccatcaccaaccttaccggaacaggcacagccctggggtgccccagtcgaggtggagtcttttctggtgcatcctggtgacctgctgcagctgcgctgcaggctgagagatgatgtgcagagtattaattggctgcgggatggtgtgcagctcgccgagagtaacaggacccggatcacaggggaagaggtggaagtgcaagactccgtgcccgctgactcaggcctgtatgcctgtgttacaagctccccctctggaagcgacacaacctactttagcgtgaacgtgtcagtcccaatcgatgcgttacctagcagcgaggacgacgacgatgacgacgactcgagttcggaggaaaaggagaccgacaatacaaagccgaaccccgttgccccatattggaccagccctgagaaaatggagaagaaactgcacgcagtgcctgcagcaaagactgtaaaatttaagtgtcctagctccgggaccccgaaccctactctcagatggttgaaaaacggaaaagagttcaaacctgaccaccgcattggtggatacaaggtgcggtatgctacctggtccataatcatggacagcgttgtgccatccgataagggaaactacacatgtatcgtggaaaatgagtatggcagtatcaatcacacttaccagctggacgtagtcgagagatctccgcatcgaccaattcttcaggccggtctgcccgctaataagactgtggctttaggcagcaacgttgagttcatgtgcaaggtctattccgacccgcagcctcacatacagtggctgaaacatatagaagtaaatgggagtaagattggtcctgacaaccttccttatgttcagattctgaagcactcaggaattaattcttcggacgcagaagtgctaaccctcttcaatgtgaccgaggcacagtcgggggaatacgtgtgtaaggtcagtaactacatcggggaagctaaccagtccgcgtggctcactgtgacgagacctgttgccaaggattgctggagctag

SEQ ID NO: 341384 - DNA, 324 bp, Artificial Sequence
  derived and/or modified sequence
atgtggagttggaagtgcctcctcttttgggccgtgttggtgacagcaacactgtgcaccgctaggccttcccccaccttgcccgaacaggcccagccatggggcgcaccggtcgaggtcgagagtttcctcgttcatccaggtgatctgcttcagttaagatgtaggctgcgagatgatgtgcagtccatcaattggctcagagacggcgtgcagctggctgagagcaaccggactagaatcaccggcgaggaagtggaagtgcaggactctgtaccagctgactctggattgtacgcatgcgtcaccagctccccatcatag

SEQ ID NO: 341385 - DNA, 897 bp, Artificial Sequence
  derived and/or modified sequence
atgtggagttggaagtgtcttctgttttgggctgttctagttaccgccactctctgtactgcccgacctagtcctactttgcctgaacaagctcaaccctggggagctccagtggaggtggaatctttccttgttcatcctggtgatttgttgcagctgagatgccgtctcagagatgatgtccagtcaatcaattggctgcgcgatggagtgcagttagctgagagtaataggacacggattacaggtgaagaggtagaggtgcaggattccgtcccggcagacagtggactttatgcctgtgtaacttcctcaccaagtggatctgacactacctatttcagtgtgaatgtctctgatgccctcccaagttcagaggatgacgacgacgatgatgactcgagctcagaggaaaaagagaccgataacaccaaacccaatcgcatgcccgttgccccatattggactagcccagagaaaatggagaaaaaactccatgctgtgccagctgcaaagacagtgaagttcaagtgtccgtctagcggaacacctaaccccacacttcgttggcttaaaaacggcaaggagtttaaacctgaccatagaatcggcggttataaagtaagatatgccacttggagcataatcatggatagcgttgtgccgagtgataaaggaaattatacctgtatcgtggaaaatgaatacggatccattaatcatacttaccagttggatgtggtcgaacgatccccacaccggcctattctccaggcaggactgccagcaaataagacagtcgctctgggctccaatgtggagttcatgtgtaaggtctactccgatccacagccacacatccagtggttgaagcacatcgaggttaatggctcatag

SEQ ID NO: 341386 - DNA, 1104 bp, Artificial Sequence
  derived and/or modified sequence
atgtggagctggaagtgcctgctgttctgggccgtgctggtgaccgccaccctgtgcaccgccagacccagccccaccctgcccgagcaggcccagccctggggcgcccccgtggaggtggagagcttcctggtgcaccccggcgacctgctgcagctgagatgcagactgagagacgacgtgcagagcatcaactggctgagagacggcgtgcagctggccgagagcaacagaaccagaatcaccggcgaggaggtggaggtgcaggacagcgtgcccgccgacagcggcctgtacgcctgcgtgaccagcagccccagcggcagcgacaccacctacttcagcgtgaacgtgagcgtgcccatcgacgccctgcccagcagcgaggacgacgacgacgacgacgacagcagcagcgaggagaaggagaccgacaacaccaagcccaaccccgtggccccctactggaccagccccgagaagatggagaagaagctgcacgccgtgcccgccgccaagaccgtgaagttcaagtgccccagcagcggcacccccaaccccaccctgagatggctgaagaacggcaaggagttcaagcccgaccacagaatcggcggctacaaggtgagatacgccacctggagcatcatcatggacagcgtggtgcccagcgacaagggcaactacacctgcatcgtggagaacgagtacggcagcatcaaccacacctaccagctggacgtggtggagagaagcccccacagacccatcctgcaggccggcctgcccgccaacaagaccgtggccctgggcagcaacgtggagttcatgtgcaaggtgtacagcgacccccagccccacatccagtggctgaagcacatcgaggtgaacggcagcaagatcggccccgacaacctgccctacgtgcagatcctgaagcacagcggcatcaacagcagcgacgccgaggtgctgaccctgttcaacgtgaccgaggcccagagcggcgagtacgtgtgcaaggtgagcaactacatcggcgaggccaaccagagcgcctggctgaccgtgaccagacccgtggccaaggactgctggagctag

SEQ ID NO: 341387 - DNA, 324 bp, Artificial Sequence
  derived and/or modified sequence
atgtggagctggaagtgcctgctgttctgggccgtgctggtgaccgccaccctgtgcaccgccagacccagccccaccctgcccgagcaggcccagccctggggcgcccccgtggaggtggagagcttcctggtgcaccccggcgacctgctgcagctgagatgcagactgagagacgacgtgcagagcatcaactggctgagagacggcgtgcagctggccgagagcaacagaaccagaatcaccggcgaggaggtggaggtgcaggacagcgtgcccgccgacagcggcctgtacgcctgcgtgaccagcagccccagctag

SEQ ID NO: 341388 - DNA, 897 bp, Artificial Sequence
  derived and/or modified sequence
atgtggagctggaagtgcctgctgttctgggccgtgctggtgaccgccaccctgtgcaccgccagacccagccccaccctgcccgagcaggcccagccctggggcgcccccgtggaggtggagagcttcctggtgcaccccggcgacctgctgcagctgagatgcagactgagagacgacgtgcagagcatcaactggctgagagacggcgtgcagctggccgagagcaacagaaccagaatcaccggcgaggaggtggaggtgcaggacagcgtgcccgccgacagcggcctgtacgcctgcgtgaccagcagccccagcggcagcgacaccacctacttcagcgtgaacgtgagcgacgccctgcccagcagcgaggacgacgacgacgacgacgacagcagcagcgaggagaaggagaccgacaacaccaagcccaacagaatgcccgtggccccctactggaccagccccgagaagatggagaagaagctgcacgccgtgcccgccgccaagaccgtgaagttcaagtgccccagcagcggcacccccaaccccaccctgagatggctgaagaacggcaaggagttcaagcccgaccacagaatcggcggctacaaggtgagatacgccacctggagcatcatcatggacagcgtggtgcccagcgacaagggcaactacacctgcatcgtggagaacgagtacggcagcatcaaccacacctaccagctggacgtggtggagagaagcccccacagacccatcctgcaggccggcctgcccgccaacaagaccgtggccctgggcagcaacgtggagttcatgtgcaaggtgtacagcgacccccagccccacatccagtggctgaagcacatcgaggtgaacggcagctag

SEQ ID NO: 341389 - protein, 727 aa, Artificial Sequence
  derived and/or modified sequence
MDSDMDYERPNVETIKCVVVGDNAVGKTRLICARACNATLTQYQLLATHVPTVWAIDQYRVCQEVLERSRDVVDDVSVSLRLWDTFGDHHKDRRFAYGRSDVVVLCFSIANPNSLHHVKTMWYPEIKHFCPRAPVILVGCQLDLRYADLEAVNRARRPLARPIKPNEILPPEKGREVAKELGIPYYETSVVAQFGIKDVFDNAIRAALISRRHLQFWKSHLRNVQRPLLQAPFLPPKPPPPIIVVPDPPSSSEECPAHLLEDPLCADVILVLQERVRIFAHKIYLSTSSSKFYDLFLMDLSEGELGGPSEPGGTHPEDHQGHSDQHHHHHHHHHGRDFLLRAASFDVCESVDEAGGSGPAGLRASTSDGILRGNGTGYLPGRGRVLSSWSRAFVSIQEEMAEDPLTYKSRLMVVVKMDSSIQPGPFRAVLKYLYTGELDENERDLMHIAHIAELLEVFDLRMMVANILNNEAFMNQEITKAFHVRRTNRVKECLAKGTFSDVTFILDDGTISAHKPLLISSCDWMAAMFGGPFVESSTREVVFPYTSKSCMRAVLEYLYTGMFTSSPDLDDMKLIILANRLCLPHLVALTEQYTVTGLMEATQMMVDIDGDVLVFLELAQFHCAYQLADWCLHHICTNYNNVCRKFPRDMKAMSPENQEYFEKHRWPPVWYLKEEDHYQRARKEREKEDYLHLKRQPKRRWLFWNSPSSPSSSAASSSSPSSSSAVV

SEQ ID NO: 341390 - protein, 269 aa, Artificial Sequence
  derived and/or modified sequence
MIGVNSVQSASKVRVRTSGSVKYSREDSIRRQSHRSKSMKISNSSEFSAKENKALYNSIKNEKLEWAVDDEEKKKSPSESTEEKANGTHPKTISRIGSTTNPFLDIPHDPNAAVYKSGFLARKIHADMDGKKTPRGKRGWKTFYAVLKGTVLYLQKHESKLKQITTELAEHRSYPPDKKVKAKDVDEYKLKDHYLEFEKTRYEMYVSILKEGGKELLSNDESEAAGLKKSHSSPSLNPDTSPITAKVKRNVSERKDHRPETPSIKQKVT

SEQ ID NO: 341391 - DNA, 96 bp, Artificial Sequence
  derived and/or modified sequence
atgctggaggccatcctgggccctgtgagcaacagcctgtatgtgtctgggaagacctgccacggcagccgctctgtgttcagcagcgccaagtag

SEQ ID NO: 341392 - protein, 464 aa, Artificial Sequence
  derived and/or modified sequence
MILANVFCLFFFLDETLRSLASPSSLQGPELHGWRPPVDCVRANELCAAESNCSSRYRTLRQCLAGRDRNTMLANKECQAALEVLQESPLYDCRCKRGMKKELQCLQIYWSIHLGLTEGEEFYEASPYEPVTSRLSDIFRLASIFSGTGADPVVSAKSNHCLDAAKACNLNDNCKKLRSSYISICNREISPTERCNRRKCHKALRQFFDRVPSEYTYRMLFCSCQDQACAERRRQTILPSCSYEDKEKPNCLDLRGVCRTDHLCRSRLADFHANCRASYQTVTSCPADNYQACLGSYAGMIGFDMTPNYVDSSPTGIVVSPWCSCRGSGNMEEECEKFLRDFTENPCLRNAIQAFGNGTDVNVSPKGPSFQATQAPRVEKTPSLPDDLSDSTSLGTSVITTCTSVQEQGLKANNSKELSMCFTELTTNIIPGSNKVIKPNSGPSRARPSAALTVLSVLMLKLAL

SEQ ID NO: 341393 - protein, 265 aa, Artificial Sequence
  derived and/or modified sequence
MILANVFCLFFFLDETLRSLASPSSLQGPELHGWRPPVDCVRANELCAAESNCSSRYRTLRQCLAGRDRNTMLANKECQAALEVLQESPLYDCRCKRGMKKELQCLQIYWSIHLGLTEGEEFYEASPYEPVTSRLSDIFRLASIFSGTGADPVVSAKSNHCLDAAKACNLNDNCKKLRSSYISICNREISPTERCNRRKCHKALRQFFDRVPSEYTYRMLFCSCQDQACAERRRQTILPSCSYEDKEKPNCLDLRGVCRTDHLCR

SEQ ID NO: 341394 - DNA, 1395 bp, Artificial Sequence
  derived and/or modified sequence
atgattctcgcgaacgtgttctgcctgttctttttcttggatgagacccttcgctccctggcatccccgtcttctcttcagggccctgagctccacggatggcgcccaccggtggattgtgtacgcgctaatgagctctgtgctgcagaatccaactgttcatcgcgatatcggactttgcggcagtgcttggcgggaagggacagaaataccatgctcgccaataaggagtgccaggccgccttggaggtactccaggagtcaccactttacgactgtcgctgtaaacgggggatgaaaaaagagcttcaatgcctgcaaatttactggagcattcacctgggtcttacagaaggggaggaattttacgaggcttctccatatgaacctgtaaccagccggttaagcgacatcttccgtctagcctccatcttcagcgggacgggggcagacccagtcgtgtcagcaaagtctaaccattgtttagacgccgccaaagcctgcaatttaaacgataattgtaagaagctgagaagcagctacattagcatttgtaaccgcgagatatctcctacagagagatgcaatcggcgcaaatgtcacaaggcactgaggcagttttttgaccgagtgccatcggaatatacataccgaatgctcttttgctcgtgccaggaccaggcctgcgccgagcggaggcgtcagactatcctgccaagttgtagttatgaagacaaggagaagcctaattgtctggacctccgaggtgtgtgtagaacggaccatctgtgccgctctcgcctggctgatttccatgcgaactgcagagccagctatcagactgtcacatcttgtcccgctgacaattaccaagcctgtttgggttcctatgcagggatgatcggctttgacatgacaccgaactacgttgatagtagcccaactgggattgtcgtaagcccctggtgttcctgccggggatccgggaatatggaggaagaatgtgagaaattcctcagggattttaccgaaaacccttgtctccgcaatgctattcaggctttcggcaacggcactgatgtcaatgtgtcccccaaaggaccatcttttcaggccacacaggcaccacgagtcgaaaagactccgtctttacccgatgatctgtccgattcaacctccttagggacctcagtcatcaccacctgcaccagcgtccaggagcagggtctgaaagcaaataacagcaaggaactgagcatgtgcttcaccgagctgacaacgaatattatacctggtagcaacaaagtgattaaaccaaatagcgggcccagccgggctagacctagtgccgcccttacagtcctgagcgtccttatgctgaagctggctctctag

SEQ ID NO: 341395 - DNA, 798 bp, Artificial Sequence
  derived and/or modified sequence
atgattctagcaaatgttttttgtctgttcttcttcttggacgagactcttaggtctctcgccagccccagcagcctgcaggggccagaactgcatggatggaggccacccgtggactgtgtcagggccaatgagctgtgtgccgccgaatccaactgtagcagccggtataggactctcaggcaatgcctggctggcagggatagaaataccatgttagccaacaaagaatgtcaagcagcccttgaagtacttcaagaaagcccgctgtacgattgtagatgtaagcggggcatgaagaaggagttgcagtgcttacagatttattggtctatccacctgggactaacagagggtgaggagttctatgaagcctctccatacgagccggtcacatcccgtctaagcgatatatttagactggcctcaatattcagcggaaccggggccgatcccgtcgtgtcagcaaaatctaaccactgccttgacgccgccaaagcttgcaatctcaacgacaattgcaagaagctaagaagctcatatatatccatttgcaatagagaaatttcaccaacggagagatgcaacagacggaagtgtcacaaagccctgcgacagttctttgatcgggttccgtctgaatacacctatcgaatgctgttctgtagctgccaggaccaggcgtgtgcagagcggcggagacagaccattcttcccagttgcagctacgaggacaaggaaaaacctaactgtctggatctccggggggtatgcagaacagatcatctgtgtcgatag

SEQ ID NO: 341396 - DNA, 1395 bp, Artificial Sequence
  derived and/or modified sequence
atgattctagcgaacgtgttttgtctcttttttttcctggatgagacactccggagcctggctagcccctcatcactgcagggcccagagctgcatggctggcgtcctccggttgactgtgtcagagccaatgaactctgcgccgcagaatccaattgttcttctcgctaccgcacgcttagacagtgtctagctggcagggatagaaatacaatgctggccaataaagagtgccaagcagccctcgaagtcttacaggaaagccccctgtacgattgtaggtgtaagagggggatgaagaaggaactgcagtgtctgcagatttattggagcatccatttgggtctgacagagggcgaggagttctacgaggcatccccctatgaacctgtgactagtcggctgtcagacatttttcgcctcgcctcaattttttctggcaccggggcagaccccgtcgtgtcagcgaaatcgaatcattgtcttgacgccgcgaaagcatgtaacttgaatgacaactgtaagaagttaagaagctcatacatcagcatttgcaatcgcgagatcagcccaaccgagagatgtaataggcggaaatgccataaagcactgcggcagttcttcgatcgcgtcccatcagagtatacatatagaatgctgttttgctcatgtcaggatcaggcctgcgccgaacgacgccgccagactatactgcccagctgctcctacgaagataaggagaagccaaactgtcttgatctaagaggggtatgtagaacagaccacctctgtaggagcagattggcggattttcacgccaactgtagagcaagctatcaaactgtgacctcttgtccagccgacaattaccaggcgtgcctgggcagttatgccggcatgatcggatttgacatgaccccaaattatgtagatagcagtcctacaggaatcgttgtgtctccttggtgctcatgcagagggagtggcaacatggaagaagagtgtgagaaattcctaagagacttcactgaaaatccatgcctcaggaatgccatacaggcctttggcaatggcaccgacgtcaatgtgtcacccaagggtccctctttccaggccacccaggcccctcgagtcgagaaaaccccatccctgcccgacgacttatcagatagcacatccttgggaacctcagtgataaccacctgcacaagcgttcaggagcaaggcctgaaggcaaacaactctaaggaactgtctatgtgcttcacagagctcacgaccaacattatccctggctcgaacaaggtcattaaaccgaactccggaccctccagagcccggccgagcgctgctcttacagtactctctgtcctcatgctaaagctcgccctgtag

SEQ ID NO: 341397 - DNA, 2104 bp, Artificial Sequence
  derived and/or modified sequence
gggagtggagccagcagctgagaccccggcaagggcaaccatggatctggagttggaacgggacaatgcgccatcaggccggcagaagctggcagatgagggccgagttgcggcacacaggtgccagatctccaaatagaggaaattggaaagaaaaagataaagctaatctgtaatttcatcacccggagacaactgctgttgacattgcattgtgtgtctaaggaggactttgacagggagaaagacaaaaaaacggtgggatttatttaacatgatcttggcaaacgtcttctgcctcttcttctttctagacgagaccctccgctctttggccagcccttcctccctgcagggccccgagctccacggctggcgccccccagtggactgtgtccgggccaatgagctgtgtgccgccgaatccaactgcagctctcgctaccgcactctgcggcagtgcctggcaggccgcgaccgcaacaccatgctggccaacaaggagtgccaggcggccttggaggtcttgcaggagagcccgctgtacgactgccgctgcaagcggggcatgaagaaggagctgcagtgtctgcagatctactggagcatccacctggggctgaccgagggtgaggagttctacgaagcctccccctatgagccggtgacctcccgcctctcggacatcttcaggcttgcttcaatcttctcagggacaggggcagacccggtggtcagcgccaagagcaaccattgcctggatgctgccaaggcctgcaacctgaatgacaactgcaagaagctgcgctcctcctacatctccatctgcaaccgcgagatctcgcccaccgagcgctgcaaccgccgcaagtgccacaaggccctgcgccagttcttcgaccgggtgcccagcgagtacacctaccgcatgctcttctgctcctgccaagaccaggcgtgcgctgagcgccgccggcaaaccatcctgcccagctgctcctatgaggacaaggagaagcccaactgcctggacctgcgtggcgtgtgccggactgaccacctgtgtcggtcccggctggccgacttccatgccaattgtcgagcctcctaccagacggtcaccagctgccctgcggacaattaccaggcgtgtctgggctcttatgctggcatgattgggtttgacatgacacctaactatgtggactccagccccactggcatcgtggtgtccccctggtgcagctgtcgtggcagcgggaacatggaggaggagtgtgagaagttcctcagggacttcaccgagaacccatgcctccggaacgccatccaggcctttggcaacggcacggacgtgaacgtgtccccaaaaggcccctcgttccaggccacccaggcccctcgggtggagaagacgccttctttgccagatgacctcagtgacagtaccagcttggggaccagtgtcatcaccacctgcacgtctgtccaggagcaggggctgaaggccaacaactccaaagagttaagcatgtgcttcacagagctcacgacaaatatcatcccagggagtaacaaggtgatcaaacctaactcaggccccagcagagccagaccgtcggctgccttgaccgtgctgtctgtcctgatgctgaaactggccttgtaggctgtgggaaccgagtcagaatatttttgaaagctacgcagacaagaacagccgcctgacgaaatggaaacacacacagacacacacacaccttgcaaaaaaaaaattgtttttcccaccttgtcgctgaacctgtctcctcccaggtttcttctctggagaagtttttgtaaaccaaacagacaagcaggcaggcagcctgagagctggcccaggggtcccctggcaggggaaactctggtgccggggagggcacgaggctctagaaatgcccttcactttctcctggtgtttttctctctggacccttctgaagcagagaccggacaagagcctgcagcggaagggactctgggctgtgcctgaggctggctgggggcaggacaacacagctgcttccccaggctgcccactctggggacccgctgggggctg

SEQ ID NO: 341398 - DNA, 874 bp, Artificial Sequence
  derived and/or modified sequence
gccgtagccgggggagccagtcagtttccggccaaggcagcagggagaaagacaaaaaaacggtgggatttatttaacatgatcttggcaaacgtcttctgcctcttcttctttctagacgagaccctccgctctttggccagcccttcctccctgcagggccccgagctccacggctggcgccccccagtggactgtgtccgggccaatgagctgtgtgccgccgaatccaactgcagctctcgctaccgcactctgcggcagtgcctggcaggccgcgaccgcaacaccatgctggccaacaaggagtgccaggcggccttggaggtcttgcaggagagcccgctgtacgactgccgctgcaagcggggcatgaagaaggagctgcagtgtctgcagatctactggagcatccacctggggctgaccgagggtgaggagttctacgaagcctccccctatgagccggtgacctcccgcctctcggacatcttcaggcttgcttcaatcttctcagggacaggggcagacccggtggtcagcgccaagagcaaccattgcctggatgctgccaaggcctgcaacctgaatgacaactgcaagaagctgcgctcctcctacatctccatctgcaaccgcgagatctcgcccaccgagcgctgcaaccgccgcaagtgccacaaggccctgcgccagttcttcgaccgggtgcccagcgagtacacctaccgcatgctcttctgctcctgccaagaccaggcgtgcgctgagcgccgccggcaaaccatcctgcccagctgctcctatgaggacaaggagaagcccaactgcctggacctgcgtggcgtgtgccggactgaccacctgtgtcggt

SEQ ID NO: 341399 - DNA, 4921 bp, Artificial Sequence
  derived and/or modified sequence
aagacacacgcacgcagagacacacggtcactggaattccattagaaaaaagtgagccgagcaagggttagcgggagaagatttttttgaatcttgtcttcgtcttggtgcgaaagaagcgactccagtctctcgtcctcgaagctccgactggattgttcttgggcgctgacacccgtctgtggatttcttttctatttgcattttattccgaccccctccctcgccgcttccttccagcccttcactcgcaaatcgcctctctccccacctccccaggcccctcctgggaagcgcaggggaattggacccgcggggactcacgccttcccggacgattggaggggagggctgaccccaggactgggctgttggcttagaaagccgatacacagatacgcgtatatttgattgtagcgggcaaggggggcgtcgagaggcagcagcccatcgcccgcctctcaccccaccccctccagccagaggcgagaatcgcaggactcgggatcttcatcgggtggactagctgggatctccgcattggatttggggctgattaccactgcttgcctattattattgttgttgttactactattatttttttttacccaagggagaaagacaaaaaaacggtgggatttatttaacatgatcttggcaaacgtcttctgcctcttcttctttctagacgagaccctccgctctttggccagcccttcctccctgcagggccccgagctccacggctggcgccccccagtggactgtgtccgggccaatgagctgtgtgccgccgaatccaactgcagctctcgctaccgcactctgcggcagtgcctggcaggccgcgaccgcaacaccatgctggccaacaaggagtgccaggcggccttggaggtcttgcaggagagcccgctgtacgactgccgctgcaagcggggcatgaagaaggagctgcagtgtctgcagatctactggagcatccacctggggctgaccgagggtgaggagttctacgaagcctccccctatgagccggtgacctcccgcctctcggacatcttcaggcttgcttcaatcttctcagggacaggggcagacccggtggtcagcgccaagagcaaccattgcctggatgctgccaaggcctgcaacctgaatgacaactgcaagaagctgcgctcctcctacatctccatctgcaaccgcgagatctcgcccaccgagcgctgcaaccgccgcaagtgccacaaggccctgcgccagttcttcgaccgggtgcccagcgagtacacctaccgcatgctcttctgctcctgccaagaccaggcgtgcgctgagcgccgccggcaaaccatcctgcccagctgctcctatgaggacaaggagaagcccaactgcctggacctgcgtggcgtgtgccggactgaccacctgtgtcggtcccggctggccgacttccatgccaattgtcgagcctcctaccagacggtcaccagctgccctgcggacaattaccaggcgtgtctgggctcttatgctggcatgattgggtttgacatgacacctaactatgtggactccagccccactggcatcgtggtgtccccctggtgcagctgtcgtggcagcgggaacatggaggaggagtgtgagaagttcctcagggacttcaccgagaacccatgcctccggaacgccatccaggcctttggcaacggcacggacgtgaacgtgtccccaaaaggcccctcgttccaggccacccaggcccctcgggtggagaagacgccttctttgccagatgacctcagtgacagtaccagcttggggaccagtgtcatcaccacctgcacgtctgtccaggagcaggggctgaaggccaacaactccaaagagttaagcatgtgcttcacagagctcacgacaaatatcatcccagggagtaacaaggtgatcaaacctaactcaggccccagcagagccagaccgtcggctgccttgaccgtgctgtctgtcctgatgctgaaactggccttgtaggctgtgggaaccgagtcagaatatttttgaaagctacgcagacaagaacagccgcctgacgaaatggaaacacacacagacacacacacaccttgcaaaaaaaaaattgtttttcccaccttgtcgctgaacctgtctcctcccaggtttcttctctggagaagtttttgtaaaccaaacagacaagcaggcaggcagcctgagagctggcccaggggtcccctggcaggggaaactctggtgccggggagggcacgaggctctagaaatgcccttcactttctcctggtgtttttctctctggacccttctgaagcagagaccggacaagagcctgcagcggaagggactctgggctgtgcctgaggctggctgggggcaggacaacacagctgcttccccaggctgcccactctggggacccgctgggggctggcagagggcatcggtcagcggggcagcggggctggccatgagggtccaccttcagccctttggcttcaaggatggagatggttttgccctccctctctgccctcgggtggggctggtgggtctgcagctggtgtgggaacttccccacggatggcggtggagggggttcgcaccgtgctgggctccccctgactgtagcacggagtgttggggctgggggccagctccaggagggcttgagagctcagcctgcctgggagagcccttgtggcgaggcattaaaacttgggcaccagcttctttctcggtggcagaaattttgaagtcagagagaaacggtcctttgttggcttctttgctttctcgtgggtcctttggcaggcctccctttggggagagggaggggagagaccacagccgggtgtgtgtctgcagcaccgtgggccctcaagctttcctgctgtcttctccctcctcctcctttcccctttctctttcctcatttcctagacgtacgtcaactgtatgtacataccggggctcctctcctaacatatatgtatatacacatccatatacatatattgtgtggtttcccctttctttcctttttttaagcaacaaaactatggaaataataccccaacagatgagcgaaaatgtattattgtaaagtttattttttttaatactgttgtctataatggggaaaaaggacattggccccgcagtgccctgccccagtcagcctggctgggctctggtgggggctcctgatccgcatccaagcttaaccaaggctccaataaacgtgctaggaagcaagctgcctctgcctcggtcccgtggggttttgcccccattttgttcttggtccagtgttacctgcgtaagtggagctcccagtgggctggggaaatgtgtgtccgtgtgtgtgcctgtgtgcatgtgtgtgcatccatgtgtctcacccatgtgtccacattgtgtgtagatggagctctcttaggagctggtttgacactgggggcgggatctgagggtccacgctgtgctgagcctggtgggctgttctgttccctctttgctcacttctccagttggcgcaaatgcctgtggctcccaggctggaagagaatgcagtggacgtggacgtggtggggagccacagcttggcatcacacgttgggaatgttttattgtcaggctgtctgggtggccctgttagtcttacatagagcaaagtggtatgtccctctgggactcctggcttatttgagatgtgtgattgtgagtgcagtgacctggccttttgggtcccaccagagaagaaggacatgactgtgcatgttctggggtcatggtctgaaagcataagtattttttgggtctccctctattccttcctttcctgtttctccatttgctacccaggccccacttggacactaggcctgccatagtctccaagagagattctccccagagaggaccaggagaatgcctgctggccaagtgtgtgtgtgtccatgtatgtgagcatgtgtacatgtgtgtgcggtcgtgtgcaggctcgcacatgttcacgtgcacgtgtgaatatatacccatggcaggagggagaatggaagactggtaggcgagaagatgtttctactgtcagcctggccttcagggctgcatgtgagcccatcccatttcaactggacaataggatgcagttttcccatctcccaatcgcaggtcccctcaatggcttttgcttctggttgtatatgtgtgagcagcatccgttcacagcgtttatcactgtggtgtattgccttccagcctctgcatggaaggggtacagtgagccagccaggtctctgtccagccattgcgggtagacgtggtcatggcatccacttaggaatccgtgttctttgcaaacagcaaagaccatttaacttaaaaagtactttactggaaggctatgggagaaggtggctcacggaatttgtgggaggtggggggaccaggggaggcgagggcagggactggagggcatctgaggggctggaaggcaggatgtacagggtcagcattctgctgccaaccattgcccatctggctgaactgggccttgtgcctgccctctgccatacttgagtgtgagagagaggatatatatgtcatgtctggtatccctaataggaggtaagcccttaggctacatcatgggggagagaaaatttcccaagaggaaactgaggtgccattatgaaggaggagtggatactagctagctttactctgccctcaaatgtctccctatccaagtatcacatggctgaaattttaccattaggtattcattcctttggttgagatgattcctatttgtgattctctcaaaatatgcaaatcgaactagaagaataaattgttgctatcttaa

SEQ ID NO: 341400 - DNA, 1395 bp, Artificial Sequence
  derived and/or modified sequence
atgatcctggccaacgtgttctgcctcttcttcttcctggatgagaccctgcggagcctggccagccccagcagcctgcagggccctgagctgcacggctggaggcctcctgtggactgtgtgcgggccaatgagctgtgtgccgctgagagcaactgcagcagccgctaccgcaccctgcggcagtgcctggccggccgggacaggaacaccatgctggccaacaaggagtgccaggccgccctggaggtgctgcaggagagccccctgtatgactgccgctgcaagaggggcatgaagaaggagctgcagtgcctgcagatctactggagcatccacctgggcctgacagaaggagaggagttctatgaggccagcccctatgagcctgtgaccagccggctgagtgacatcttccggctggccagcatcttcagcggcaccggggctgaccctgtggtgtctgccaagagcaaccactgcctggatgctgccaaggcctgcaacctgaatgacaactgcaagaagctgcggagcagctacatcagcatctgcaaccgggagatcagccccacagagcgctgcaacagaaggaagtgccacaaggccctgcggcagttctttgacagagtgcccagcgagtacacctacaggatgctgttctgcagctgccaggaccaggcctgtgccgagcggcggcggcagaccatcctgcccagctgcagctatgaggacaaggagaagcccaactgcctggacctgcggggcgtgtgcaggacagaccacctgtgccgcagccggctggccgacttccacgccaactgccgggccagctaccagacagtgaccagctgcccagctgacaactaccaggcctgcctgggcagctatgccggcatgattggatttgacatgacccccaactacgtggacagcagccccactggaattgtggtgagcccctggtgcagctgccggggcagcggcaacatggaggaggagtgtgagaagttcctgcgggacttcacagagaacccctgcctgagaaatgccatccaggcctttggaaatggaacagatgtgaatgtgagccccaagggccccagcttccaggccacccaggccccccgggtggagaagacccccagcctgcctgatgacctgagtgacagcaccagcctgggcaccagcgtcatcaccacctgcacctctgtgcaggagcagggcctgaaggccaacaacagcaaggagctgtccatgtgcttcacagagctgaccaccaacatcatccctggcagcaacaaggtgatcaagcccaacagcggccccagccgggcccggcccagcgctgccctgactgtgctgtctgtgctgatgctgaagctggccctgtag

SEQ ID NO: 341401 - DNA, 798 bp, Artificial Sequence
  derived and/or modified sequence
atgatcctggccaacgtgttctgcctcttcttcttcctggatgagaccctgcggagcctggccagccccagcagcctgcagggccctgagctgcacggctggaggcctcctgtggactgtgtgcgggccaatgagctgtgtgccgctgagagcaactgcagcagccgctaccgcaccctgcggcagtgcctggccggccgggacaggaacaccatgctggccaacaaggagtgccaggccgccctggaggtgctgcaggagagccccctgtatgactgccgctgcaagaggggcatgaagaaggagctgcagtgcctgcagatctactggagcatccacctgggcctgacagaaggagaggagttctatgaggccagcccctatgagcctgtgaccagccggctgagtgacatcttccggctggccagcatcttcagcggcaccggggctgaccctgtggtgtctgccaagagcaaccactgcctggatgctgccaaggcctgcaacctgaatgacaactgcaagaagctgcggagcagctacatcagcatctgcaaccgggagatcagccccacagagcgctgcaacagaaggaagtgccacaaggccctgcggcagttctttgacagagtgcccagcgagtacacctacaggatgctgttctgcagctgccaggaccaggcctgtgccgagcggcggcggcagaccatcctgcccagctgcagctatgaggacaaggagaagcccaactgcctggacctgcggggcgtgtgcaggacagaccacctgtgcaggtag

SEQ ID NO: 341402 - DNA, 1395 bp, Artificial Sequence
  derived and/or modified sequence
atgatcctggccaacgtgttctgcctgttcttcttcctggacgagacactacggagcttggcttcaccgtcaagtcttcaaggtcctgaattacatgggtggagacctcccgtagactgcgtaagagccaacgaactctgtgctgctgaatccaactgttcaagtcggtatcgcacactgcggcagtgcttggccggtcgagatcgcaacacaatgttagctaataaggagtgccaagctgcactggaggtcctgcaggagagcccgctgtatgattgcaggtgcaaacggggaatgaaaaaggagctgcagtgcttacagatatactggtccatccacctgggactcactgagggagaagaattttacgaggccagcccttatgaacccgtgacatcaaggctatcggatatcttcaggctggcttcaattttctccgggaccggtgccgatccagtggtgtcagccaagagcaaccactgcctggatgccgccaaagcctgtaacctgaatgacaactgcaaaaaactgcgaagctcgtatatttcgatatgcaacagagagatctcacctactgagcgatgcaatcggagaaaatgtcataaggccttgaggcagttctttgacagggtgccctccgagtatacatatcgcatgctattttgttcctgccaagaccaggcttgtgcagagagaagacgccaaaccatcctgccaagttgctcatacgaggacaaagagaaacctaactgtttggatttgagaggcgtctgcaggacagatcacttatgcaggtccaggctggccgactttcacgccaactgtagagcgtcttaccagacagttactagctgtccagcagacaattatcaggcctgtcttggaagctatgctgggatgatcggcttcgatatgaccccgaactacgtcgatagctccccgaccggtatcgtcgttagcccatggtgctcgtgtcgagggagcgggaatatggaggaggaatgcgagaagtttctccgtgactttaccgagaatccatgtctgcgcaacgccatccaggctttcggtaacggcactgacgtcaatgtgtcacccaagggcccttccttccaggctactcaggcacctagagtcgagaaaactccgagcttgcctgacgatttgtccgacagtacctcccttggtaccagcgtcattacaacttgcacaagtgtacaggagcagggccttaaagcaaacaactctaaggagctgtctatgtgctttactgagttgacaacaaacattatcccaggtagtaacaaggtgattaaaccaaattccggcccttcgcgagcccgaccaagcgctgccttgaccgtgctttccgtgctgatgctcaagttggctctgtag

SEQ ID NO: 341403 - DNA, 798 bp, Artificial Sequence
  derived and/or modified sequence
atgatcctggccaacgtgttctgcctgttcttcttcctggacgagaccctgcgctcattagcctcccctagcagtctgcagggccccgagctgcatggatggcggccccctgtggactgcgtgcgggccaacgaactgtgcgctgcagaatcaaattgtagctccaggtataggactctccggcaatgcctcgccggaagggacaggaatacgatgctggcgaacaaggagtgccaggccgcgctggaagtcttgcaagagtctccactgtacgactgtagatgcaaaagagggatgaagaaggagctgcaatgtctgcagatctactggtccattcatctggggctaactgaaggcgaagagttctatgaagcgagtccctacgaacctgtgacctcacggctgagcgacatcttcaggctggcctcaattttttctggtacgggcgcagatccggtcgtcagtgcgaaatctaatcattgccttgatgccgctaaagcttgcaatttaaatgacaattgcaagaagctaaggtcgagctacatcagtatttgtaatcgtgagatctctcccacagaaaggtgtaatcgccggaaatgtcataaggctctcaggcaattttttgatagagttccttctgaatacacctatcgcatgctcttctgttcatgtcaggaccaagcgtgtgcggaaagacggcgccagactatcctgccctcctgcagctacgaagataaagaaaagccaaattgcctggacctccgcggtgtttgtagaaccgatcatttatgcaggtag

SEQ ID NO: 341404 - DNA, 1395 bp, Artificial Sequence
  derived and/or modified sequence
atgatcctggccaacgtgttctgcctgttcttcttcctggacgagacccttagaagcctggcgtccccctcatctctgcaggggccagagcttcacggctggcgccctccagtggactgtgtccgagccaacgaactctgtgctgccgagtctaattgttcttcacggtacagaaccctgaggcaatgtctggccggaagagacagaaataccatgctggccaacaaggagtgccaggcggctcttgaagtactccaggaatcaccattgtacgactgtagatgcaaacgcggcatgaagaaggaacttcagtgtctccagatctactggtccatacacctagggctgacggagggagaggagttctacgaagcctccccgtacgagcccgtaaccagcagactttcagacatcttccgtttggcttcaattttctcagggactggggctgacccagtagttagcgccaagagtaaccactgccttgacgccgcgaaggcctgcaatctgaatgacaactgtaagaaactgagaagctcttacatttctatttgcaatcgtgagatatcaccgaccgagaggtgcaaccggcggaagtgtcacaaagcgcttagacagttcttcgaccgagtccctagtgagtatacatacaggatgttattctgcagttgccaggaccaggcatgcgctgagcggaggcggcagaccattttaccatcttgttcatacgaggataaggagaagcccaattgtctcgacttacggggggtgtgtcggactgatcacctgtgtaggtcccggttggctgactttcacgccaattgcagagcgtcttaccaaacagtgacatcatgccccgcggacaactaccaggcctgccttgggtcctacgccgggatgattggctttgacatgacccccaattacgtcgattccagccctacaggcatcgtggtgagtccctggtgcagctgccgcggctccggaaacatggaagaagagtgcgaaaaattcctcagggactttacagaaaacccctgtctgcggaacgccatccaggcttttggcaacgggacagacgtcaacgtgtctccaaaagggccatccttccaggcgacccaagcacctagggtggagaagactccaagcttaccagacgacctcagcgattctacctcactgggaactagtgtgatcaccacctgtacatctgtccaggagcaaggcttgaaagctaacaactcaaaagagttgtctatgtgctttacagaacttaccactaatatcatacctggctctaataaggtgattaagccgaactccggaccttctagggccagaccctcagccgccctgacagtgctcagcgtgctcatgcttaaactcgcattatag

SEQ ID NO: 341405 - DNA, 1395 bp, Artificial Sequence
  derived and/or modified sequence
atgattctggccaatgtcttctgtctgttcttcttcctggacgagaccctgcggtcgcttgcgtccccctcatcattacagggaccagagctgcacggctggcgaccaccagtggattgtgttcgggctaatgagctctgtgccgctgaatcaaactgctctagcaggtaccgtacccttcgccagtgtctcgcaggaagagatcgtaatactatgctggccaataaggaatgccaggccgcactggaagtgctccaggagagccccttgtacgattgccgctgcaagagaggcatgaaaaaggaattgcagtgcttgcaaatatattggtcgatccacctggggttgacagagggtgaggaattttatgaagcctctccttatgaacctgtgaccagtagactctccgacatcttcagactggccagtattttcagtggaaccggcgctgaccctgttgtgtccgctaaaagcaatcactgcctggatgcagccaaagcctgtaatctcaatgataattgtaaaaaattacgatcgagctacatctctatttgtaaccgagagatcagccctactgagaggtgtaacagacgtaaatgtcataaagcactgcgacagtttttcgacagagtgccttctgaatatacataccgcatgctcttttgcagttgccaggaccaggcctgcgctgaaaggcgaagacaaaccatcctgccaagttgctcctacgaggataaagagaagcctaactgtctggacctccgcggagtctgtaggacagaccacctttgcaggtcccgtctagctgatttccacgccaactgtcgcgctagctaccagacagtcacatcctgccccgcagacaattaccaggcctgtttggggtcttatgccggtatgattggattcgacatgacccccaattatgttgatagctcgcccactggaatcgtcgtctcgccctggtgttcctgcaggggaagtggaaacatggaggaggagtgcgaaaaatttctcagagacttcacagaaaatccgtgtctaagaaatgccattcaggcttttggaaacgggacagatgttaacgtttcccccaagggaccgagttttcaggccacacaagcccctagggttgaaaaaactccttccttgcctgacgaccttagcgatagcacctcattagggacctcagtgatcactacatgtacttcagtgcaagagcagggtctaaaagccaataattcaaaggagctatctatgtgtttcactgaactgacaactaacatcatacctggaagcaataaggtaattaaaccaaattccggtcccagtcgagctagacctagtgcagctctgaccgtgctctccgttctgatgctgaaactggccctgtag

SEQ ID NO: 341406 - DNA, 798 bp, Artificial Sequence
  derived and/or modified sequence
atgattctggctaacgtgttttgcctgttcttctttctcgatgagacattgaggtctctggcgtctccttcatcactgcagggacctgaactgcacggatggaggccccctgtggactgtgtgcgagccaacgaactgtgcgctgctgagagcaattgttcttcgagatatagaacactgagacaatgtctcgctggacgtgatcgtaatacaatgctggcaaataaagaatgtcaggccgctctcgaggtccttcaggagtcacccttgtatgactgccgctgcaagcgcggaatgaaaaaagaactccagtgtctgcagatctattggagtatccacctagggttaaccgagggcgaggaattttacgaggcatcaccctacgagccagtaacatctcggctcagtgatattttccgtctggccagcattttctcaggaacaggggcagacccagtagtgtctgcaaagagcaaccactgcttagatgccgcaaaggcttgcaacctgaatgataactgtaagaagctccgaagctcatacatatctatctgcaatcgcgaaatcagtcctacagagaggtgtaatagacggaagtgccacaaggcactacggcagttcttcgatcgcgtgcctagtgaatatacatacaggatgttgttctgctcttgtcaggaccaagcctgtgcagagaggaggaggcaaacaatcctcccgtcttgttcctacgaggacaaggaaaaaccaaattgtcttgacttaagaggcgtctgtcgcaccgatcatctctgtcgttag

SEQ ID NO: 341407 - DNA, 1395 bp, Artificial Sequence
  derived and/or modified sequence
atgatcctggctaatgtgttttgcctgttctttttcctcgacgaaacacttcgcagcctcgcttctccttctagcctgcaggggccagagctgcatgggtggcggccaccagtagactgtgtgcgggctaatgagctgtgtgccgctgaaagcaactgctctagccgctacaggaccctccgccagtgcctggccggaagagatcgtaacacgatgctcgccaataaagaatgtcaggcagctctggaggttttacaagaatctccgctgtatgactgtcggtgcaaacgaggaatgaaaaaggagcttcagtgtctgcaaatatattggagcatacatctgggtctgaccgaaggagaggagttctatgaggcctcgccttacgagcctgtcacgtctcgcctttctgacatcttccggttggcaagcatcttctccggaaccggtgcagatcccgttgtgtccgcaaagagtaaccactgtctcgatgctgccaaagcctgcaatctcaatgacaactgtaagaagcttcgatctagctatatctctatatgtaatcgggagatcagccccacagaaagatgtaatcggagaaaatgccataaggcactgcgacagtttttcgaccgagtgccttcggagtacacataccggatgcttttttgctcttgccaagaccaggcctgtgcagagcgacggcgacagacaattctcccctcatgttcctacgaagacaaggagaagccaaattgtttagaccttaggggggtgtgtaggacggaccacctgtgccgctcccgcctggccgactttcacgccaattgccgagcttcatatcagactgtcaccagctgcccagctgataactaccaggcctgccttggatcctatgctggcatgatcggattcgacatgacccctaactacgtggactccagtcccaccgggatagtagtatccccctggtgttcatgtagagggtcaggaaacatggaagaagagtgcgaaaagttccttcgagattttacagagaatccctgcctccgcaatgctatacaggcattcggcaacgggactgatgtgaacgtaagcccaaaagggccttctttccaggctacacaggccccacgtgttgaaaaaacaccaagtctccccgatgacctttctgactcaacatccctgggtactagtgtgattacgacatgcacatcagtacaggaacagggattgaaggcaaataactccaaagagctaagtatgtgtttcaccgagttgaccacgaatatcatccccggttctaacaaggtaataaaacccaatagtgggccatcgcgcgctaggccgagtgctgctctaacagtgttgtccgtgctcatgttgaagctcgctctgtag

SEQ ID NO: 341408 - DNA, 1395 bp, Artificial Sequence
  derived and/or modified sequence
atgatcctggccaacgtgttctgcctgttcttcttcctggacgagaccctgagaagcctggccagccccagcagcctgcagggccccgagctgcacggctggagaccccccgtggactgcgtgagagccaacgagctgtgcgccgccgagagcaactgcagcagcagatacagaaccctgagacagtgcctggccggcagagacagaaacaccatgctggccaacaaggagtgccaggccgccctggaggtgctgcaggagagccccctgtacgactgcagatgcaagagaggcatgaagaaggagctgcagtgcctgcagatctactggagcatccacctgggcctgaccgagggcgaggagttctacgaggccagcccctacgagcccgtgaccagcagactgagcgacatcttcagactggccagcatcttcagcggcaccggcgccgaccccgtggtgagcgccaagagcaaccactgcctggacgccgccaaggcctgcaacctgaacgacaactgcaagaagctgagaagcagctacatcagcatctgcaacagagagatcagccccaccgagagatgcaacagaagaaagtgccacaaggccctgagacagttcttcgacagagtgcccagcgagtacacctacagaatgctgttctgcagctgccaggaccaggcctgcgccgagagaagaagacagaccatcctgcccagctgcagctacgaggacaaggagaagcccaactgcctggacctgagaggcgtgtgcagaaccgaccacctgtgcagaagcagactggccgacttccacgccaactgcagagccagctaccagaccgtgaccagctgccccgccgacaactaccaggcctgcctgggcagctacgccggcatgatcggcttcgacatgacccccaactacgtggacagcagccccaccggcatcgtggtgagcccctggtgcagctgcagaggcagcggcaacatggaggaggagtgcgagaagttcctgagagacttcaccgagaacccctgcctgagaaacgccatccaggccttcggcaacggcaccgacgtgaacgtgagccccaagggccccagcttccaggccacccaggcccccagagtggagaagacccccagcctgcccgacgacctgagcgacagcaccagcctgggcaccagcgtgatcaccacctgcaccagcgtgcaggagcagggcctgaaggccaacaacagcaaggagctgagcatgtgcttcaccgagctgaccaccaacatcatccccggcagcaacaaggtgatcaagcccaacagcggccccagcagagccagacccagcgccgccctgaccgtgctgagcgtgctgatgctgaagctggccctgtag

SEQ ID NO: 341409 - DNA, 798 bp, Artificial Sequence
  derived and/or modified sequence
atgatcctggccaacgtgttctgcctgttcttcttcctggacgagaccctgagaagcctggccagccccagcagcctgcagggccccgagctgcacggctggagaccccccgtggactgcgtgagagccaacgagctgtgcgccgccgagagcaactgcagcagcagatacagaaccctgagacagtgcctggccggcagagacagaaacaccatgctggccaacaaggagtgccaggccgccctggaggtgctgcaggagagccccctgtacgactgcagatgcaagagaggcatgaagaaggagctgcagtgcctgcagatctactggagcatccacctgggcctgaccgagggcgaggagttctacgaggccagcccctacgagcccgtgaccagcagactgagcgacatcttcagactggccagcatcttcagcggcaccggcgccgaccccgtggtgagcgccaagagcaaccactgcctggacgccgccaaggcctgcaacctgaacgacaactgcaagaagctgagaagcagctacatcagcatctgcaacagagagatcagccccaccgagagatgcaacagaagaaagtgccacaaggccctgagacagttcttcgacagagtgcccagcgagtacacctacagaatgctgttctgcagctgccaggaccaggcctgcgccgagagaagaagacagaccatcctgcccagctgcagctacgaggacaaggagaagcccaactgcctggacctgagaggcgtgtgcagaaccgaccacctgtgcagatag

SEQ ID NO: 341410 - protein, 359 aa, Artificial Sequence
  derived and/or modified sequence
MILANVFCLFFFLGEEFYEASPYEPVTSRLSDIFRLASIFSGTGADPVVSAKSNHCLDAAKACNLNDNCKKLRSSYISICNREISPTERCNRRKCHKALRQFFDRVPSEYTYRMLFCSCQDQACAERRRQTILPSCSYEDKEKPNCLDLRGVCRTDHLCRSRLADFHANCRASYQTVTSCPADNYQACLGSYAGMIGFDMTPNYVDSSPTGIVVSPWCSCRGSGNMEEECEKFLRDFTENPCLRNAIQAFGNGTDVNVSPKGPSFQATQAPRVEKTPSLPDDLSDSTSLGTSVITTCTSVQEQGLKANNSKELSMCFTELTTNIIPGSNKVIKPNSGPSRARPSAALTVLSVLMLKLAL

SEQ ID NO: 341411 - DNA, 1080 bp, Artificial Sequence
  derived and/or modified sequence
atgatcttggctaacgtattctgtttgtttttttttcttggagaggagttctatgaagcttccccttatgaacctgtcacttcacgactctctgatatcttccgcctagccagtatctttagtggtacaggagctgatcctgtggtctcggccaagagcaaccattgtttggacgccgctaaggcgtgtaacttaaatgataactgtaaaaaactgaggtctagctacatctcaatctgcaacagagagattagtcctaccgaaagatgcaatcgcagaaagtgtcacaaagcattgagacagttttttgacagagttccgtcagaatacacctacaggatgctattctgctcttgccaagatcaggcgtgcgctgaaaggcgcagacagactatcctcccttcgtgctcatacgaggataaagaaaaacccaattgcctcgatctgcgcggggtgtgcagaacagaccatctttgtcgttctcgactggccgattttcacgccaactgccgggcttcataccagacagtgacgagttgtcctgccgacaactaccaggcctgcctcggcagctacgcgggtatgattggtttcgatatgacccctaactatgtggatagttcacctaccgggattgttgtgtcaccgtggtgctcatgcagaggtagcgggaacatggaagaggagtgtgagaaattcctgcgcgactttaccgaaaacccttgtctccggaacgccattcaggcctttggtaacggaaccgacgtgaacgtttctcctaagggaccctcctttcaggcaacacaggcaccccgcgttgagaaaactccctctctacccgatgatctttccgactctacatccttgggcacaagcgttataactacctgcacgagcgtccaggagcaggggcttaaagcaaacaattctaaagaactgtctatgtgctttacagaactgaccacgaacataatcccaggatccaacaaggttattaagcccaatagtggacccagccgggctcggccaagtgctgccctcactgtgcttagcgtgttgatgttgaaactcgcgctgtag

SEQ ID NO: 341412 - DNA, 3013 bp, Artificial Sequence
  derived and/or modified sequence
ggagagagagagagaggagagagaaagacacacgcacgcagagacacacggtcactggaattccattagaaaaaagtgagccgagcaagggttagcgggagaagatttttttgaatcttgtcttcgtcttggtgcgaaagaagcgactccagtctctcgtcctcgaagctccgactggattgttcttgggcgctgacacccgtctgtggatttcttttctatttgcattttattccgaccccctccctcgccgcttccttccagcccttcactcgcaaatcgcctctctccccacctccccaggcccctcctgggaagcgcaggggaattggacccgcggggactcacgccttcccggacgattggaggggagggctgaccccaggactgggctgttggcttagaaagccgatacacagatacgcgtatatttgattgtagcgggcaaggggggcgtcgagaggcagcagcccatcgcccgcctctcaccccaccccctccagccagaggcgagaatcgcaggactcgggatcttcatcgggtggactagctgggatctccgcattggatttggggctgattaccactgcttgcctattattattgttgttgttactactattatttttttttacccaagggagaaagacaaaaaaacggtgggatttatttaacatgatcttggcaaacgtcttctgcctcttcttctttctaggtgaggagttctacgaagcctccccctatgagccggtgacctcccgcctctcggacatcttcaggcttgcttcaatcttctcagggacaggggcagacccggtggtcagcgccaagagcaaccattgcctggatgctgccaaggcctgcaacctgaatgacaactgcaagaagctgcgctcctcctacatctccatctgcaaccgcgagatctcgcccaccgagcgctgcaaccgccgcaagtgccacaaggccctgcgccagttcttcgaccgggtgcccagcgagtacacctaccgcatgctcttctgctcctgccaagaccaggcgtgcgctgagcgccgccggcaaaccatcctgcccagctgctcctatgaggacaaggagaagcccaactgcctggacctgcgtggcgtgtgccggactgaccacctgtgtcggtcccggctggccgacttccatgccaattgtcgagcctcctaccagacggtcaccagctgccctgcggacaattaccaggcgtgtctgggctcttatgctggcatgattgggtttgacatgacacctaactatgtggactccagccccactggcatcgtggtgtccccctggtgcagctgtcgtggcagcgggaacatggaggaggagtgtgagaagttcctcagggacttcaccgagaacccatgcctccggaacgccatccaggcctttggcaacggcacggacgtgaacgtgtccccaaaaggcccctcgttccaggccacccaggcccctcgggtggagaagacgccttctttgccagatgacctcagtgacagtaccagcttggggaccagtgtcatcaccacctgcacgtctgtccaggagcaggggctgaaggccaacaactccaaagagttaagcatgtgcttcacagagctcacgacaaatatcatcccagggagtaacaaggtgatcaaacctaactcaggccccagcagagccagaccgtcggctgccttgaccgtgctgtctgtcctgatgctgaaactggccttgtaggctgtgggaaccgagtcagaatatttttgaaagctacgcagacaagaacagccgcctgacgaaatggaaacacacacagacacacacacaccttgcaaaaaaaaaattgtttttcccaccttgtcgctgaacctgtctcctcccaggtttcttctctggagaagtttttgtaaaccaaacagacaagcaggcaggcagcctgagagctggcccaggggtcccctggcaggggaaactctggtgccggggagggcacgaggctctagaaatgcccttcactttctcctggtgtttttctctctggacccttctgaagcagagaccggacaagagcctgcagcggaagggactctgggctgtgcctgaggctggctgggggcaggacaacacagctgcttccccaggctgcccactctggggacccgctgggggctggcagagggcatcggtcagcggggcagcggggctggccatgagggtccaccttcagccctttggcttcaaggatggagatggttttgccctccctctctgccctcgggtggggctggtgggtctgcagctggtgtgggaacttccccacggatggcggtggagggggttcgcaccgtgctgggctccccctgactgtagcacggagtgttggggctgggggccagctccaggagggcttgagagctcagcctgcctgggagagcccttgtggcgaggcattaaaacttgggcaccagcttctttctcggtggcagaaattttgaagtcagagagaaacggtcctttgttggcttctttgctttctcgtgggtcctttggcaggcctccctttggggagagggaggggagagaccacagccgggtgtgtgtctgcagcaccgtgggccctcaagctttcctgctgtcttctccctcctcctcctttcccctttctctttcctcatttcctagacgtacgtcaactgtatgtacataccggggctcctctcctaacatatatgtatatacacatccatatacatatattgtgtggtttcccctttctttcctttttttaagcaacaaaactatggaaataataccccaacagatgagcgaaaatgtattattgtaaagtttattttttttaatactgttgtctataatggggaaaaaggacattggccccgcagtgccctgccccagtcagcctggctgggctctggtgggggctcctgatccgcatccaagcttaaccaaggctccaataaacgtgctaggaagc

SEQ ID NO: 341413 - DNA, 1080 bp, Artificial Sequence
  derived and/or modified sequence
atgatcctggccaacgtgttctgcctcttcttcttcctgggggaggagttctatgaggccagcccctatgagcctgtgaccagccggctgagtgacatcttccggctggccagcatcttctctggaactggagctgaccctgtggtgtctgccaagagcaaccactgcctggatgctgccaaggcctgcaacctgaatgacaactgcaagaagctgcggagcagctacatcagcatctgcaaccgggagatcagccccacagagcgctgcaacagaaggaagtgccacaaggccctgcggcagttctttgacagagtgcccagcgagtacacctacaggatgctgttctgcagctgccaggaccaggcctgtgccgagcggcggcggcagaccatcctgcccagctgcagctatgaggacaaggagaagcccaactgcctggacctgcggggcgtgtgcaggacagaccacctgtgccgcagccggctggccgacttccacgccaactgccgggccagctaccagacagtgaccagctgcccagctgacaactaccaggcctgcctgggcagctatgccggcatgattggatttgacatgacccccaactacgtggacagcagccccaccggcatcgtggtgagcccctggtgcagctgccggggcagcggcaacatggaggaggagtgtgagaagttcctgcgggacttcacagagaacccctgcctgagaaatgccatccaggcctttggaaatggaacagatgtgaatgtgagccccaagggccccagcttccaggccacccaggccccccgggtggagaagacccccagcctgcctgatgacctgagtgacagcaccagcctgggcaccagcgtcatcaccacctgcacctctgtgcaggagcagggcctgaaggccaacaacagcaaggagctgtccatgtgcttcacagagctgaccaccaacatcatccctggcagcaacaaggtgatcaagcccaacagcggccccagccgggcccggcccagcgctgccctgactgtgctgtctgtgctgatgctgaagctggccctgtag

SEQ ID NO: 341414 - DNA, 1080 bp, Artificial Sequence
  derived and/or modified sequence
atgatcctggccaacgtgttctgcctgttcttcttcctgggcgaggagttctacgaggcatctccatacgagcccgtcacaagccggctatcagatattttccggctcgcctctatattttcaggcaccggagccgatcccgtggtgtcagcaaagtccaatcactgtctggacgcagctaaagcctgtaacctgaacgacaattgtaagaagctccggagcagctatattagcatttgtaaccgggagatatcaccaacagagagatgcaaccggaggaaatgccataaagccctgcggcagtttttcgatcgggtgccaagcgaatatacatacagaatgctgttttgcagttgccaggatcaggcctgcgccgaacgaaggagacagacaattctcccttcctgctcctatgaagacaaagagaagcccaattgcctagatctgaggggagtctgtcggacagatcacctgtgtaggtctaggttagctgacttccatgcaaattgccgcgcctcatatcagaccgtcacatcgtgccccgccgataattaccaggcctgtctcggaagttatgccgggatgattggcttcgatatgactccaaactacgtggactcttcaccaacggggatagtcgtctctccctggtgcagttgtcgcggctcaggcaatatggaggaggagtgcgagaagttcctgagggattttaccgagaatccctgtctgagaaacgcaatccaggctttcgggaatggaaccgatgtcaatgtaagccccaaaggccctagcttccaggcaactcaagcaccccgggtggaaaaaaccccttcgctaccagacgacctttccgactccacttctctgggcacttcagttatcactacatgcactagcgtgcaagagcaggggcttaaggcaaataactccaaagagctgtcaatgtgttttaccgaactgacaacaaacatcatcccgggtagtaacaaggtcatcaagcccaattccgggccctcacgtgccagaccttccgcagccttaactgtcttatccgtcctgatgttgaagctcgccctctag

SEQ ID NO: 341415 - DNA, 1080 bp, Artificial Sequence
  derived and/or modified sequence
atgatcttggcaaatgtcttctgtctgttcttcttccttggggaggagttctatgaggcgtcaccatatgagcccgtgacatcaaggctgagtgacatctttaggctggctagtatcttcagcggcaccggagcagacccagtcgtgagcgccaagagtaatcactgcctggacgcagcaaaggcatgtaacctcaacgataattgcaagaaacttagaagttcttatatctctatctgtaacagggaaattagcccaactgaacgatgtaatcgtagaaagtgccataaggccctcaggcagttttttgacagagttccctcagagtacacttaccggatgctgttttgttcatgccaggaccaggcctgcgccgagcgcagaaggcagactatactcccatcctgtagttatgaagataaagagaaacccaattgcctggatctgaggggagtctgtcggaccgaccacctgtgcagatcacgtctggccgacttccacgccaattgtcgagcaagctaccaaaccgtgactagctgccccgcagacaactaccaagcttgcctcgggagttacgccggaatgataggcttcgatatgacacctaattatgtggactcctcacccacaggcatcgtggtttccccctggtgtagctgtcggggaagtggaaacatggaggaagaatgtgagaaatttctgcgagactttaccgaaaacccatgtctcagaaacgccatacaggcatttggaaacggaaccgatgtcaatgtgtcacctaaggggccatctttccaagctactcaggccccaagggtcgagaaaacgcccagtctcccagacgacctgagcgattctacctctctaggcacctccgtgatcactacctgtacctcggtgcaggagcagggcctgaaagctaacaatagcaaggagttgagtatgtgttttactgaactgacaactaatattataccgggatcgaataaggtcataaaacctaactccggccctagccgggctaggccctccgcggcattaaccgtgcttagcgtattgatgcttaagctagccctgtag

SEQ ID NO: 341416 - DNA, 1080 bp, Artificial Sequence
  derived and/or modified sequence
atgatcctggccaacgtgttctgcctgttcttcttcctgggcgaggagttctacgaggccagcccctacgagcccgtgaccagcagactgagcgacatcttcagactggccagcatcttcagcggcaccggcgccgaccccgtggtgagcgccaagagcaaccactgcctggacgccgccaaggcctgcaacctgaacgacaactgcaagaagctgagaagcagctacatcagcatctgcaacagagagatcagccccaccgagagatgcaacagaagaaagtgccacaaggccctgagacagttcttcgacagagtgcccagcgagtacacctacagaatgctgttctgcagctgccaggaccaggcctgcgccgagagaagaagacagaccatcctgcccagctgcagctacgaggacaaggagaagcccaactgcctggacctgagaggcgtgtgcagaaccgaccacctgtgcagaagcagactggccgacttccacgccaactgcagagccagctaccagaccgtgaccagctgccccgccgacaactaccaggcctgcctgggcagctacgccggcatgatcggcttcgacatgacccccaactacgtggacagcagccccaccggcatcgtggtgagcccctggtgcagctgcagaggcagcggcaacatggaggaggagtgcgagaagttcctgagagacttcaccgagaacccctgcctgagaaacgccatccaggccttcggcaacggcaccgacgtgaacgtgagccccaagggccccagcttccaggccacccaggcccccagagtggagaagacccccagcctgcccgacgacctgagcgacagcaccagcctgggcaccagcgtgatcaccacctgcaccagcgtgcaggagcagggcctgaaggccaacaacagcaaggagctgagcatgtgcttcaccgagctgaccaccaacatcatccccggcagcaacaaggtgatcaagcccaacagcggccccagcagagccagacccagcgccgccctgaccgtgctgagcgtgctgatgctgaagctggccctgtag

SEQ ID NO: 341417 - protein, 224 aa, Artificial Sequence
  derived and/or modified sequence
MVAAVLLGLSWLCSPLGALVLDFNNIRSSADLHGARKGSQCLSDTDCNTRKFCLQPRDEKPFCATCRGLRRRCQRDAMCCPGTLCVNDVCTTMEDATPILERQLDEQDGTHAEGTTGHPVQENQPKRKPSIKKSQGRKGQEGESCLRTFDCGPGLCCARHFWTKICKPVLLEGQVCSRRGHKDTAQAPEIFQRCDCGPGLLCRSQLTSNRQHARLRVCQKIEKL

SEQ ID NO: 341418 - protein, 139 aa, Artificial Sequence [sequence omitted]

SEQ ID NO: 341419 - DNA, 420 bp, Artificial Sequence
  derived and/or modified sequence
atggtggcagcggtgctcctggggctgagctggctctgttcaccactcggagccctcgttttggatttcaacaatattagaagctctgcggatctccatggcgctagaaaaggtagtcagtgcctgagcgatacagactgcaatacgcgtaaattctgcctccagcccagggatgagaagcccttttgtgccacatgccgcgggctgcggagaagatgtcagcgggacgcaatgtgctgccctgggactctttgcgtgaacgatgtctgcacaactatggaagatgctacgcccatcctggagagacagctcgatgagcaggatggcacccatgccgaggggaccaccggccatcccgtgcaggagaaccagcctaagaggaagccctccattaagaagtccagcagtatgttggactag

SEQ ID NO: 341420 - DNA, 675 bp, Artificial Sequence
  derived and/or modified sequence
atggtggctgcggttttgctcggcttgagttggttgtgttccccactcggggcgcttgtcctggatttcaataacatccgcagtagcgcggatctgcatggcgcccggaaggggagtcagtgcctgtcagatacagactgtaataccagaaagttttgtctgcagcctagggatgaaaagcctttttgcgctacatgcaggggcctgcgacgccgttgccagcgggatgccatgtgttgtccggggaccctgtgtgtgaacgatgtgtgtaccaccatggaagacgccacacctatcctggagagacagcttgacgagcaggacgggactcacgccgaggggaccactggccaccctgtccaggagaaccaaccaaaacggaagcctagcatcaagaagagccagggtcgtaagggccaggaaggggagtcctgtttacgcacatttgattgcggtccagggctctgctgcgcccggcacttctggaccaaaatttgtaaaccggttttgctcgagggacaagtgtgtagtagacggggccacaaagacactgctcaggctcctgaaattttccagcggtgcgattgcggacctggccttttgtgccgcagccaactgactagcaatagacagcatgctcgactgcgggtatgccaaaagattgagaaactttag

SEQ ID NO: 341421 - DNA, 420 bp, Artificial Sequence
  derived and/or modified sequence
atggtggccgctgtgctgctgggcctgtcctggctgtgcagccccctgggcgccctggtgctggacttcaacaacatccgcagcagcgctgacctgcatggagccaggaagggcagccagtgcctgagtgacacagactgcaacaccaggaagttctgcctgcagcccagagatgagaagcccttctgtgccacctgccggggcctgcggcggcgctgccagagagatgccatgtgctgccccggcaccctgtgtgtgaatgatgtgtgcaccaccatggaggatgccacccccatcctggagcggcagctggatgagcaggacggcacccacgccgagggcaccaccggccaccctgtgcaggagaaccagcccaagaggaagcccagcatcaagaagagcagctccatgctggactag

SEQ ID NO: 341422 - DNA, 675 bp, Artificial Sequence
  derived and/or modified sequence
atggtggccgctgtgctgctgggcctgtcctggctgtgcagccccctgggcgccctggtgctggacttcaacaacatccgcagcagcgctgacctgcatggagccaggaagggcagccagtgcctgagtgacacagactgcaacaccaggaagttctgcctgcagcccagagatgagaagcccttctgtgccacctgccggggcctgcggcggcgctgccagagagatgccatgtgctgccccggcaccctgtgtgtgaatgatgtgtgcaccaccatggaggatgccacccccatcctggagcggcagctggatgagcaggacggcacccacgccgagggcaccaccggccaccctgtgcaggagaaccagcccaagaggaagcccagcatcaagaagagccagggcaggaagggccaggagggggagagctgcctgcggacctttgactgtggccctggcctgtgctgtgcccggcacttctggaccaagatctgcaagcctgtgctgctggagggccaggtgtgcagccggcggggccacaaggacacagcccaggcccctgagatcttccagagatgtgactgtggccctggcctgctgtgccgcagccagctgaccagcaaccggcagcacgcccggctgcgggtgtgccagaagattgagaagctgtag

SEQ ID NO: 341423 - DNA, 420 bp, Artificial Sequence
  derived and/or modified sequence
atggtggccgccgtgctgctgggcctgagctggctgtgcagccccctaggcgccttagttttggattttaataatataaggagctccgccgacctgcacggagcgcggaaaggaagccaatgcctgtcagacaccgattgcaatacacggaaattctgcctccaacctagagacgaaaaacccttttgcgctacatgtaggggccttcgcaggaggtgtcagagagatgccatgtgttgtcccggcacactgtgcgtgaatgacgtatgtacgactatggaggatgccacacccattctggagcgccagctggatgagcaggatggcacccacgcagaagggacaacgggccatcccgtccaagagaatcagcctaagcgaaagccttccataaagaagagcagcagtatgctagactag

SEQ ID NO: 341424 - DNA, 675 bp, Artificial Sequence
  derived and/or modified sequence
atggtggccgccgtgctgctgggcctgagctggctgtgcagccccctcggtgccctggtgctagacttcaacaatatcaggtctagcgctgatttacatggggcccggaagggctctcaatgtctttcagatacagattgtaatacgcgaaaattctgcttacagccccgggatgagaaacccttctgtgccacatgccggggactccgtcggcgctgccagagggatgccatgtgctgccccggtacactgtgcgtgaacgacgtatgtactacaatggaagatgctacacccatcctggaacgccaactggatgaacaggacgggacccacgcagaagggacaaccggccacccagtgcaggagaaccagcccaagcggaaaccctctatcaaaaaatcacagggcagaaaaggtcaagagggcgagtcttgcttgaggaccttcgactgtggacctgggctgtgttgcgccagacacttctggaccaaaatttgtaaaccagttcttcttgaaggtcaggtatgttctagaagggggcacaaggacaccgctcaggctccagagatcttccagcgctgcgattgtggccctggcctgctgtgtcggtcccagttaaccagcaaccgccagcatgcccgcctccgggtgtgtcagaagatagaaaagctatag

SEQ ID NO: 341425 - DNA, 420 bp, Artificial Sequence
  derived and/or modified sequence
atggtcgcagctgtcctcctgggtctctcctggttgtgttcacctctgggcgcattggtccttgatttcaataacattaggagctcagcagacctgcatggcgctcgcaagggcagccaatgcttgtctgacactgactgcaatacgagaaaattctgcctccaacctcgagatgaaaaacccttttgtgctacctgtagaggactccgcagacgttgtcagagggacgccatgtgttgtcccggaacgctctgcgtgaatgatgtgtgtaccacaatggaggacgccacccctattttagaacggcagctggatgagcaagatggaactcacgcggaaggaaccaccggccatcccgttcaggaaaatcaaccaaagagaaagccatcaattaaaaagagtagttctatgttggattag

SEQ ID NO: 341426 - DNA, 675 bp, Artificial Sequence
  derived and/or modified sequence
atggtggccgctgtactgttgggcctcagttggctgtgtagccctttaggtgcactggtgctcgatttcaataacataaggtctagtgccgatttgcatggagctcgaaagggcagtcagtgtctctcagataccgattgcaacactcggaaattttgtctgcagcctcgagatgagaaacctttttgtgccacttgtcggggtctgcggagacgatgccagagagatgccatgtgctgcccagggaccctctgcgtgaatgacgtatgcaccaccatggaagatgctaccccaatcctggaacgccagctggatgaacaggatgggacacacgcggagggcacaaccggacaccctgtgcaggaaaaccaacccaagcgcaaaccaagcatcaaaaagtctcaaggacgaaaggggcaggaaggcgaatcctgcctcaggacttttgattgtgggcctggactttgttgcgcaaggcacttctggaccaagatatgtaaacctgttctgctagagggacaggtgtgctcacggaggggacataaggatacggcacaggctcctgagatcttccagcgctgcgactgcggcccaggcctgttgtgtcgttctcagctgacatccaataggcagcatgctcgcctgagggtatgtcagaaaatagaaaaactgtag

SEQ ID NO: 341427 - DNA, 420 bp, Artificial Sequence
  derived and/or modified sequence
atggtggccgccgtgctgctgggcctgagctggctgtgcagccccctgggcgccctggtgctggacttcaacaacatcagaagcagcgccgacctgcacggcgccagaaagggcagccagtgcctgagcgacaccgactgcaacaccagaaagttctgcctgcagcccagagacgagaagcccttctgcgccacctgcagaggcctgagaagaagatgccagagagacgccatgtgctgccccggcaccctgtgcgtgaacgacgtgtgcaccaccatggaggacgccacccccatcctggagagacagctggacgagcaggacggcacccacgccgagggcaccaccggccaccccgtgcaggagaaccagcccaagagaaagcccagcatcaagaagagcagcagcatgctggactag

SEQ ID NO: 341428 - DNA, 675 bp, Artificial Sequence
  derived and/or modified sequence
atggtggccgccgtgctgctgggcctgagctggctgtgcagccccctgggcgccctggtgctggacttcaacaacatcagaagcagcgccgacctgcacggcgccagaaagggcagccagtgcctgagcgacaccgactgcaacaccagaaagttctgcctgcagcccagagacgagaagcccttctgcgccacctgcagaggcctgagaagaagatgccagagagacgccatgtgctgccccggcaccctgtgcgtgaacgacgtgtgcaccaccatggaggacgccacccccatcctggagagacagctggacgagcaggacggcacccacgccgagggcaccaccggccaccccgtgcaggagaaccagcccaagagaaagcccagcatcaagaagagccagggcagaaagggccaggagggcgagagctgcctgagaaccttcgactgcggccccggcctgtgctgcgccagacacttctggaccaagatctgcaagcccgtgctgctggagggccaggtgtgcagcagaagaggccacaaggacaccgcccaggcccccgagatcttccagagatgcgactgcggccccggcctgctgtgcagaagccagctgaccagcaacagacagcacgccagactgagagtgtgccagaagatcgagaagctgtag

SEQ ID NO: 341429 - DNA, 894 bp, Artificial Sequence
  derived and/or modified sequence
gtcagactttgctcagccgatttcacgcaccttactcagactaaggtttacttctttcagaaaaagcagtgacaaacagacgacgtgctgagctgccagcttagtggaagctctgctctgggtggagagcagcctcgctttggtgacgcacagtgctgggaccctccaggagccccgggattgaaggatggtggcggccgtcctgctggggctgagctggctctgctctcccctgggagctctggtcctggacttcaacaacatcaggagctctgctgacctgcatggggcccggaagggctcacagtgcctgtctgacacggactgcaataccagaaagttctgcctccagccccgcgatgagaagccgttctgtgctacatgtcgtgggttgcggaggaggtgccagcgagatgccatgtgctgccctgggacactctgtgtgaacgatgtttgtactacgatggaagatgcaaccccaatattagaaaggcagcttgatgagcaagatggcacacatgcagaaggaacaactgggcacccagtccaggaaaaccaacccaaaaggaagccaagtattaagaaatcacaaggcaggaagggacaagagggagaaagttgtctgagaacttttgactgtggccctggactttgctgtgctcgtcatttttggacgaaaatttgtaagccagtccttttggagggacaggtctgctccagaagagggcataaagacactgctcaagctccagaaatcttccagcgttgcgactgtggccctggactactgtgtcgaagccaattgaccagcaatcggcagcatgctcgattaagagtatgccaaaaaatagaaaagctataaatatttcaaaataaagaagaatccacattgca

SEQ ID NO: 341430 - DNA, 999 bp, Artificial Sequence
  derived and/or modified sequence
ctttgctcagccgatttcacgcaccttactcagactaaggtttacttctttcagaaaaagcagtgacaaacagacgacgtgctgagctgccagcttagtggaagctctgctctgggtggagagcagcctcgctttggtgacgcacagtgctgggaccctccaggagccccgggattgaaggatggtggcggccgtcctgctggggctgagctggctctgctctcccctgggagctctggtcctggacttcaacaacatcaggagctctgctgacctgcatggggcccggaagggctcacagtgcctgtctgacacggactgcaataccagaaagttctgcctccagccccgcgatgagaagccgttctgtgctacatgtcgtgggttgcggaggaggtgccagcgagatgccatgtgctgccctgggacactctgtgtgaacgatgtttgtactacgatggaagatgcaaccccaatattagaaaggcagcttgatgagcaagatggcacacatgcagaaggaacaactgggcacccagtccaggaaaaccaacccaaaaggaagccaagtattaagaaatcttccagcatgctcgattaagagtatgccaaaaaatagaaaagctataaatatttcaaaataaagaagaatccacattgcatttgagctcaatcttggacattaactttaaaatgcttccatacagatctctcttaaaatcaaatcttgtagcaagtgaaatagcctgaaactagagaactaagagatggcgaccttgtgatgaatgaaactagctttagccttttgtccgtttttccagaaaactgatgggactctgtaaccaaaaaaattatttctaatctagggactcaattaattcaaatctttaagaattgaagccaggcatggtggctcacgcctgtaatcccagcactttgggaggcagaggtgggtggatcacgaggtcaagagtttgagaccagactggccaacactgt

SEQ ID NO: 341431 - protein, 1905 aa, Artificial Sequence
  derived and/or modified sequence
MPYSVGFREADAATSFLRAARSGNLDKALDHLRNGVDINTCNQNGLNGLHLASKEGHVKMVVELLHKEIILETTTKKGNTALHIAALAGQDEVVRELVNYGANVNAQSQKGFTPLYMAAQENHLEVVKFLLENGANQNVATEDGFTPLAVALQQGHENVVAHLINYGTKGKVRLPALHIAARNDDTRTAAVLLQNDPNPDVLSKTGFTPLHIAAHYENLNVAQLLLNRGASVNFTPQNGITPLHIASRRGNVIMVRLLLDRGAQIETKTKDELTPLHCAARNGHVRISEILLDHGAPIQAKTKNGLSPIHMAAQGDHLDCVRLLLQYDAEIDDITLDHLTPLHVAAHCGHHRVAKVLLDKGAKPNSRALNGFTPLHIACKKNHVRVMELLLKTGASIDAVTESGLTPLHVASFMGHLPIVKNLLQRGASPNVSNVKVETPLHMAARAGHTEVAKYLLQNKAKVNAKAKDDQTPLHCAARIGHTNMVKLLLENNANPNLATTAGHTPLHIAAREGHVETVLALLEKEASQACMTKKGFTPLHVAAKYGKVRVAELLLERDAHPNAAGKNGLTPLHVAVHHNNLDIVKLLLPRGGSPHSPAWNGYTPLHIAAKQNQVEVARSLLQYGGSANAESVQGVTPLHLAAQEGHAEMVALLLSKQANGNLGNKSGLTPLHLVAQEGHVPVADVLIKHGVMVDATTRMGYTPLHVASHYGNIKLVKFLLQHQADVNAKTKLGYSPLHQAAQQGHTDIVTLLLKNGASPNEVSSDGTTPLAIAKRLGYISVTDVLKVVTDETSFVLVSDKHRMSFPETVDEILDVSEDEGEELISFKAERRDSRDVDEEKELLDFVPKLDQVVESPAIPRIPCAMPETVVIRSEEQEQASKEYDEDSLIPSSPATETSDNISPVASPVHTGFLVSFMVDARGGSMRGSRHNGLRVVIPPRTCAAPTRITCRLVKPQKLSTPPPLAEEEGLASRIIALGPTGAQFLSPVIVEIPHFASHGRGDRELVVLRSENGSVWKEHRSRYGESYLDQILNGMDEELGSLEELEKKRVCRIITTDFPLYFVIMSRLCQDYDTIGPEGGSLKSKLVPLVQATFPENAVTKRVKLALQAQPVPDELVTKLLGNQATFSPIVTVEPRRRKFHRPIGLRIPLPPSWTDNPRDSGEGDTTSLRLLCSVIGGTDQAQWEDITGTTKLVYANECANFTTNVSARFWLSDCPRTAEAVNFATLLYKELTAVPYMAKFVIFAKMNDPREGRLRCYCMTDDKVDKTLEQHENFVEVARSRDIEVLEGMSLFAELSGNLVPVKKAAQQRSFHFQSFRENRLAMPVKVRDSSREPGGSLSFLRKAMKYEDTQHILCHLNITMPPCAKGSGAEDRRRTPTPLALRYSILSESTPGSLSGTEQAEMKMAVISEHLGLSWAELARELQFSVEDINRIRVENPNSLLEQSVALLNLWVIREGQNANMENLYTALQSIDRGEIVNMLEGSGRQSRNLKPDRRHTDRDYSLSPSQMNGYSSLQDELLSPASLGCALSSPLRADQYWNEVAVLDAIPLAATEHDTMLEMSDMQVWSAGLTPSLVTAEDSSLECSKAEDSDATGHEWKLEGALSEEPRGPELGSLELVEDDTVDSDATNGLIDLLEQEEGQRSEEKLPGSKRQDDATGAGQDSENEVSLVSGHQRGQARITHSPTVSQVTERSQDRLQDWDADGSIVSYLQDAAQGSWQEEVTQGPHSFQGTSTMTEGLEPGGSQEYEKVLVSVSEHTWTEQPEAESSQADRDRRQQGQEEQVQEAKNTFTQVVQGNEFQNIPGEQVTEEQFTDEQGNIVTKKIIRKVVRQIDLSSADAAQEHEEVTVEGPLEDPSELEVDIDYFMKHSKVELRGSGLQPDLIEGRKGAQIVKRASLKRGKQ

SEQ ID NO: 341432 - DNA, 5718 bp, Artificial Sequence
  derived and/or modified sequence
atgccctattccgtcgggtttagagaagctgatgcagcgacttcttttctccgggccgctaggtctgggaacttggacaaagccctggaccacctaagaaatggagtcgatattaacacgtgcaatcagaacgggctcaacgggcttcacctagcttctaaggagggtcatgtgaagatggtggtggagctactgcataaagagatcattctggagacgaccacgaaaaaggggaatacagccctgcacatcgctgctctggcaggtcaggacgaggtagtgagagagctcgttaattatggcgctaacgtgaatgcccaatcgcagaaaggcttcactcccctctacatggccgcacaggaaaaccacttggaagtggtaaaattcttacttgaaaatggtgcaaaccagaatgtggccactgaagacggcttcacacctctggcggtggcgctgcagcaggggcacgagaatgtggtggcgcatctcataaattatgggactaagggtaaggtcaggttgccagcactccacatcgcggcacgcaatgacgatactaggaccgccgctgtcctcttgcagaatgaccctaaccccgacgtcctttccaaaacaggcttcacccccttgcatatcgccgcgcactacgagaacctcaacgtcgcacagctgctcttaaatcggggtgcttcggtgaacttcaccccccagaatggcatcaccccactgcatatcgcttcccggaggggaaacgtgataatggtgcgactgttgctggaccgtggagcccagatcgaaaccaagacaaaagacgagctgacccctctccactgcgccgcgcgaaatggccacgtcaggatctctgagatacttctggaccatggcgccccaatccaggctaaaactaagaatgggctgagtcccatccatatggccgctcagggggaccatctcgattgtgtcaggttgttgttacagtatgatgccgaaattgatgatataaccttggatcacctcacacctctccatgtggctgctcactgcggtcaccacagggttgctaaagttctcctggacaagggggctaaaccaaactcaagagctctcaacggttttactcccctgcacatcgcctgcaagaagaatcacgtccgcgtgatggaactgctactcaaaacaggcgcttccatcgatgctgtgacagagtccggactgacacccctgcacgtcgccagtttcatgggtcacctgcctatcgtgaaaaacctgctccagaggggtgcttctccgaatgtttcaaatgtgaaagtcgagaccccattacacatggccgctagggcaggtcataccgaggtggccaagtacctcctgcaaaacaaggctaaggttaacgctaaggctaaagatgatcagacacccctgcattgcgctgcacgaattggacacacgaacatggtgaaactccttttggaaaacaacgccaaccctaatttggccacaactgccgggcacactccgcttcatatagctgcccgggaaggtcacgtcgagactgtgctggcccttttggagaaggaggccagtcaggcgtgtatgacaaaaaaggggtttacccctcttcatgtcgccgctaaatatggcaaagtccgggtggccgaattactgctcgagcgggacgcccatcctaacgccgccggtaagaatggtctgacaccgcttcatgtggctgtgcatcataacaatcttgacatcgtaaagctcctcctgcccagaggcggatcacctcacagtcctgcctggaacggttacacccccttacacatagctgccaagcagaatcaggttgaagtggcccggtcccttctccagtatggcggctcagctaacgccgagtccgttcagggggtgacacctcttcacctggccgcccaggaggggcatgcggagatggtggctctcctactttcgaaacaagctaacgggaatttaggaaataaaagcgggctgaccccactgcacctcgtggcccaggaaggccacgtgccagtggccgacgtcctgattaagcatggcgtaatggtcgacgcaacaacacgtatgggctatactcccctccatgtggccagccactatggcaacattaagctcgtgaagtttttactgcaacaccaggctgacgttaacgcaaaaacaaaactgggatacagccctctgcatcaggccgcacagcagggacacaccgatatcgtgaccctactgctgaagaatggcgcaagccctaatgaagtgtcgtcggatggcacaactcccctggcaattgcgaagcgtctcggatatatcagcgtcactgacgtactcaaagtcgtgaccgacgaaaccagctttgtgctggtgtccgataaacatcggatgtcatttccggagactgtggatgagattctggatgtgagtgaagacgaaggggaggagttgatcagcttcaaggctgagcggagagactcaagggatgtcgatgaagagaaggagctgctggactttgtgccaaagttggaccaggtagtcgaaagccccgccattccccgcatcccgtgtgcaatgcccgaaaccgtcgtgatccggtctgaagaacaggagcaagcctcaaaagagtatgatgaggactccctgatcccctcttcccctgcaaccgagacaagtgataacattagtccagttgcatctcctgttcacacgggcttcctagtgtccttcatggtcgatgccagagggggctcaatgcgaggcagcagacacaatggcctgcgggtagtgatcccaccccggacctgtgccgcccctacgaggattacgtgtcgtctcgtgaagccccagaagctgtccaccccaccccctctggccgaagaggaaggcctggcttccaggatcattgcactgggaccaacaggcgcccagtttctgtcaccagtgatcgtggagattccccactttgcttcacacggtagaggggaccgcgagttagtcgtgcttagatcagaaaacggatcagtttggaaagagcatcgtagtcggtatggcgagtcttacttagatcaaatcttgaatgggatggacgaagaactcggctccctcgaggagcttgaaaagaagcgggtctgtcgtataatcacgacggacttcccgctttatttcgtgatcatgtccaggctttgtcaggattacgataccatagggcccgagggcggaagccttaagtccaaactagtgccactggtccaggccacattccccgaaaatgcagtgaccaagagggtcaagttggccctccaagcccagccagtgccagacgagttggtaactaagctgttaggtaaccaagcaacgttttccccgatagtgaccgtggagcctcggaggagaaagttccatcgacccatcggcctgcggatccccctgcctccatcttggaccgataaccctagggacagtggtgaaggagataccacatcactgcgactgttatgttccgttataggcgggactgaccaggcgcagtgggaggatatcacagggaccacaaaacttgtctacgcaaatgagtgcgccaacttcacaaccaatgtttccgccaggttctggctctccgactgccctcgcacggctgaggcagtaaatttcgctacgctactgtataaggagttaaccgccgtcccttacatggccaagttcgtaatctttgctaagatgaacgaccctcgggagggtagacttcgctgttactgcatgaccgacgacaaagtggacaagaccctggagcaacacgaaaacttcgtcgaagttgccaggagtagagatattgaggtccttgaagggatgtccctcttcgccgaactcagcggcaacctggtgccagtgaagaaggccgctcagcaacgctctttccatttccaaagctttcgggagaatcgcctggctatgcctgtgaaagtacgggacagttcaagagaacccggcggcagcttgtcattcctgaggaaagcgatgaagtacgaagatacgcaacacatactgtgccatctgaacataactatgcctccctgtgccaaagggtctggagcagaagaccggagaaggaccccgacaccactggctcttcgatactccattctgagcgagagcacacctggaagcttgtcaggtacggaacaggctgagatgaagatggctgtgattagcgaacatttgggtcttagttgggctgagctggcgcgcgagttgcagttttctgtcgaggatatcaatcgaattcgtgtcgaaaaccctaattctctgctggagcagtctgttgccttgctgaacttatgggtaattagagagggacaaaacgctaacatggagaacctatacaccgcccttcagtcaattgatcggggcgaaatcgtgaacatgttagagggctcaggccgccagagtcgtaatctgaagcccgatcggcggcacaccgacagagattatagtctgtcccccagtcagatgaatggatattcctctttgcaggatgaactgctctcccctgcgagtttaggatgtgccctgagcagccctttacgtgctgatcaatactggaacgaggtggccgttctcgacgctattcccctcgcggctacagaacatgacactatgctggagatgtccgacatgcaagtgtggagtgcaggtctgacgccctccctggtcacagccgaggatagttctttagaatgctcaaaagccgaggattccgacgcaactgggcacgaatggaagctggaaggggcccttagcgaggagccgagggggccagaactggggagcctggagctcgtcgaagatgatactgtggactccgacgccaccaatgggctgattgacctcctcgagcaggaggagggccaacgcagtgaggagaaactgccaggatccaaacgccaggacgacgcaacaggagcaggccaggattccgagaatgaagtctcattggtgtccgggcaccagagaggccaggcaaggattacgcatagccccaccgttagccaggtgaccgagcggtctcaggaccgtctccaggattgggatgcggacggatcaattgtttcgtatttgcaggacgcggcccagggctcatggcaggaggaagtcacgcagggtccgcactctttccaggggacatctaccatgactgagggattggagccaggaggttcacaagagtacgaaaaagtccttgtctctgtttctgaacacacgtggaccgagcaaccggaggccgaatcttcccaggccgatcgcgacaggcgccagcaggggcaggaagagcaagtgcaggaggcaaaaaacacatttactcaggtggtgcaaggtaacgagtttcaaaacatcccgggggaacaggtgacagaggaacagttcacagacgagcagggtaatattgtaacgaaaaagattattcggaaagtcgtccgacagattgacctttcctctgccgatgctgcccaggagcacgaggaagtaaccgttgagggcccactggaggaccctagcgagctcgaagtcgatattgactacttcatgaaacatagcaaagtggagctcaggggttctggactacagccggacctgatcgagggacgcaagggtgctcagatagtaaaaagagcctccctgaagcggggcaagcaatag

SEQ ID NO: 341433 - DNA, 5718 bp, Artificial Sequence
  derived and/or modified sequence
atgccctacagcgtgggcttccgggaggctgatgctgccaccagcttcctgcgggccgcccggagcggcaacctggacaaggccctggaccacctgagaaatggagtggacatcaacacctgcaaccagaatggcctgaatggcctgcacctggccagcaaggagggccacgtgaagatggtggtggagctgctgcacaaggagatcatcctggagaccaccaccaagaagggcaacacagccctgcacatcgccgccctggccggccaggatgaggtggtgcgggagctggtgaactacggggccaacgtgaatgcccagagccagaagggcttcacccccctgtacatggccgcccaggagaaccacctggaggtggtgaagttcctgctggagaatggagccaaccagaatgtggccacagaagatggcttcacccccctggccgtggccctgcagcagggccatgaaaatgtggtggcccacctgatcaactacggcaccaagggcaaggtgcggctgcctgccctgcacatcgccgccagaaatgatgacaccaggacagctgctgtgctgctgcagaatgaccccaacccagatgtgctgagcaagacaggcttcacccccctgcacatcgccgcccactatgagaacctgaatgtggcccagctgctgctgaacagaggagcctctgtgaacttcaccccccagaatggcatcacccccctgcacatcgccagcagaagaggaaatgtcatcatggtgcggctgctgctggacagaggagcccagatcgagaccaagaccaaggatgagctgacccccctgcactgtgccgccagaaatggccacgtgcgcatcagcgagatcctgctggaccacggggcccccatccaggccaagaccaagaatggcctgagccccatccacatggccgcccagggcgaccacctggactgtgtgcggctgctgctgcagtatgatgctgagattgatgacatcaccctggaccacctgacccccctgcacgtggccgcccactgcggccaccaccgggtggccaaggtgctgctggacaagggggccaagcccaacagccgggccctgaatggcttcacccccctgcacatcgcctgcaagaagaaccacgtgcgggtgatggagctgctgctgaagacaggagccagcattgatgctgtgacagaaagtggcctgacccccctgcacgtggccagcttcatgggccacctgcccatcgtgaagaacctgctgcagagaggagccagccccaacgtgtccaatgtgaaggtggagacccccctgcacatggccgcccgggccggccacacagaggtggccaagtacctgctgcagaacaaggccaaggtgaatgccaaggccaaggatgaccagacccccctgcactgtgccgcccgcatcggccacaccaacatggtgaagctgctgctggagaacaatgccaaccccaacctggccaccacagctggccacacccccctgcacatcgccgcccgggagggccacgtggagaccgtgctggccctgctggagaaggaggccagccaggcctgcatgaccaagaagggcttcacccccctgcacgtggccgccaagtatggcaaggtgcgggtggccgagctgctgctggagagagatgcccaccccaatgctgctgggaagaatggcctgacccccctgcacgtggccgtgcaccacaacaacctggacatcgtgaagctgctgctgccccggggcggcagcccccacagccctgcctggaatggctacacccccctgcacatcgccgccaagcagaaccaggtggaggtggcccggagcctgctgcagtatggaggcagcgccaatgctgagagcgtgcagggcgtgacccccctgcacctggccgcccaggagggccacgccgagatggtggccctgctgctgagcaagcaggccaacggcaacctgggcaacaagagcggcctgacccccctgcacctggtggcccaggagggccacgtgcctgtggctgatgtgctgatcaagcacggcgtgatggtggatgccaccaccaggatgggctacacccccctgcacgtggccagccactacggcaacatcaagctggtgaagttcctgctgcagcaccaggctgatgtgaatgccaagaccaagctgggctacagccccctgcaccaggccgcccagcagggccacacagacatcgtgaccctgctgctgaagaatggagccagccccaatgaggtgtccagtgatggcaccacccccctggccatcgccaagaggctgggctacatctctgtgacagatgtgctgaaggtggtgacagatgagaccagctttgtgctggtgtctgacaagcacaggatgtccttccctgagaccgtggatgagatcctggatgtgtctgaagatgaaggagaggagctgatctccttcaaggccgagcggcgggacagcagagatgtggatgaggagaaggagctgctggactttgtgcccaagctggaccaggtggtggagagccctgccatcccccgcatcccctgtgccatgcctgagaccgtggtgatccgctctgaggagcaggagcaggccagcaaggagtatgatgaggacagcctcatccccagcagccctgccacagagaccagtgacaacatcagccctgtggccagccctgtgcacacaggcttcctggtgtccttcatggtggatgcccggggcggctccatgaggggcagccgccacaacggcctgcgggtggtgattcctcccaggacctgtgccgcccccacccgcatcacctgccgcctggtgaagccccagaagctgagcaccccaccacccctggccgaggaggagggcctggccagccgcatcatcgccctgggccccactggagcccagttcctgagccctgtgattgtggagatcccccactttgccagccacggccgcggggaccgggagctggtggtgctgcggagtgaaaatggatctgtgtggaaggagcacaggagccgctacggggagagctacctggaccagatcctgaatggcatggatgaggagctgggcagcctggaggagctggagaagaagagggtgtgccgcatcatcaccacagacttccccctgtactttgtgatcatgagccggctgtgccaggactatgacaccatcggccctgagggcggcagcctgaagagcaagctggtgcccctggtgcaggccaccttcccagaaaatgctgtgaccaagagggtgaagctggccctgcaggcccagcctgtgcctgatgagctggtgaccaagctgctgggcaaccaggccaccttcagccccatcgtgacagtggagcccaggaggaggaagttccaccggcccatcggcctgcgcatccccctgccccccagctggacagacaacccccgggacagcggggagggggacaccaccagcctgcggctgctgtgcagcgtgattggaggaacagaccaggcccagtgggaggacatcaccggcaccaccaagctggtgtatgccaatgaatgtgccaacttcaccaccaacgtgtctgcccgcttctggctgagtgactgccccaggacagctgaggccgtgaactttgccaccctgctgtacaaggagctgacagctgtgccctacatggccaagtttgtgatctttgccaagatgaatgacccccgggagggccgcctgcgctgctactgcatgacagatgacaaggtggacaagaccctggagcagcacgagaactttgtggaggtggcccggagccgggacatcgaggtgctggagggcatgagcctgtttgctgagctgagcggcaacctggtgcctgtgaagaaggccgcccagcagaggagcttccacttccagagcttccgggagaaccggctggccatgcctgtgaaggtgcgggacagcagccgggagcccggcggcagcctgtccttcctgaggaaggccatgaagtatgaggacacccagcacatcctgtgccacctgaacatcaccatgccaccctgtgccaagggcagcggggctgaagatagaagaaggacccccacccccctggccctgcgctacagcatcctgtctgagagcaccccaggcagcctgagcggcacagagcaggccgagatgaagatggccgtcatcagcgagcacctgggcctgtcctgggccgagctggcccgggagctgcagttctctgtggaggacatcaaccgcatccgggtggagaaccccaacagcctgctggagcagagcgtggccctgctgaacctgtgggtgatccgggagggccagaatgccaacatggagaacctgtacacagccctgcagagcattgacagaggagaaattgtgaacatgctggagggcagcggccggcagagcaggaacctgaagccagacagaagacacacagaccgggactacagcctgagccccagccagatgaatggctacagcagcctgcaggatgagctgctgagccctgccagcctgggctgtgccctgagcagccccctgcgggctgaccagtactggaatgaggtggccgtgctggatgccatccccctggccgccacagaacatgacaccatgctggagatgtctgacatgcaggtgtggagcgctggcctgacccccagcctggtgacagctgaggacagcagcctggagtgcagcaaggcagaagattctgatgccaccggccacgagtggaagctggagggcgccctgtctgaggagccccggggccctgagctgggcagcctggagctggtggaggatgacacagtggacagtgatgccaccaacggcctgattgacctgctggagcaggaggagggccagaggtctgaggagaagctgcccggcagcaagaggcaggatgatgccaccggggccggccaggacagtgaaaatgaggtgtccctggtgtctggccaccagaggggccaggcccgcatcacccacagccccaccgtgtcccaggtgacagagaggagccaggaccggctgcaggactgggatgctgatggcagcatcgtgtcctacctgcaggatgctgcccagggctcctggcaggaggaggtgacccagggcccccacagcttccagggcaccagcaccatgacagagggcctggagcccggcggcagccaggagtatgagaaggtgctggtgtctgtgtctgagcacacctggacagagcagcctgaggccgagagcagccaggccgaccgggaccggcggcagcagggccaggaggagcaggtgcaggaggccaagaacaccttcacccaggtggtgcagggcaatgagttccagaacatccctggagagcaggtgacagaggagcagttcacagatgagcagggcaacatcgtgaccaagaagatcatcaggaaggtggtgcggcagattgacctgagcagcgcagatgctgcccaggagcacgaggaggtgacagtggagggccccctggaggaccccagcgagctggaggtggacatcgactacttcatgaagcacagcaaggtggagctgcggggcagcggcctgcagcctgacctgattgagggcaggaagggggcccagatcgtgaagagggccagcctgaagaggggcaagcagtag

SEQ ID NO: 341434 - DNA, 5718 bp, Artificial Sequence
  derived and/or modified sequence
atgccctacagcgtgggcttccgggaggccgacgccgccaccagcttcctcagagctgccagaagcggcaacctggacaaggccttggaccacttaaggaacggagttgacataaatacctgcaaccagaatggtttgaatggtctccacctcgccagcaaggagggacacgtcaaaatggtggtcgagctgttacacaaggagataattttggagaccacaacaaaaaagggtaacacagcactccacatcgctgcactggccggccaggatgaagtagtgcgtgaacttgtgaactacggagctaatgtgaatgcacagtcccaaaaggggttcacgccattgtatatggcggcccaagaaaaccatctggaagtcgtgaagtttttgcttgaaaacggagcaaaccagaacgtggccacagaagatggcttcaccccactcgcggtggccttacagcaggggcacgaaaacgtggttgctcaccttattaactatggaacaaagggaaaagtgaggttacctgcacttcatattgccgctaggaatgacgacacacggactgctgcggttttgttgcagaacgaccccaatcctgatgtgctgtccaagactgggtttacccctctccatatagccgcgcattatgagaacctcaatgtggcccagttgctgttgaatcgcggggcttccgtcaatttcacgccccaaaatggcataacaccacttcatattgcgtccaggcgaggaaacgttataatggtgaggcttctcctggaccgaggagctcagattgagacaaagacaaaagacgagctgacacccctgcattgcgctgcccgaaacggtcacgtgcgcatctcggaaattctgttggatcatggagcccctatacaggccaaaacaaaaaatgggcttagtcctattcatatggcggcccagggggatcatcttgattgcgtgcgtttgctgcttcaatacgacgcagagatcgacgatatcacactggatcacctcacccctctgcacgtggcagctcattgtggtcatcaccgtgtggccaaggtgctgctagataagggggcgaagccaaattcccgtgctttgaacggatttacacccctccacatcgcttgtaaaaagaatcatgtacgagtgatggagttgttactgaagaccggcgccagtatcgatgccgtgactgaatccggtttgactcctctgcacgtcgcctccttcatggggcatctcccgatcgtgaagaatcttctgcaaagaggtgcaagcccaaatgtgtcaaacgtaaaggtggaaaccccccttcacatggcagctagagcaggccacacggaggtagctaaatacttattacaaaacaaggctaaggtcaacgcaaaggctaaggacgaccagacccccctgcattgtgctgctcggattggacacaccaacatggtgaagctgctcctcgagaacaacgctaaccccaatcttgccacaaccgcgggccacaccccgctgcacattgcagcacgagaaggacacgtcgagaccgtcctagcacttttggagaaggaggctagccaagcatgtatgacaaagaagggatttacccctcttcatgtcgccgcaaagtacggcaaggtgagggtggctgagttactattggaacgcgacgctcacccaaacgcagcaggaaaaaatggcttaacccccctacacgtggcagttcaccataataacctggacattgtaaagttactattgcccaggggcggctcaccgcatagccctgcttggaacggatacactcctctgcacattgctgcaaagcagaatcaggtcgaggtggctcgctcactgctgcaatacggtgggagcgcaaacgccgagagcgtgcagggagtgacccccctacacctggcagcccaagaaggccatgccgaaatggtggccctgctccttagtaaacaggcaaatgggaacctaggtaacaaaagcggtttgaccccattgcatctcgtcgcccaagagggacacgttccagtagccgacgttctcatcaagcatggcgtgatggtggatgccactactagaatgggctatactcctttacacgtcgccagccactatggaaatataaaactggtgaagtttctgctgcagcatcaggcagacgtaaatgccaaaaccaaactcggatactccccgctgcaccaggcagctcagcagggtcacacagatatcgtcacactactcctcaaaaacggtgcgagcccgaatgaggtcagctccgacggaactacccctctggcgatcgcaaaaaggctggggtacataagcgtgacagatgtattaaaggtcgtgaccgacgaaactagctttgtgctggtaagtgataagcatagaatgagctttcccgaaactgttgatgagatcctcgacgtaagtgaagacgaaggcgaggagctgatctccttcaaggctgaaagacgcgacagtagagatgtggatgaggagaaagaactgctggacttcgtcccaaagctcgaccaggttgtggagtctcccgccatccctcggatcccatgcgcaatgccagagaccgttgtcatccgatccgaagagcaggagcaggcatctaaggaatacgacgaagactctcttatcccgagttccccagccacggaaacatccgacaatatcagccccgtagcgtctccagtccatactggattcctggtcagttttatggtggacgcccggggggggtctatgaggggctctcggcacaatggattaagagttgtgatcccccccaggacttgcgccgcccctacacggatcacatgccgcttagtaaaacctcagaagctctccacgccgccacccctcgcagaagaagaaggactcgcaagtaggattatcgccctcggccctactggagctcagtttttgtccccggtcatagtggaaatcccccatttcgcttcacacggcaggggtgacagagaacttgtagttctgagaagcgaaaatgggtcagtctggaaggaacatagaagtaggtatggtgagtcctatctggaccagattcttaacggcatggacgaggagctgggtagtctcgaggaacttgagaagaaacgagtctgtaggatcatcactactgacttcccactttacttcgtgatcatgtctagactctgccaagattacgatactatcggtcccgaagggggatcattgaaatctaaactggtgcctctggtccaggcaacattcccggagaacgccgttacaaaaagagtgaaactggctctgcaagcacagcccgttcccgatgagctggttaccaagctgctgggtaaccaagctacctttagccccattgtaaccgtagagcccagaagacgaaaattccaccgccctatcggactgcgcatccccctcccacctagctggactgacaacccaagggatagtggagagggtgatacaacgagtctcagactactctgttctgtaatcggtgggactgaccaagcccagtgggaggacattaccggtactaccaagttggtgtacgccaatgaatgcgcgaacttcacaaccaacgtgagcgctaggttttggttaagtgattgtcctcggaccgctgaggccgtcaactttgctaccctgctgtataaggagctgacagccgttccatatatggcgaagttcgttatcttcgctaaaatgaacgaccctcgggagggacgtctgagatgttactgtatgacagatgataaagtagataagactttagagcagcatgaaaacttcgtcgaggtggctaggagcagggacatcgaggtgctggagggaatgagtctcttcgccgagctatcaggaaacctggtgcccgtgaaaaaggccgctcagcaaagatcatttcatttccagtcttttcgggaaaatcggcttgccatgccggtaaaggtacgcgatagtagccgagagcccggtggttctctgagcttcctcagaaaggccatgaaatatgaggacacccagcacattttatgtcacttgaacattaccatgcccccttgcgccaaagggtccggcgcagaggatcggcgacggacacctactcctctggctttgaggtacagcatcctctcagaatctactcccggttccctcagcggcaccgaacaggccgaaatgaaaatggccgtgattagtgagcacctcggccttagttgggccgaactggccagagaacttcagttttccgttgaagacatcaaccgcattcgggttgaaaatcccaacagcctcctcgagcaaagtgtggccctattgaacctctgggtcattcgagagggacagaatgcaaatatggaaaacctgtacacagccttgcagagcatcgacagaggagagattgtcaacatgctcgagggaagcggccggcagtctcgaaatttaaaacccgacagacgtcacaccgatagagactattctttatcacccagccagatgaatggatactcctctctacaggacgaattgctgtctcctgcgtcccttggctgcgccttaagttctcctctccgcgccgatcagtattggaacgaagtcgctgtgctggatgccatccctttggctgcaaccgagcatgatacaatgcttgagatgtccgatatgcaggtctggagcgctggcctgactccaagtttggtgacagctgaggatagttccctggagtgtagcaaagctgaggactccgatgctacagggcatgagtggaaactggaaggcgctctgtctgaggagcccagaggccctgagcttggaagcctggaattggtcgaagatgacaccgtggactctgacgcgactaacggactcattgatctccttgaacaggaagaaggacagaggtctgaggaaaagctaccagggtcgaagcggcaggatgacgcaacaggcgccggacaggacagcgagaatgaggttagcttagtgtctggacatcagagaggtcaggcccggattacccacagtcccacagtgagtcaagtgactgagcgttctcaggaccggcttcaggattgggatgctgatggcagcattgtaagttacctgcaggacgcggctcagggctcctggcaggaggaggtgacccaaggcccacattcctttcaaggaacttccacgatgaccgaaggcctggaacctggcggatcccaggagtatgaaaaggtgctcgtgagcgtgagtgagcacacctggaccgaacagccggaagccgagagttcacaagccgaccgagatagacgtcaacagggccaggaagaacaagtacaggaagccaaaaacacattcacccaagtggtgcaggggaatgaattccagaacatcccgggtgagcaggtcacagaggagcaatttactgatgagcagggcaacattgtcaccaaaaagataatcaggaaggtggtcagacagattgatctttccagcgcagatgccgcccaggaacacgaggaagtcacagttgagggtcccttggaggacccttccgaattggaagtcgatattgattatttcatgaagcactctaaagtggagctgcgaggatctggtttacagcccgacctgatcgagggccgcaagggggcccaaatcgtaaaaagggcgtccctaaagaggggaaagcaatag

SEQ ID NO: 341435 - DNA, 8366 bp, Artificial Sequence
  derived and/or modified sequence
agaggctgcggtgagtccgccagccccagctgctcctcctcaagcccccaaggcccttcggcgggcccctgctgaaagaccggcatgccctattctgtgggcttccgcgaagccgatgctgctaccagctttctgagagcagcaagatcaggtaacttggacaaagctttggatcacctgcggaatggggtagatattaacacctgtaaccagaatgggttgaatggcttgcatctggcttctaaggaaggccatgtgaaaatggtggttgaacttctgcacaaagaaatcattctagaaacgacaaccaagaaggggaacacggccctgcacatcgctgctctagccgggcaggatgaggtggtccgggagcttgtcaactatggagccaacgtcaacgcccagtcacagaaaggttttacacccctgtacatggcagcacaagagaaccacttggaagtggttaagtttttactggaaaatggagctaaccagaatgtagccacagaagacggcttcacgcctctggcggtagccctgcagcagggccatgagaacgtcgtcgcgcacctcatcaactacggcaccaaggggaaggtgcgcctcccggccctgcacatcgcggcccgcaacgacgacacgcgcacggctgcggtgctgctgcagaacgaccccaacccggacgtgctttccaagacgggattcacgcccctgcacattgcggctcactacgagaacctcaacgtggcccagttgctcctcaacagaggagccagcgtcaatttcacaccacagaacggcatcacgccactgcacatcgcctcccgcaggggcaacgtgatcatggtgcggctgctgctggatcggggagcccagatagaaaccaagaccaaggacgaattgacacctctccactgtgcagctcgaaatgggcacgtgcgaatctcagagatcctgctggaccacggggcaccaatccaagccaaaaccaagaacggcctgtccccaattcacatggcggctcagggagaccacctcgactgtgtccggctcctgttgcaatacgacgcagagatagacgacatcaccctggaccacctgaccccactccacgtggctgcccactgtggacaccacagggtggctaaggtccttctggataaaggggccaaacccaactccagagccctgaatggctttacccccttacacatcgcctgcaaaaagaaccacgtccgtgtcatggagctgctgctgaagacgggagcctcgatcgacgcggtcaccgagtctggcctgacacctctccacgtggcctccttcatggggcaccttcccatcgtgaagaacctcctgcagcggggggcgtcgcccaacgtctccaacgtgaaagtggagaccccgctacacatggcagccagagccgggcacacggaagtggccaaatatttactccagaacaaagccaaagtcaatgccaaggccaaggatgaccagaccccacttcactgtgcagctcgcatcggccacacaaacatggtgaagctcctgctggaaaataacgccaaccccaacctggccaccaccgccgggcacacccccctgcacattgcagcccgtgagggccatgtggaaacagtcctggcccttctggaaaaggaagcatcccaggcctgcatgaccaagaaaggatttacccctctgcacgtggcggccaagtacgggaaggtgcgggtggcagagctgctgctggagcgggacgcacacccgaatgctgccggaaaaaatggcctgacccccctgcacgtggccgtccatcacaacaacctggacatcgtcaagctgctgcttccccggggcggctccccgcacagccctgcctggaatggctacacccctttgcacatcgctgccaagcagaaccaggtggaggtggcccgtagtctgctgcagtatgggggctcagcaaacgccgagtcggtgcaaggtgtgacgccccttcacctggccgcccaggagggccacgcagagatggtggctctgctgctctcgaaacaagccaatggcaacctggggaacaagagcggactcactcccctccatctggtagcacaagaaggccacgttccagtggcagatgtgctgatcaaacacggcgtcatggtggacgccaccacccggatgggctacactcccctccatgtggccagtcactatggaaacatcaagctggtgaagtttctgctgcagcaccaggcagatgtcaatgccaagaccaagctaggatacagccccctgcaccaggcagcccagcagggacacacagacatcgtgactctgcttctgaaaaacggtgcttccccaaacgaggtcagctcggatggaaccacacctctggccatagccaagcgcttgggctacatttctgtcaccgacgtgctcaaggtcgtcacggatgaaaccagtttcgtgttagtcagtgataagcatcgaatgagtttccctgagacagttgatgagatcctggatgtctcggaagatgaaggggaagaactcatcagcttcaaggctgagaggcgggattccagggatgttgatgaagagaaggagctgctggattttgtgccgaagctagaccaagtggtggaatctccagccatccccaggattccctgtgccatgcctgagacagtggtgatcaggtcagaagagcaggagcaggcatctaaagagtatgatgaggactccctcatccccagcagcccggccaccgagacctcagacaacatcagcccggtggccagcccggtgcatacagggtttctggtgagcttcatggttgacgcccggggtggttccatgagaggaagtcgccacaacggcctgcgagtggtgatcccgccacggacgtgcgcagcgcccacccgcatcacctgccgcctggtcaagccccagaagctcagcacgccgcccccactggccgaggaggagggcctggccagcaggatcatagcactggggcccacgggggcacagttcctgagccctgtaatcgtggagatcccgcactttgcctcccatggccgtggagaccgcgagctcgtggttctgaggagcgaaaacggctccgtgtggaaggagcacaggagccgctatggagagagctacctggatcagatcctcaacgggatggacgaagagctggggagcctggaggagctagagaagaagagggtgtgccgaatcatcaccaccgacttcccgctgtacttcgtgatcatgtcacggctctgccaggactacgacaccatcggtcccgaagggggctccctgaagagcaagctggtgcccctggtacaggcaacgttcccggagaatgccgtcaccaagagagtgaagctggctctgcaggcccagcctgtcccggatgagcttgtcactaagctcctgggcaaccaggccacattcagccccattgtcaccgtggagccccggcgccggaagttccaccgccccattgggcttcggatcccactacctccttcctggaccgacaacccgagggacagcggggagggagacaccaccagcctgcgcctgctttgcagcgtcattggaggaacagaccaagcccagtgggaagacataacaggaaccaccaaacttgtatatgccaacgagtgcgccaacttcaccaccaatgtctctgccaggttttggctgtcggactgtcctcggactgctgaggctgtgaactttgccaccctgctgtacaaagagctcactgcagtgccctacatggccaaattcgtcatctttgccaagatgaatgacccccgagaggggcgcctgcgctgctactgcatgacagatgataaagtggacaagaccctggagcagcatgagaacttcgtggaggtggcccggagcagggacatagaggtgttggaaggaatgtccctgtttgcagaactctctgggaacctggtgcctgtgaagaaagctgcccagcagcggagcttccacttccagtcatttcgggagaaccgtctggccatgcctgtaaaggtgagggacagcagtcgagagccgggagggtccctgtcgtttctgcgcaaggcgatgaagtacgaggacacccagcacattctctgccacctgaacatcaccatgcccccctgcgccaagggaagtggagccgaagataggagaaggaccccgacgcccctggccctgcgatacagcattctcagtgagtccacaccaggttctctcagtgggacagagcaggcagagatgaagatggctgttatctcagagcacctcggtctcagctgggcagagttggcccgggagctgcagttcagtgtggaagacatcaacaggatccgagtggaaaatcccaactccctgttggagcagagtgtggccttgctgaacctctgggtcatccgtgaaggccaaaacgcaaacatggagaatctgtacacagccctgcagagcattgaccgtggcgagatcgtgaacatgctggagggttccggccgacagagccgcaacttgaagccagacaggcggcacaccgaccgcgactactcgctgtcaccctcccagatgaatggttactcctcactgcaggacgagctgctgtcccctgcctccctgggctgtgcactttcctctccgctacgtgcagaccagtactggaatgaggtggccgtcctagacgccatccccttggcggccacggagcatgacaccatgctggagatgtctgacatgcaggtgtggtctgcgggcctcacgccttctctggtcactgctgaggactcctctctggagtgtagcaaggctgaggactctgatgccacaggtcacgagtggaagttggagggggcactctcagaggaaccgcggggccccgagttgggctctctggaacttgtggaggacgacacagtggattcagatgccacaaatggccttatcgatttgcttgaacaggaggaaggtcagaggtcagaagagaagctgccaggttctaagaggcaggatgacgcgacaggtgcagggcaggactcagagaatgaagtgtctcttgtttcaggccatcagagggggcaagcccgaatcacacattcccccaccgtgagtcaggtgacggagaggagtcaggacagactgcaggactgggatgcagacggctcgattgtctcatacctgcaagatgctgcacaaggttcctggcaagaggaggtcacgcaaggtccacactcattccagggaacaagtaccatgactgaagggctagagcccggtggatctcaggagtacgagaaggtcctggtgtctgtaagtgagcacacgtggacagaacagcccgaggctgagagctcccaggccgacagggaccggaggcagcaaggccaagaagagcaggtgcaggaggccaagaacaccttcacccaagtggtgcaggggaatgagtttcagaatattccaggggagcaggtgacagaggagcaattcacggatgagcagggcaacattgtcaccaagaagatcattcgcaaggtggttcgacagatagacttgtccagcgccgatgccgcccaggagcacgaggaggtgactgtagaggggcccctggaggatcccagtgagctggaggtcgatattgattactttatgaaacactccaaggtggagctgagagggagtggcctacagccggacctgatagagggcaggaagggggcgcagatagtgaagcgggccagcctgaaaagggggaaacagtgaccccgagccgctctccttggagtagcctctcgggaggatcacacctcgacacccaacccctgaaccccacacactctgccatgcacacaggaggagagctggacctgagggccaccgcagcggtgcacacattcctctgggctgacggcatgacctctgtaagggactcctgctagtcccctcttggcatgaatgactgactgtagacgcatgacctccaggcttcaatcctgcctcttgcaatgacagctgatctgtcggaaccaggacacaaaagcagcaagaagcggggagagagagggatagaaaacaagcgcaggagagcctgcgaacgcaaaagtgaatgagggctttttgtggctggggatgggttttggttttggggttttttttttaaattgttttgacttcgtacagggtactttttcccaacctcatctgtcagaaatccatgtgggcttcctggaaagaaaaaaaaaaaaaagaaaactaggcatgaaatcagtttaacaccttaatcttaagccatgtcctcatctgcccaccctccccaacccacatacctccattccacttgtgacaccccctcgactccctggtgacgctcctcccagatcgctctacatgacattcaggacacacacacacacacacacacaccactcgcctccactgaatctacacacagattttactgtgacttctgaagctgtatagactctgctgtggataaattggaattttttatgttgtctctctctctgccaatttcaatacgaatcatcttccaatggaaaatcattaccttgaagagtgcattcggggttccttgtgttagggacttaagaatctgaggcgaggacccccaggcttacctgtaggactcaaagggagccaggaccccatctgaaagggtctcctctctcagttgggggacaggccggtggctgacccaggattgcaccagcatgtccatagagaagaggttttctatgtcttcaagcactatatcatagtccgtgttcaaagtgtaaactgtacagtaatcagccttgtgtatatgaaaaacaataaatactatgcaaaccaatagaaacatttagcagtacgtacagagcctgacagcgcagctcctgaggacttctgcggctgcaggagaaggagctgtggcctgtctttcagtgaaagaggaaggaaaggagtagggctagtgaatgtatctgccaggtcttagaagtcaggaccacccagggtctcccagagtgaacttggtgctctaagtccaggcagcctgcaggctggggaccctgggtgcaggtgccaggctcgaggctgttccctgtcctgcctcagtgcctcccctctgcccagcccctgtggcctcttggagaggcgagccagggggctccccggaccgcatggccggtgagagtagagtcggaggcggagagcctggacgcccagaggccggggccaggctctgggtcaaggcaggaaggagacagacagctggcagttcctcgcctcggtgccatcagggaggagccttaagttccactagagcctccggcccagggaggccagaatcagcacaatcccggccccgccctcgcggcgggcgcccccagggccaggagagagagacagggctggctcctctcgcccctggagccgcggtgtggacggcccggccccgtccgccccgccgctctgcgggagtgtcctcgggacacacttaaaccttccaagtagcacagaagccccctccacgtcagaggccccctggccgcggggcctgtgagcggagaggggccctgcttcccacacaaatccgccccggtgcacccccggccaggcaggccccggggcggcctaggcgccttgtcggccgggggtggggctgcttttgcttcctttagaggggcgggcagggagaggaagctctagctccgggcctgagtttccccgaggctgcgtcggaggagctgcagggcgagcccggacggctgccgtctccgccagaggccaccccggcccggcctccagggcgcagaggcgcccccctccatcctcccccatcccgggggccacggcaggggggccgcacagcgcggctgggaccgattcggtgacggcccaaggaagctgggctcagggctcgcctctcccgcctcgatcctgcaccttcctctcccaggtcgctgctgcagccaacccagtagcccccttagcgcccccgcggaccccgcagctccagactccgctttggcacctctgctccggctggcatggctgcacgctccggctgctagtaggagccgttaggggaggagtttggggtctccacacgatgcctagagaatgctgcagtctgcacattagacgctttttagaagttttgaaattaccttgatttttttaattgttatgaaaatggatcttttcttgactctcccacatgctctgttatgggagagaatcccctaccctactctgatgtatagaccattctcccttcaccagccgaaccaatgtcaaaattaataaagaaatggactaatggc

SEQ ID NO: 341436 - DNA, 5717 bp, Artificial Sequence
  derived and/or modified sequence
atgccatatagcgtgggctttcgggaagccgacgccgcaacttcttttttgagggcggcacgctctggaaatttggataaggctttagaccatctgagaaacggcgtggatattaacacctgtaatcagaatgggctcaatgggctgcaccttgcgtctaaggaaggacacgtgaaaatggtggttgaacttcttcacaaagaaatcattctggagaccacaactaagaagggtaacacagcccttcacatagcagcactcgcaggtcaggacgaggtggtgcgagaattggtcaattacggtgccaacgttaacgcccaatctcaaaaaggtttcacccccctttatatggcggctcaggagaatcaccttgaagttgtgaagtttcttctagagaatggcgcaaaccaaaacgtagcaaccgaggatggtttcacacctttggctgtggcacttcagcagggtcatgaaaacgttgtcgctcacctgattaattatggcaccaaaggaaaggtacggctccccgcactccatatcgcggcaagaaacgacgacacccgcaccgccgcagttcttcttcagaatgaccccaatcccgacgttctgtccaagaccggctttacacccctgcatattgctgcccactacgaaaacctaaacgtggcacagctattactgaatagaggagcaagtgtgaatttcactccccagaacggcattactcctctgcacattgccagccgaaggggcaacgtgataatggtacgactgttgctggaccggggagcccagattgaaaccaaaactaaggatgagttgacccctttacactgtgctgccaggaacggtcacgtccggataagtgaaatcctgctggaccatggggcacccatccaggccaagacaaaaaacggtctctcccctattcacatggctgcccaaggcgaccacctcgattgtgtccgccttctgctgcagtatgacgcagaaattgatgatatcacactggatcaccttacgcctctgcacgtggctgctcattgcggccaccatagggtggcgaaagtactacttgataaaggggctaaacccaactcccgggctctgaatggtttcacacctttgcatattgcctgcaagaagaatcatgtgcgagtgatggaattgctcctaaaaactggggctagcattgacgctgtcactgagtctgggctgactcccttgcacgtggccagcttcatgggacacctgcccatagtgaaaaacctcctccagcgtggagcatcccccaatgtgagcaatgtcaaggtcgagacccccctccacatggctgccagggccggacacaccgaggtggctaaataccttttgcaaaacaaagccaaggtgaacgccaaagctaaagacgaccagactccgttgcactgcgccgctcggattggacataccaacatggtgaagcttctgttggagaacaatgcaaatcctaatctggctactacagcaggacatacacccctccacatagcagcacgcgaggggcacgtggaaacagttttggcccttctggagaaggaagctagccaagcatgcatgacaaaaaagggcttcacgccgttacacgtcgccgcaaagtatggcaaggtacgcgttgccgaactcttgttagagagggacgcccacccaaatgccgcaggtaaaaatgggctcactccattacacgtagccgttcaccataataacctggacatcgtcaagctcctgctcccacggggtggctcaccgcacagccctgcatggaatggatacacaccactccacatagcggctaaacagaatcaggtggaggtcgctcgctctctcctccagtatgggggaagcgctaacgccgagtcagtccagggggtgacacctcttcacctggccgcacaggaagggcacgctgagatggtggccctcctcttgtccaagcaggcgaatgggaacctcggcaataaaagcggacttactccgctgcacctggtggctcaggaaggccatgttccagtggccgatgtgctcataaagcacggagtgatggtcgatgcgaccactagaatggggtatacccctttacacgtagccagtcattatggcaatataaaactggtgaaattccttctccagcatcaggccgatgtcaacgcgaaaaccaagctgggatatagtcccctacaccaggctgcccagcaaggccatactgatattgttacgttgctgctgaagaatggagcctctcctaacgaagtttcatcggatgggacaacccccctggcaatcgccaagcgactgggttacatctccgttacagacgtgctaaaggtagtcaccgatgagacctcgttcgttctcgtgtccgacaagcacagaatgtccttcccagaaaccgtggacgagatcctggacgtgtccgaggacgagggtgaggagttgatctcgtttaaagctgaacgtcgggatagtcgtgatgtcgatgaggagaaagagctccttgattttgtccccaagttagaccaggtggtggagtcccccgcaatacctcgcattccgtgcgccatgcccgaaaccgtggtaattagaagcgaggaacaagagcaagcaagtaaggagtacgatgaagactctctgatccccagctcccctgcgaccgagacctcggataacatatctcctgtggcatcccctgtccacacaggtttcttggtaagctttatggtagatgcaaggggtggatctatgaggggcagtcgtcataacggcctgagagttgtcatacctccgcgaacatgcgctgcacctacaagaataacttgcaggctcgtaaaaccacagaagctgtctactccaccaccattggcagaggaggaggggctggcatcacgtatcattgcactcgggcctaccggcgctcaattcctgtctcccgttatagtagaaatccctcacttcgcaagccacggccgtggggacagggagcttgtggtgctgaggtctgagaatgggtctgtgtggaaggaacatagaagcaggtatggggagtcatatttggatcagatcttaaacggaatggacgaagagcttggatccttggaagagttagagaaaaaaagggtgtgcaggatcattacaacagatttcccactttatttcgttatcatgtctaggctgtgccaagactacgacacgataggcccagagggcggatcattgaagagcaagctggttcctcttgttcaggccacattcccagagaatgccgtaacaaagagggtaaaactcgccctgcaggcacaacccgtgcccgacgaactcgttacgaagctgctggggaatcaggccacattttcaccaattgttacagtggagccacggaggcggaaatttcatcggccaataggccttaggatccccctgccaccctcgtggaccgataatccgcgtgattccggggaaggggatacaacttctctacggttgctgtgcagcgtaataggtggcacagatcaggcccagtgggaagatatcaccggaaccaccaaacttgtgtacgcaaatgagtgcgccaattttaccactaacgtgtctgcacgattttggctatccgactgtcccaggacggccgaagcagttaatttcgctactctgctttataaagagttaaccgccgttccttatatggccaaatttgtcatattcgctaaaatgaacgatccaagagaaggtcgcctgcgctgttattgcatgactgatgacaaggtggataagactctggagcaacatgagaacttcgtagaggtcgcccgttcccgcgatatcgaagtgctggaaggcatgtcgctgttcgcagagctaagcggaaacctcgtccctgtgaaaaaagccgcacagcaaaggtcctttcatttccaatcattccgcgagaatagacttgctatgcctgtgaaggtgcgggattcctccagggaaccgggtggttcactttccttcctgaggaaggctatgaagtatgaggacactcagcacatcctctgtcacctgaacattactatgcccccatgcgctaaaggatccggtgcagaagatcggcgtcgaacccccaccccactcgccctgcgctattccattctgtcagagtcaactccaggaagcctgtcaggaaccgaacaagccgagatgaagatggctgttatttcggagcacttggggctgtcctgggcagaattagctagggagctgcagttttctgtggaagatatcaatcgcattagggtcgagaatcctaattctttgttggagcagtctgttgccctgctgaacctgtgggtcatcagagaagggcaaaacgccaatatggaaaatctgtacacagctttgcagtctattgatcggggtgaaattgtaaacatgcttgaaggcagcggcaggcagagccgtaacttgaagcccgacaggcgccataccgatcgtgattacagtttaagtccgagccaaatgaatggctactcctctctgcaggacgaactgctcagtccagcttctctgggctgcgccctgtcctcgcctttacgagctgaccagtattggaatgaagtggccgttctggacgctataccactggccgctaccgagcatgacacaatgctggaaatgtcagatatgcaagtttggtctgctgggctgactccttcactggtgaccgccgaggactctagccttgaatgttctaaagcggaggatagtgacgccaccgggcatgagtggaagcttgagggagcactctctgaagaacctcggggacctgagttaggaagcttagagctggtcgaggacgatacggttgactccgatgctaccaacggactgatagacctcttagagcaggaggagggtcaaaggagcgaagaaaaactccctggctcgaaacggcaggatgatgcgaccggggcaggccaggatagcgaaaacgaggtctccttagttagtggccaccagcggggacaggcaagaattacgcactcccccacggtctcccaggtaaccgagcgcagccaggatcggctgcaggactgggatgccgacggatccatagtgagctatctgcaggacgctgcccagggctcttggcaggaagaggtgacccaagggcctcacagctttcagggtacttcaacaatgacagagggtctggaacctggaggctctcaagagtacgagaaggtcttggtgagcgtgtcagagcatacttggactgagcagccagaggcggaaagctcccaagctgatcgcgatcggagacagcagggccaggaggagcaggtgcaggaggcaaaaaacactttcacccaagttgtgcaaggaaacgaattccaaaatatacctggagagcaggttactgaagagcaattcacagatgagcagggaaatatcgtcactaaaaaaataattcgtaaagtggtccgacagatcgatctatcctccgccgatgccgctcaggagcatgaagaggtcacggtcgagggccctctcgaagacccgagtgagctcgaggttgacattgactactttatgaagcattcaaaggttgaattgcgcggatccggcctgcagcctgacttgattgaaggaaggaagggcgctcaaattgtcaagcgggcaagtctgaaacggggtaaacagta

SEQ ID NO: 341437 - DNA, 5718 bp, Artificial Sequence
  derived and/or modified sequence
atgccctacagcgtgggcttcagagaggccgacgccgccaccagcttcctgagagccgccagaagcggcaacctggacaaggccctggaccacctgagaaacggcgtggacatcaacacctgcaaccagaacggcctgaacggcctgcacctggccagcaaggagggccacgtgaagatggtggtggagctgctgcacaaggagatcatcctggagaccaccaccaagaagggcaacaccgccctgcacatcgccgccctggccggccaggacgaggtggtgagagagctggtgaactacggcgccaacgtgaacgcccagagccagaagggcttcacccccctgtacatggccgcccaggagaaccacctggaggtggtgaagttcctgctggagaacggcgccaaccagaacgtggccaccgaggacggcttcacccccctggccgtggccctgcagcagggccacgagaacgtggtggcccacctgatcaactacggcaccaagggcaaggtgagactgcccgccctgcacatcgccgccagaaacgacgacaccagaaccgccgccgtgctgctgcagaacgaccccaaccccgacgtgctgagcaagaccggcttcacccccctgcacatcgccgcccactacgagaacctgaacgtggcccagctgctgctgaacagaggcgccagcgtgaacttcaccccccagaacggcatcacccccctgcacatcgccagcagaagaggcaacgtgatcatggtgagactgctgctggacagaggcgcccagatcgagaccaagaccaaggacgagctgacccccctgcactgcgccgccagaaacggccacgtgagaatcagcgagatcctgctggaccacggcgcccccatccaggccaagaccaagaacggcctgagccccatccacatggccgcccagggcgaccacctggactgcgtgagactgctgctgcagtacgacgccgagatcgacgacatcaccctggaccacctgacccccctgcacgtggccgcccactgcggccaccacagagtggccaaggtgctgctggacaagggcgccaagcccaacagcagagccctgaacggcttcacccccctgcacatcgcctgcaagaagaaccacgtgagagtgatggagctgctgctgaagaccggcgccagcatcgacgccgtgaccgagagcggcctgacccccctgcacgtggccagcttcatgggccacctgcccatcgtgaagaacctgctgcagagaggcgccagccccaacgtgagcaacgtgaaggtggagacccccctgcacatggccgccagagccggccacaccgaggtggccaagtacctgctgcagaacaaggccaaggtgaacgccaaggccaaggacgaccagacccccctgcactgcgccgccagaatcggccacaccaacatggtgaagctgctgctggagaacaacgccaaccccaacctggccaccaccgccggccacacccccctgcacatcgccgccagagagggccacgtggagaccgtgctggccctgctggagaaggaggccagccaggcctgcatgaccaagaagggcttcacccccctgcacgtggccgccaagtacggcaaggtgagagtggccgagctgctgctggagagagacgcccaccccaacgccgccggcaagaacggcctgacccccctgcacgtggccgtgcaccacaacaacctggacatcgtgaagctgctgctgcccagaggcggcagcccccacagccccgcctggaacggctacacccccctgcacatcgccgccaagcagaaccaggtggaggtggccagaagcctgctgcagtacggcggcagcgccaacgccgagagcgtgcagggcgtgacccccctgcacctggccgcccaggagggccacgccgagatggtggccctgctgctgagcaagcaggccaacggcaacctgggcaacaagagcggcctgacccccctgcacctggtggcccaggagggccacgtgcccgtggccgacgtgctgatcaagcacggcgtgatggtggacgccaccaccagaatgggctacacccccctgcacgtggccagccactacggcaacatcaagctggtgaagttcctgctgcagcaccaggccgacgtgaacgccaagaccaagctgggctacagccccctgcaccaggccgcccagcagggccacaccgacatcgtgaccctgctgctgaagaacggcgccagccccaacgaggtgagcagcgacggcaccacccccctggccatcgccaagagactgggctacatcagcgtgaccgacgtgctgaaggtggtgaccgacgagaccagcttcgtgctggtgagcgacaagcacagaatgagcttccccgagaccgtggacgagatcctggacgtgagcgaggacgagggcgaggagctgatcagcttcaaggccgagagaagagacagcagagacgtggacgaggagaaggagctgctggacttcgtgcccaagctggaccaggtggtggagagccccgccatccccagaatcccctgcgccatgcccgagaccgtggtgatcagaagcgaggagcaggagcaggccagcaaggagtacgacgaggacagcctgatccccagcagccccgccaccgagaccagcgacaacatcagccccgtggccagccccgtgcacaccggcttcctggtgagcttcatggtggacgccagaggcggcagcatgagaggcagcagacacaacggcctgagagtggtgatcccccccagaacctgcgccgcccccaccagaatcacctgcagactggtgaagccccagaagctgagcacccccccccccctggccgaggaggagggcctggccagcagaatcatcgccctgggccccaccggcgcccagttcctgagccccgtgatcgtggagatcccccacttcgccagccacggcagaggcgacagagagctggtggtgctgagaagcgagaacggcagcgtgtggaaggagcacagaagcagatacggcgagagctacctggaccagatcctgaacggcatggacgaggagctgggcagcctggaggagctggagaagaagagagtgtgcagaatcatcaccaccgacttccccctgtacttcgtgatcatgagcagactgtgccaggactacgacaccatcggccccgagggcggcagcctgaagagcaagctggtgcccctggtgcaggccaccttccccgagaacgccgtgaccaagagagtgaagctggccctgcaggcccagcccgtgcccgacgagctggtgaccaagctgctgggcaaccaggccaccttcagccccatcgtgaccgtggagcccagaagaagaaagttccacagacccatcggcctgagaatccccctgccccccagctggaccgacaaccccagagacagcggcgagggcgacaccaccagcctgagactgctgtgcagcgtgatcggcggcaccgaccaggcccagtgggaggacatcaccggcaccaccaagctggtgtacgccaacgagtgcgccaacttcaccaccaacgtgagcgccagattctggctgagcgactgccccagaaccgccgaggccgtgaacttcgccaccctgctgtacaaggagctgaccgccgtgccctacatggccaagttcgtgatcttcgccaagatgaacgaccccagagagggcagactgagatgctactgcatgaccgacgacaaggtggacaagaccctggagcagcacgagaacttcgtggaggtggccagaagcagagacatcgaggtgctggagggcatgagcctgttcgccgagctgagcggcaacctggtgcccgtgaagaaggccgcccagcagagaagcttccacttccagagcttcagagagaacagactggccatgcccgtgaaggtgagagacagcagcagagagcccggcggcagcctgagcttcctgagaaaggccatgaagtacgaggacacccagcacatcctgtgccacctgaacatcaccatgcccccctgcgccaagggcagcggcgccgaggacagaagaagaacccccacccccctggccctgagatacagcatcctgagcgagagcacccccggcagcctgagcggcaccgagcaggccgagatgaagatggccgtgatcagcgagcacctgggcctgagctgggccgagctggccagagagctgcagttcagcgtggaggacatcaacagaatcagagtggagaaccccaacagcctgctggagcagagcgtggccctgctgaacctgtgggtgatcagagagggccagaacgccaacatggagaacctgtacaccgccctgcagagcatcgacagaggcgagatcgtgaacatgctggagggcagcggcagacagagcagaaacctgaagcccgacagaagacacaccgacagagactacagcctgagccccagccagatgaacggctacagcagcctgcaggacgagctgctgagccccgccagcctgggctgcgccctgagcagccccctgagagccgaccagtactggaacgaggtggccgtgctggacgccatccccctggccgccaccgagcacgacaccatgctggagatgagcgacatgcaggtgtggagcgccggcctgacccccagcctggtgaccgccgaggacagcagcctggagtgcagcaaggccgaggacagcgacgccaccggccacgagtggaagctggagggcgccctgagcgaggagcccagaggccccgagctgggcagcctggagctggtggaggacgacaccgtggacagcgacgccaccaacggcctgatcgacctgctggagcaggaggagggccagagaagcgaggagaagctgcccggcagcaagagacaggacgacgccaccggcgccggccaggacagcgagaacgaggtgagcctggtgagcggccaccagagaggccaggccagaatcacccacagccccaccgtgagccaggtgaccgagagaagccaggacagactgcaggactgggacgccgacggcagcatcgtgagctacctgcaggacgccgcccagggcagctggcaggaggaggtgacccagggcccccacagcttccagggcaccagcaccatgaccgagggcctggagcccggcggcagccaggagtacgagaaggtgctggtgagcgtgagcgagcacacctggaccgagcagcccgaggccgagagcagccaggccgacagagacagaagacagcagggccaggaggagcaggtgcaggaggccaagaacaccttcacccaggtggtgcagggcaacgagttccagaacatccccggcgagcaggtgaccgaggagcagttcaccgacgagcagggcaacatcgtgaccaagaagatcatcagaaaggtggtgagacagatcgacctgagcagcgccgacgccgcccaggagcacgaggaggtgaccgtggagggccccctggaggaccccagcgagctggaggtggacatcgactacttcatgaagcacagcaaggtggagctgagaggcagcggcctgcagcccgacctgatcgagggcagaaagggcgcccagatcgtgaagagagccagcctgaagagaggcaagcagtag

SEQ ID NO: 341438 - DNA, 381 bp, Artificial Sequence
  derived and/or modified sequence
atggacccttccctgctgcgggagcgggaattatttaagaagcgtgcactgtcaacccccgtggtagaaaaaagaagcgcttccagcgagtcctcctcctcgtcttccaagaaaaaaaagactaaagtcgaacatggcggctccagcggatcaaaacagaattctgaccattcaaatggcagtttcaacctcaaagctttatccggctcatctggctacaagtttggtgttctggcaaagatcgttaattatatgaaaacacggcatcagcgcggtgatacccaccccctgactttggatgaaatcctcgacgagacacaacatctggacatcggtttgaaacagaaacagtggttgatgacagaggcactcgtgaactag

SEQ ID NO: 341439 - DNA, 597 bp, Artificial Sequence
  derived and/or modified sequence
atggaccctagcctgctgcgggaaagggaactcttcaaaaaaagggccctgtccacaccggtcgttgagaagcggagtgcaagttctgagtccagttcttcatccagcaagaaaaaaaagaccaaagtcgagcacggggggtcttccggaagtaaacagaatagcgaccactcaaatgggtcctttaacctgaaagccctgagcgggtccagcggctataagttcggcgtgctggccaagatagtcaactacatgaagaccaggcaccagagaggagacacccaccctttaacactcgacgaaatcctagacgagactcagcatctagacatcggcctaaagcaaaagcagtggctaatgacggaggccctcgtgaacaaccctaagatcgaggtgattgacggcaagtacgccttcaaacctaagtacaacgtgcgcgataaaaaggctctgcttaggcttttagaccagcacgatcagagaggactgggaggaatactgttggaggatatcgaggaagccctgcccaattctcagaaagccgtgaaggccctaggtgatcagatactgttcgtcaatcggcccgataagaaatag

SEQ ID NO: 341440 - DNA, 426 bp, Artificial Sequence
  derived and/or modified sequence
tgctcatacgcggactgctttctaggctaccttttggagatttgcattatggatccaagcctgttgagagaaagggagctgttcaaaaaacgagctctttctactcctgtagtagaaaaacgttcagcatcttctgagtcatcatcatcatcgtcaaagaagaagaaaacaaaggtagaacatggaggatcgtcaggctctaaacaaaattctgatcatagcaatggatcatttaacttgaaagctttgtcaggaagctctggatataagtttggtgttcttgctaagattgtgaattacatgaagacacggcatcagcgaggagatacgcatcctctaaccttagatgaaattttggatgaaacacaacatttagatattggactcaagcagaaacaatggctaatgactgaggctttagtcaac

SEQ ID NO: 341441 - DNA, 737 bp, Artificial Sequence
  derived and/or modified sequence
gtcaggaggtttggttcctggccctggctcttccatctgtgcgaccttaaccagacagcttcacttcagatttcacgtattaaaataggaataacactaatacctgtttgctcctagagttgcgagggtcaaatactcattatggatccaagcctgttgagagaaagggagctgttcaaaaaacgagctctttctactcctgtagtagaaaaacgttcagcatcttctgagtcatcatcatcatcgtcaaagaagaagaaaacaaaggtagaacatggaggatcgtcaggctctaaacaaaattctgatcatagcaatggatcatttaacttgaaagctttgtcaggaagctctggatataagtttggtgttcttgctaagattgtgaattacatgaagacacggcatcagcgaggagatacgcatcctctaaccttagatgaaattttggatgaaacacaacatttagatattggactcaagcagaaacaatggctaatgactgaggctttagtcaacaatcccaaaattgaagtaatagatgggaagtatgctttcaagcccaagtacaacgtgagagataagaaggccctacttaggctcttagatcagcatgaccagcgaggattaggaggaattcttttagaagacatagaagaagcactgcccaattcccagaaagctgtcaaggctttgggggaccagatactatttgtaaatcgtcccgataagaagaa

SEQ ID NO: 341442 - DNA, 381 bp, Artificial Sequence
  derived and/or modified sequence
atggaccccagcctgctgcgggagcgggagctgttcaagaagagggccctgagcacccctgtggtggagaagaggtctgccagcagcgagagcagcagcagcagcagcaagaagaagaagaccaaggtggagcacggcggcagcagcggcagcaagcagaacagcgaccacagcaatggcagcttcaacctgaaggccctgagcggcagcagcggctacaagtttggagtgctggccaagatcgtgaactacatgaagaccaggcaccagagaggagacacccaccccctgaccctggatgagatcctggatgagacccagcacctggacatcggcctgaagcagaagcagtggctgatgacagaggccctggtgaactag

SEQ ID NO: 341443 - DNA, 597 bp, Artificial Sequence
  derived and/or modified sequence
atggaccccagcctgctgcgggagcgggagctgttcaagaagagggccctgagcacccctgtggtggagaagaggtctgccagcagcgagagcagcagcagcagcagcaagaagaagaagaccaaggtggagcacggcggcagcagcggcagcaagcagaacagcgaccacagcaatggcagcttcaacctgaaggccctgagcggcagcagcggctacaagtttggagtgctggccaagatcgtgaactacatgaagaccaggcaccagagaggagacacccaccccctgaccctggatgagatcctggatgagacccagcacctggacatcggcctgaagcagaagcagtggctgatgacagaggccctggtgaacaaccccaagattgaggtgattgatggcaagtatgccttcaagcccaagtacaacgtgcgggacaagaaggccctgctgcggctgctggaccagcacgaccagaggggcctgggcggcatcctgctggaggacatcgaggaggccctgcccaacagccagaaggctgtgaaggccctgggggaccagatcctgtttgtgaacagaccagacaagaagtag

SEQ ID NO: 341444 - DNA, 381 bp, Artificial Sequence
  derived and/or modified sequence
atggaccccagcctgctgcgggagcgggagctgttcaagaagcgggctctctctactcccgtggtggaaaagcggagcgcctcctcggaatcatcaagctcctcctctaagaagaaaaaaactaaggtggagcatggtggatccagcggcagcaagcagaacagcgaccactctaatgggagtttcaatctcaaggccctaagcggatccagcggatataaatttggcgtgctggccaaaatagtgaattacatgaagacccggcaccagagaggcgacacccatcccttgaccttagatgaaatactggacgagacccagcacttagacataggacttaagcagaagcaatggctgatgactgaggcactcgtcaactag

SEQ ID NO: 341445 - DNA, 597 bp, Artificial Sequence
  derived and/or modified sequence
atggaccccagcctgctgcgggagcgggagctgttcaagaagcgggccctctccactccggtcgtggagaaaagatcagcctcttcagagagttcatcttcttcctccaaaaagaagaaaacaaaagtggagcatggcggttcttctggatcaaaacagaatagcgaccacagtaatgggtcttttaatctcaaggctttgagcggttctagcggctataagttcggagtcttggctaaaatcgttaactatatgaagacccgccaccagcgaggtgacacacatcccttgaccttggacgaaatcctcgacgagacacagcatttggatattggcttaaagcagaaacagtggctaatgacagaagccttggtcaacaaccctaaaatcgaggtgattgacggcaaatacgcatttaagcccaagtataatgtgcgggataaaaaggcactgctgagacttctggaccaacatgaccaacgcgggctgggtggtatcctactggaagatatagaagaagccttacctaattcccagaaggccgtaaaagctttgggagaccagatcttgtttgtgaacaggcctgataagaaatag

SEQ ID NO: 341446 - DNA, 381 bp, Artificial Sequence
  derived and/or modified sequence
atggaccccagcctccttagagaacgagaactctttaaaaagcgcgcattgagtacgccagtggttgagaagcgaagtgcaagctcagaaagtagttcctcctcaagcaagaaaaagaagactaaagttgaacatgggggttccagcggctcgaaacaaaattccgaccactctaacggctcgtttaaccttaaagcattaagcgggagctccgggtacaagttcggggtgctggccaaaatagtaaattatatgaagactcgccatcagaggggcgatacacatcctttgaccttagacgaaatcctggacgaaacccagcatctggacattggcctaaaacaaaaacagtggctgatgactgaagcacttgtaaactag

SEQ ID NO: 341447 - DNA, 597 bp, Artificial Sequence
  derived and/or modified sequence
atggatcctagcttattgcgggagagggagttgttcaaaaaacgcgcattaagtaccccagtcgtagagaagcggtctgcgtcctccgaatcttcaagttcgagctctaaaaagaagaagactaaagtggaacacgggggttcatctggatcgaaacagaattcagatcatagtaatggctcctttaacttgaaagctttatctggtagcagcggatacaaatttggggttttagcaaaaattgtcaactacatgaaaaccagacatcaaaggggagacacacatccgctcaccctggacgaaattctcgatgagacccagcacctggatattggcctgaagcagaagcagtggctcatgacagaggcccttgtgaataatcccaagatcgaggtcattgatgggaaatacgcttttaagcccaagtacaatgtgcgggacaaaaaggccttgctgaggctgctggatcagcatgatcaacgtggcctgggtgggattttgctcgaagacatcgaagaggccctaccaaacagccagaaagccgtcaaagctctgggagatcagatcttattcgtcaacaggccagataagaagtag

SEQ ID NO: 341448 - DNA, 381 bp, Artificial Sequence
  derived and/or modified sequence
atggaccccagcctgctgagagagagagagctgttcaagaagagagccctgagcacccccgtggtggagaagagaagcgccagcagcgagagcagcagcagcagcagcaagaagaagaagaccaaggtggagcacggcggcagcagcggcagcaagcagaacagcgaccacagcaacggcagcttcaacctgaaggccctgagcggcagcagcggctacaagttcggcgtgctggccaagatcgtgaactacatgaagaccagacaccagagaggcgacacccaccccctgaccctggacgagatcctggacgagacccagcacctggacatcggcctgaagcagaagcagtggctgatgaccgaggccctggtgaactag

SEQ ID NO: 341449 - DNA, 597 bp, Artificial Sequence
  derived and/or modified sequence
atggaccccagcctgctgagagagagagagctgttcaagaagagagccctgagcacccccgtggtggagaagagaagcgccagcagcgagagcagcagcagcagcagcaagaagaagaagaccaaggtggagcacggcggcagcagcggcagcaagcagaacagcgaccacagcaacggcagcttcaacctgaaggccctgagcggcagcagcggctacaagttcggcgtgctggccaagatcgtgaactacatgaagaccagacaccagagaggcgacacccaccccctgaccctggacgagatcctggacgagacccagcacctggacatcggcctgaagcagaagcagtggctgatgaccgaggccctggtgaacaaccccaagatcgaggtgatcgacggcaagtacgccttcaagcccaagtacaacgtgagagacaagaaggccctgctgagactgctggaccagcacgaccagagaggcctgggcggcatcctgctggaggacatcgaggaggccctgcccaacagccagaaggccgtgaaggccctgggcgaccagatcctgttcgtgaacagacccgacaagaagtag

SEQ ID NO: 341450 - protein, 723 aa, Artificial Sequence
  derived and/or modified sequence
MSSTCEPCKSRNRHSAQTEEPVQAKVFSRKNHEQLEKIIKCNRSTEISSAHARRILQQSNRNACNEAPETGSDFSMFEALRDTIYSEVATLISQNESRPHFLIELFHELQLLNTDYLRQRALYALQDIVSRHISESHEKGENVKSVNSGTWIASNSELTPSESLATTDDETFEKNFERETHKISEQNDADNASVLSVSSNFEPFATDDLGNTVIHLDQALARMREYERMKTEAESNSNMRCTCRIIEDGDGAGAGTTVNNLEETPVIENRSSQQPVSEVSTIPCPRIDTQQLDRQIKAIMKEVIPFLKEHMDEVCSSQLLTSVRRMVLTLTQQNDESKEFVKFFHKQLGSILQDSLAKFAGRKLKDCGEDLLVEISEVLFNELAFFKLMQDLDNNSITVKQRCKRKIEATGVIQSCAKEAKRILEDHGSPAGEIDDEDKDKDETETVKQTQTSEVYDGPKNVRSDISDQEEDEESEGCPVSINLSKAETQALTNYGSGEDENEDEEMEEFEEGPVDVQTSLQANTEATEENEHDEQVLQRDFKKTAESKNVPLEREATSKNDQNNCPVKPCYLNILEDEQPLNSAAHKESPPTVDSTQQPNPLPLRLPEMEPLVPRVKEVKSAQETPESSLAGSPDTESPVLVNDYEAESGNISQKSDEEDFVKVEDLPLKLTIYSEADLRKKMVEEEQKNHLSGEICEMQTEELAGNSETLKEPETVGAQSI

SEQ ID NO: 341451 - protein, 529 aa, Artificial Sequence
  derived and/or modified sequence
MATGGGPFEDGMNDQDLPNWSNENVDDRLNNMDWGAQQKKANRSSEKNKKKFGVESDKRVTNDISPESSPGVGRRRTKTPHTFPHSRYMSQMSVPEQAELEKLKQRINFSDLDQRSIGSDSQGRATAANNKRQLSENRKPFNFLPMQINTNKSKDASTNPPNRETIGSAQCKELFASALSNDLLQNCQVSEEDGRGEPAMESSQIVSRLVQIRDYITKASSMREDLVEKNERSANVERLTHLIDHLKEQEKSYMKFLKKILARENEEEDVRTIDSAVGSGSVAESTSLNIDVQSEASDTTARDPQQEPMEEIENLKKQHDLLKRMLQQQEQLRALQGRQAALLALQHKAEQAIAVMDDSVVAETAGSLSGVSITSELNEELNDLIQRFHNQLRDSQPPAVPDNRRQAESLSLTREVSQSRKPSASERLPDEKVELFSKMRVLQEKKQKMDKLLGELHTLRDQHLNNSSSSPQRSVDQRSTSAPSASVGLAPVVNGESNSLTSSVPYPTASLVSQNESENEGHLNPSEKL

SEQ ID NO: 341452 - DNA, 1590 bp, Artificial Sequence
  derived and/or modified sequence
atggctactggaggcggacctttcgaagacggcatgaatgaccaggatcttcctaactggagcaacgagaacgtagacgatagactgaataatatggactggggcgcccagcagaaaaaagccaatcgctcttccgaaaagaacaaaaaaaaatttggcgttgaatcagacaagcgagtaacaaacgatatctccccggagtccagccccggggtggggcgtcggaggacaaaaacccctcatacctttccccatagtaggtacatgtcccaaatgtcggtgccggagcaggctgaactggaaaagcttaagcaaagaatcaactttagcgatctggaccagaggtctataggcagtgactcgcaggggcgcgccaccgctgccaacaataagcgacagctttcagaaaatcgcaagccctttaacttcctgcccatgcagataaacaccaacaaatcaaaggacgctagtaccaatcctccaaatcgagaaaccatcggaagcgcccagtgtaaagaactcttcgctagcgccctgtctaacgacctgctgcagaattgtcaggtgtcagaggaggacggtaggggcgagccggccatggagtcaagccagattgtgagccgtctcgttcaaataagagattatattactaaagcttcttctatgcgggaggatttggtagaaaaaaacgaaaggtctgctaacgtcgaacgcctaacccatctcatcgatcacttaaaggagcaggagaagtcatacatgaaattccttaaaaaaatccttgctcgggaaaatgaggaggaggatgtgcgcactattgactcagccgtcggttccggatcagtggccgaaagtacctccctcaatatagatgtgcagtccgaggcttccgatactaccgcccgtgatccccagcaagaaccaatggaggaaattgagaaccttaaaaaacagcacgacttgctaaaacgaatgctgcagcagcaggagcaattgagggctcttcaagggaggcaggctgctctgttagccttacagcacaaggccgagcaagcaatcgctgttatggatgattcggtggttgcggagactgctggcagcctctccggcgtcagcattacgtccgagttgaacgaggagctaaatgatttgatacagaggttccataatcagctcagggatagtcagccacctgcagtgccagacaacaggcgccaagccgagagtttgtcgctcacgagggaggtgagtcagtcaaggaaaccaagtgcctccgagcgccttcctgacgagaaggttgaactgtttagcaaaatgcgagttctgcaggaaaagaaacaaaagatggataaattgcttggagaactacatacattgcgggaccagcatctgaacaacagctcttctagtccccagcggtccgtcgaccagagatctactagtgccccaagcgcctccgtgggactagcgcccgttgttaacggggagtcaaactctctaacatcctctgtcccctatccgaccgccagcctggtctcgcagaatgagagtgagaacgagggccacctcaaccccagtgaaaaactgtag

SEQ ID NO: 341453 - DNA, 1590 bp, Artificial Sequence
  derived and/or modified sequence
atggccactggaggcggcccctttgaagatggcatgaatgaccaggacctgcccaactggagcaatgaaaatgtggatgaccggctgaacaacatggactggggcgcccagcagaagaaggccaacagaagcagcgagaagaacaagaagaagtttggagtggagagtgacaagagggtgaccaatgacatcagccctgagagcagccctggggtgggcagaagaaggaccaagaccccccacaccttcccccacagccgctacatgagccagatgtctgtgcctgagcaggccgagctggagaagctgaagcagaggatcaacttcagtgacctggaccagaggagcattggaagtgacagccagggccgggccacagctgccaacaacaagaggcagctgtctgagaacaggaagcccttcaacttcctgcccatgcagatcaacaccaacaagagcaaggatgccagcaccaacccccccaaccgggagaccatcggcagcgcccagtgcaaggagctgtttgccagcgccctgagcaatgacctgctgcagaactgccaggtgtctgaggaggatggccgcggggagcccgccatggagagcagccagatcgtgtcccggctggtgcagatccgggactacatcaccaaggccagctccatgagggaggacctggtggagaagaatgaaagaagtgccaacgtggagcggctgacccacctgattgaccacctgaaggagcaggagaagagctacatgaagttcctgaagaagatcctggcccgggagaatgaggaggaggatgtgaggaccattgattctgctgtgggcagcggctctgtggccgagagcaccagcctgaacattgatgtgcagagcgaggccagtgacaccacagcccgggacccccagcaggagcccatggaggagattgagaacctgaagaagcagcacgacctgctgaagaggatgctgcagcagcaggagcagctgcgggccctgcagggccggcaggccgccctgctggccctgcagcacaaggccgagcaggccatcgctgtgatggatgattctgtggtggccgagacagctggcagcctgtctggagtgtccatcaccagcgagctgaatgaggagctgaatgacctgatccagcgcttccacaaccagctgcgggacagccagcccccagctgtgcctgacaacagacggcaggccgagagcctgagcctgacccgggaggtgtcccagagcaggaagcccagcgccagcgagcggctgcctgatgagaaggtggagctgttcagcaagatgagggtgctgcaggagaagaagcagaagatggacaagctgctgggggagctgcacaccctgcgggaccagcacctgaacaacagcagcagcagcccccagaggtctgtggaccagaggagcaccagcgcccccagcgcctctgtgggcctggcccctgtggtgaatggagagagcaacagcctgaccagctctgtgccctaccccacagccagcctggtgtcccagaatgaaagtgaaaatgaaggccacctgaaccccagcgagaagctgtag

SEQ ID NO: 341454 - DNA, 1590 bp, Artificial Sequence
  derived and/or modified sequence
atggccaccggcggcggccccttcgaggacggcatgaacgaccaggatctccctaactggtctaacgagaacgtggatgataggctgaataacatggattggggcgcccagcagaagaaggcaaaccgcagcagcgaaaagaacaaaaagaaatttggagtggagtccgacaagcgggttaccaacgacatttcacccgagtcttcgcccggggtgggacgacggcgaacgaaaacacctcacacttttccgcactcccgctacatgtctcagatgtccgtccccgagcaagccgaacttgaaaagttgaagcagagaataaatttcagcgatctggatcagagatcaattggttccgatagccagggccgggcaacggccgccaataacaagagacagctatcagagaaccgtaagccctttaatttcctgcctatgcagattaacactaataagtccaaggatgcatctaccaatccacctaatcgggagaccataggcagcgctcagtgcaaggaattattcgcgagcgctctgtcgaacgatctgctccagaactgtcaggtctccgaggaagatgggcggggcgagcctgctatggaatctagccagatagtctctcggttagtacagatccgggactacattaccaaggctagcagtatgcgcgaggatctggttgagaagaatgagcgcagcgcaaatgttgaacgactgacccacctgatcgaccatctaaaagagcaggagaaatcttatatgaagtttctgaaaaagattctggcaagggagaacgaggaggaggacgtgagaaccatagacagcgccgttggcagcggcagcgttgcggagtccacatccctgaatattgacgttcaatcagaggcatccgatacaacggctcgggacccgcagcaggaaccaatggaggaaatagaaaacctgaaaaagcagcatgatttgctgaagaggatgcttcagcagcaagaacagctacgggctttgcagggcagacaggccgcactgctcgccctgcagcacaaagcagagcaagccatagcagtcatggatgactcagtggtagctgaaactgccggctcactgtctggagtgtctattacctccgaactgaacgaggagctgaatgatctgatccagcgctttcataaccagctgagggattcccaacctcctgctgtgcccgataacaggcgccaggctgagagcttgagcctaacacgagaagtctctcagtcaaggaaaccttccgctagcgagcggctgcctgacgagaaagtggaacttttctccaagatgcgtgttttgcaggagaagaaacagaagatggacaaacttctgggtgaactgcacacccttcgggaccagcacctgaacaattcctctagtagccctcagcggagcgtcgaccagcgctctaccagcgccccaagtgcctccgttgggcttgctccagtggttaatggtgaaagcaacagcctgacatctagtgtgccttatccgactgcaagcctggtgtcccaaaacgaatccgaaaacgagggccacttgaacccttccgagaaattatag

SEQ ID NO: 341455 - DNA, 8896 bp, Artificial Sequence
  derived and/or modified sequence
ctccagtctagctcgcattgcggctcccgcccgggcgagttctcgcccccgcgcggccgttgccgaggagacggcgcatgtcccgccgcgcgttgccccctctgcagtacccccgcccctcttctcccaccacaatgagatcctaagatggcggtggctgcggcggttggcgctgcgtagctgaggtcgaaaaggcggccactggggccgaggcagccaggaaacgtgtgggcctctctgctgcggtctccgagggccgaccgctgccggcggcgggtcgtgggggctgactgtcgctctgcctttgacaggagaggctgcttcttgtagaggaaacagctttgaagtgtggagcgggaaaggagcagtttctgagctgcaaaaactagtttctaaacagagagttaattgttaaatccagtatggccacaggaggaggtccctttgaagatggcatgaatgatcaggatttaccaaactggagtaatgagaatgttgatgacaggctcaacaatatggattggggtgcccaacagaagaaagcaaatagatcatcagaaaagaataagaaaaagtttggtgtagaaagtgataaaagagtaaccaatgatatttctccggagtcgtcaccaggagttggaaggcgaagaacaaagactccacatacgttcccacacagtagatacatgagtcagatgtctgtcccagagcaggcagaattagagaaactgaaacagcggataaacttcagtgatttagatcagagaagcattggaagtgattcccaaggtagagcaacagctgctaacaacaaacgtcagcttagtgaaaaccgaaagcccttcaactttttgcctatgcagattaatactaacaagagcaaagatgcatctacaaaccccccaaacagagaaacgattggatcagcacagtgtaaagagttgtttgcttctgctttaagtaatgacctcttgcaaaactgtcaggtgtctgaagaagatgggaggggagaacctgcaatggagagcagccagattgtaagcaggcttgttcaaattcgcgattatattactaaagctagttccatgcgggaagatcttgtagagaaaaatgagagatctgctaatgttgagcgccttactcatctaatagatcaccttaaagaacaagagaagtcatatatgaaatttcttaaaaaaatccttgctagagaaaatgaggaggaggatgttcggactatagattcagctgtgggatctggttctgtagctgagagcacatcgctaaacatagatgtgcagtctgaggcttcagataccacggccagagatcctcagcaggagcctatggaagagatagaaaatttgaagaaacaacatgatttattaaaaagaatgttacaacagcaggagcaactaagagctctacagggacggcaggctgcacttctagctctgcaacataaagcagagcaagctattgcagtgatggatgattctgttgttgcagaaactgcaggtagcttatctggcgtcagtatcacatctgaactaaatgaagaattgaatgacttaattcagcgttttcataatcagcttcgtgattctcagcctccagctgttccagacaatagaagacaggcagaaagtctttcattaactagggaggtttcccagagcaggaaaccatcagcttcagaacgtttacctgatgagaaagtcgaactttttagcaaaatgagagtgctacaggaaaagaaacaaaaaatggacaaattgcttggagaacttcatacacttcgagatcagcatcttaacaattcatcatcctctccacaaaggagtgtcgatcagagaagtacttcagctccctctgcttctgtaggcttggcaccggttgtcaatggagaatccaatagcctcacatcatctgttccttatcctactgcttctctagtatctcagaatgagagtgaaaacgaaggccacctcaatccatctgaaaaactccagaagttaaatgaagttcgaaagagattgaatgagctaagagaattagttcattattatgaacaaacgtcagacatgatgacagatgctgtgaatgaaaacaggaaagatgaagaaactgaagagtcagaatatgattctgagcatgaaaattccgagcctgttactaacattcgaaatccacaagtagcttccacttggaatgaagtaaatagtcatagtaatgcacagtgtgtttctaataatagagatgggcgaacagttaattctaattgtgaaattaacaacagatctgctgccaacataagggctctaaacatgcctccttctttagattgtcgatataatagagaaggggaacaggagattcatgttgcacaaggtgaagatgatgaggaggaggaggaagaagcagaagaggagggagtcagtggagcttcattatctagtcacaggagcagtctggttgatgagcatccagaagatgctgaatttgaacagaagatcaaccgacttatggctgcaaaacagaaacttagacagttacaagatcttgttgctatggtacaggatgatgatgcagctcaaggagttatctctgccagtgcatcaaatttggatgatttctacccagcagaagaagacaccaagcaaaattcaaataacactagaggaaatgccaataaaacacagaaagatactggagtaaatgaaaaggcaagagagaaattttatgaggctaaactacagcagcaacagagagagctaaaacaattgcaggaagaaagaaagaaactgattgacattcaggagaaaattcaagcattgcaaacggcatgccctgacttacagctgtcagctgctagtgtgggtaactgtcccaccaaaaaatatatgccagctgttacttcaaccccaactgttaatcaacacgagaccagtacaagcaaatctgtttttgagcctgaagattcttcaatagtagataatgagttgtggtcagaaatgagaagacatgaaatgttgagggaggagctgcgacagagaagaaagcagcttgaagctctgatggctgaacatcagaggaggcaaggtctagctgaaactgcatctccagtggctgtgtcattgagaagtgatggatctgagaacctatgtactcctcagcaaagtagaacagaaaaaacgatggcaacttggggagggtctacccagtgtgcactagatgaagaaggagatgaagacggttacctttctgaaggaattgttcggacagatgaagaggaggaagaagagcaagatgccagttccaatgataacttttctgtgtgtccttctaacagtgtgaatcataactcctacaatggaaaggaaactaaaaataggtggaagaacaattgccctttttcggcagatgaaaattatcgtcctttagccaagacaaggcaacagaatatcagcatgcaacggcaagaaaaccttcgttgggtgtcagagctctcttacgtagaagagaaagaacaatggcaagaacaaatcaatcagctaaagaaacagcttgattttagtgtcagtatttgtcagactttgatgcaagaccagcagactctatcttgtctgctacaaactcttctcacgggtccttacagtgttatgcccagcaatgttgcatctcctcaagtacacttcataatgcaccagttgaaccagtgctatactcagctaacatggcaacagaataatgttcagaggttgaaacaaatgctaaatgaacttatgcgccagcaaaatcagcatccagaaaaacctggaggcaaggaaagaggcagtagtgcatcgcaccctccttctcccagtttattttgtcctttcagctttccaacacagcctgtaaatctcttcaatatacctggatttactaacttttcatcatttgcaccaggtatgaatttcagccctttatttccttctaattttggagatttttctcagaatatctctacacccagtgaacagcagcaacccttagcccagaattcttcaggaaaaacagaatatatggcttttccaaaaccttttgaaagcagttcctctattggagcagagaaaccaaggaataaaaaactgcctgaagaggaggtggaaagcagtaggacaccatggttatatgaacaagaaggtgaagtagagaaaccatttatcaagactggattttcagtgtctgtagaaaaatctacaagtagtaaccgcaaaaatcaattagatacaaacggaagaagacgccagtttgatgaagaatcactggaaagctttagcagtatgcctgatccagtagatccaacaacagtgactaaaacattcaagacaagaaaagcgtctgcacaggccagcctggcatctaaagataaaactcccaagtcaaaaagtaagaagaggaattctactcagctgaaaagcagagttaaaaacatcaggtatgaaagtgccagtatgtctagcacatgtgaaccttgcaaaagtaggaacagacattcagcccagactgaagagcctgttcaagcaaaagtattcagcagaaagaatcatgagcaactggaaaaaataataaaatgtaataggtctacagaaatatcttcagaaactgggagtgatttttccatgtttgaagctttgcgagatactatttattctgaagtagctacattaatttctcaaaatgaatctcgtccacattttcttattgaactcttccatgagctgcagctactaaacacagactacttgagacagagggctttatatgcattgcaggacatagtatccagacatatttctgagagccatgaaaaaggagaaaatgtaaagtcagtaaactctggtacttggatagcatcaaactcagaacttactcctagtgagagccttgctactactgatgatgaaacttttgagaagaactttgaaagagaaacccataaaataagtgagcaaaatgatgctgataatgctagtgtcctgtctgtatcatcaaattttgagccttttgcaacagatgatctaggtaacaccgtgattcacttagatcaagcattagccagaatgagagaatatgagcgtatgaagactgaggctgaaagtaactcaaatatgagatgcacctgcaggattattgaggatggagatggtgctggtgcaggtactacagttaataatttagaagaaactcccgttattgaaaatcgtagttcacaacaacctgtaagtgaagtttctaccatcccatgtcctagaattgatactcagcagctggaccggcaaattaaagcaattatgaaagaagtcattccttttttgaaggagcacatggatgaagtatgctcctcgcagcttctaacttcagtaaggcgcatggttttgacccttacccagcaaaatgatgagagcaaagagtttgtaaagttctttcataaacaacttggaagtatattacaggattcactggcaaaatttgctggcagaaaactgaaagactgtggagaagatcttcttgtagagatatctgaagtgttgttcaatgaattggctttctttaagcttatgcaagatttggataataatagtataactgttaaacagagatgcaaaaggaaaatagaagcaactggagtgatacaatcttgtgccaaagaggctaaaaggattcttgaagatcatggctcacctgctggagagattgatgatgaagacaaagacaaggatgaaactgaaacagttaagcagactcaaacatctgaggtgtatgatggtcccaaaaatgtaagatctgatatttctgatcaagaggaagatgaagaaagtgaaggatgtccagtgtctattaatttgtctaaagctgaaactcaggctttaactaattatggaagtggagaagatgaaaatgaggatgaagaaatggaagaatttgaagaaggccctgtggatgtccagacttccctccaggctaacactgaagctactgaagaaaatgaacatgatgaacaggtcctacaacgtgactttaaaaagacagcagaaagcaaaaatgtcccattggaacgagaagccactagtaaaaatgaccaaaataactgtcctgtgaaaccctgttacctcaatatcttggaagatgagcaacctttaaatagtgctgcccataaggagtcacctcctactgttgattcaactcaacagcctaaccctttgccgttacgtttacctgaaatggaacccttagtgcctagagtcaaagaagttaaatctgctcaggaaactcctgaaagctctctggctggaagtcctgatactgaatctccagtgttagtgaatgactatgaagcagaatctggtaatataagtcaaaagtctgatgaagaagattttgtaaaagttgaagatttaccactgaaactgacaatatattcagaggcagatctaagaaagaaaatggtagaagaagaacagaaaaaccatttatctggtgaaatatgtgaaatgcagaccgaagaattagctggaaattctgagacactaaaagaacctgaaacggtgggagcccagagtatatgagatgtcttcagaggctcatctaactctgtccttacatactcaatgcatatatgaaaacaatactaaataaacatctgatctgtataaaaatgtaaattagtttgacactgcttttttgataggtgtggtcatttctccccatggtagtttaaaacatcagaaactgaattctggacagatttaagccttgacacactgtgtttttttttttttcccccttcttttttgggtcttcatttttttccccattgtgatgtttggtaacgaatttaaaatgtagttttaaataaagtttggacttatctataaagtatcttttttggaaattatattgaattctatacagcaagtcaatgttttatataactttaggctgctcagagaagagcaatggttaagagttagttagagaaatatattatttgttataaagcccatccattaggccagtcttccaactaatgccagtgttgctgctgttgggtctgatgttcttcttttagatacctgcaggtcctattcctgtgcaagaatagggcagattatcaagatatccaggatacctatgaagttattatagaatatttattaatccattgaaattggataataagtttagaacataggttctcagtatctagaacttacatcattatcatctgtttgttaggatttgaaattctggaaaatatttatctacatcgcctcagactaaaagtaaaaaaaataagctttatataattagggagatttctgcacagagaagtaacattgtggttaattttaaatgaaaaacttaactttttcaagtggggataaataatacaactaaatttctgtaatagtaagattctgtatgccttcagataaacttgcctattgagatggtaatttaaagccaaagcatagcagtttcttttgtgtgtagtgaggttgaagcagatttgcaggtgaagtattgaaagtttatgtgactttaagtcagcttttgaaaagtgattgatttgctttttatcccaaactgtccatatacccagtaaggcttcaaaaaaccagtcaacaatgagtaagtcaatcttatagattcttcttcctcgaataaaatacaaagaattagttccaataagtattttaactttgttaacaactgaaataccccataaaaaaagaacttgttgagagtatttctttaaaatggttacttgctgcccaggcaccatggctcactcctgtaatcccagcaccttgggaggccgaggcgggcagatcacgaggtcaagagattgagaccatcctgcccaacatgggggaaaccccgtctctactaaaaataaaaaaattagctgggagaggtggcacgtgcctgtagtcctagctacttgggaggctaaggcaggagaatagcctgaacccgggaggtggaggttgcaggttgcagtgagccgagatcatgccactgcactccagcctggcaacagagcgagactctgtctcaaaaaaaaaaaaaaaaaaaaaaaaaagttaacttgctgtatacctcagtgtaatgtccattcaaggagtattaaatgaggatttccctgcgaggacatttactgtattgctacttaaattatggaagacaatatatcttcaactttaataaaacctattcagaaaattaccaattcagaattcggagttcttatccaggtgctctaactaacttcagggaaattggaacaataagttatgttacatgcacactcaaattctttattttctccactttaagcaggaaagggtaaaaactgttttggtactcaagcccagccttacatactgtgtttctctctctgtctgcatgcatattaaagtggaaaaattgtatttatatcttagttattaccatagtacctatgaaccttatcaaaattgcttatttgactggtgttacagctgctattaatctaagtctattgtttttctattttagtagataatttagttttaaaatacgtagggtttgagagcagatatatttatttaatctgttttctctagtaactattgctgaagggttaggcattcagtattcctatttgtcctaattttgaagttaaaaattttggttacagatagatagagggagaaaagttcaaaatgagtgagagagaactttatgcaggttgagataatgcctaaaataatgagctggccagactgtggaggtactctttgtattttgtaacattgactttgggtaaatgctttttcactgttaataaatatatatcctgtat

SEQ ID NO: 341456 - DNA, 1590 bp, Artificial Sequence
  derived and/or modified sequence
atggccacagggggtggccctttcgaagatggaatgaatgaccaggatctccctaactggtcgaatgaaaacgtagatgatcgtctaaataacatggactggggcgcacaacagaaaaaggcaaataggagcagtgagaagaataaaaaaaaattcggcgtggaaagtgacaaaagagtcactaatgatatcagccctgagagctctcctggagttggtagacgacgaactaagactccacacacatttccacatagcagatatatgagccagatgtctgtcccggagcaggctgagctcgagaagttaaagcagcgcatcaacttctcagacttagaccagagatcgatcggttctgacagccagggcagggccacagctgcaaataataagcggcaactttcagaaaatcgcaagccatttaattttctccccatgcagataaatacaaacaaaagcaaagacgcaagcactaacccccctaatagagagactattggctccgctcagtgtaaggagctgtttgcctctgcactgtcgaacgatctactccagaattgccaggtttcagaggaagacgggagaggggaaccagccatggaatcctcccaaatcgtctcccgcctcgtgcaaatcagggactacattaccaaggcaagtagtatgagagaagatctggtcgagaagaatgagcggagtgcaaacgtcgagaggctgacacacctgatcgaccacctgaaggagcaggaaaaaagctatatgaaattcttaaaaaagatcttggctagggaaaacgaagaagaggacgtcagaactatagattccgcggtcggctctggctccgtggccgaaagtacgtctttaaatatcgatgtgcagagtgaggcaagcgacacaacagcgagagacccccagcaggagccgatggaagagattgagaatctaaaaaagcagcacgacctcttaaagcgcatgctgcagcagcaggagcagcttagggctctgcaggggcgacaggccgctttgctcgcacttcagcacaaggctgagcaggccattgccgtgatggatgacagtgtggtggcagaaacagccggatctcttagcggagtctctatcacctccgagctgaacgaggaacttaacgacctgattcagcgttttcataatcagctacgcgacagccagcccccagccgttccggataataggagacaagccgaatccctgagtttgacccgagaggtatctcagagccgtaaaccatctgcgagtgagagactacctgacgagaaggtggaactctttagcaaaatgagagtactacaggagaaaaagcagaagatggacaagcttttgggcgagctacacactctccgagatcagcacctgaacaattctagctcatccccccagaggtcggtggaccaaagaagcacaagtgctcctagcgcctcagtggggctggcaccagtggttaatggggagagcaattccctgacgtcctctgtaccatacccaactgcttcgttagtaagccagaatgaatcagagaacgaaggccatttaaaccccagcgaaaagttgtag

SEQ ID NO: 341457 - DNA, 1590 bp, Artificial Sequence
  derived and/or modified sequence
atggccaccggcggcggccccttcgaggacggcatgaacgaccaggacctgcccaactggagcaacgagaacgtggacgacagactgaacaacatggactggggcgcccagcagaagaaggccaacagaagcagcgagaagaacaagaagaagttcggcgtggagagcgacaagagagtgaccaacgacatcagccccgagagcagccccggcgtgggcagaagaagaaccaagaccccccacaccttcccccacagcagatacatgagccagatgagcgtgcccgagcaggccgagctggagaagctgaagcagagaatcaacttcagcgacctggaccagagaagcatcggcagcgacagccagggcagagccaccgccgccaacaacaagagacagctgagcgagaacagaaagcccttcaacttcctgcccatgcagatcaacaccaacaagagcaaggacgccagcaccaacccccccaacagagagaccatcggcagcgcccagtgcaaggagctgttcgccagcgccctgagcaacgacctgctgcagaactgccaggtgagcgaggaggacggcagaggcgagcccgccatggagagcagccagatcgtgagcagactggtgcagatcagagactacatcaccaaggccagcagcatgagagaggacctggtggagaagaacgagagaagcgccaacgtggagagactgacccacctgatcgaccacctgaaggagcaggagaagagctacatgaagttcctgaagaagatcctggccagagagaacgaggaggaggacgtgagaaccatcgacagcgccgtgggcagcggcagcgtggccgagagcaccagcctgaacatcgacgtgcagagcgaggccagcgacaccaccgccagagacccccagcaggagcccatggaggagatcgagaacctgaagaagcagcacgacctgctgaagagaatgctgcagcagcaggagcagctgagagccctgcagggcagacaggccgccctgctggccctgcagcacaaggccgagcaggccatcgccgtgatggacgacagcgtggtggccgagaccgccggcagcctgagcggcgtgagcatcaccagcgagctgaacgaggagctgaacgacctgatccagagattccacaaccagctgagagacagccagccccccgccgtgcccgacaacagaagacaggccgagagcctgagcctgaccagagaggtgagccagagcagaaagcccagcgccagcgagagactgcccgacgagaaggtggagctgttcagcaagatgagagtgctgcaggagaagaagcagaagatggacaagctgctgggcgagctgcacaccctgagagaccagcacctgaacaacagcagcagcagcccccagagaagcgtggaccagagaagcaccagcgcccccagcgccagcgtgggcctggcccccgtggtgaacggcgagagcaacagcctgaccagcagcgtgccctaccccaccgccagcctggtgagccagaacgagagcgagaacgagggccacctgaaccccagcgagaagctgtag

SEQ ID NO: 341458 - protein, 408 aa, Artificial Sequence
  derived and/or modified sequence
MATGGGPFEDGMNDQDLPNWSNENVDDRLNNMDWGAQQKKANRSSEKNKKKFGVESDKRVTNDISPESSPGVGRRRTKTPHTFPHSRYMSQMSVPEQAELEKLKQRINFSDLDQRSIGSDSQGRATAANNKRQLSENRKPFNFLPMQINTNKSKDASTNPPNRETIGSAQCKELFASALSNDLLQNCQVSEEDGRGEPAMESSQIVSRLVQIRDYITKASSMREDLVEKNERSANVERLTHLIDHLKEQEKSYMKFLKKILARDPQQEPMEEIENLKKQHDLLKRMLQQQEQLRALQGRQAALLALQHKAEQAIAVMDDSVVAETAGSLSGVSITSELNEELNDLIQRFHNQLRDSQPPAVPDNRRQAESLSLTREVSQSRKPSASERLPDEKVELFSKMRVLQEKKQ

SEQ ID NO: 341459 - protein, 375 aa, Artificial Sequence
  derived and/or modified sequence
MKVWLLLGLLLVHEALEDVTGQHLPKNKRPKEPGENRIKPTNKKVKPKIPKMKDRDSANSAPKTQSIMMQVLDKGRFQKPAATLSLLAGQTVELRCKGSRIGWSYPAYLDTFKDSRLSVKQNERYGQLTLVNSTSADTGEFSCWVQLCSGYICRKDEAKTGSTYIFFTEKGELFVPSPSYFDVVYLNPDRQAVVPCRVTVLSAKVTLHREFPAKEIPANGTDIVYDMKRGFVYLQPHSEHQGVVYCRAEAGGRSQISVKYQLLYVAVPSGPPSTTILASSNKVKSGDDISVLCTVLGEPDVEVEFTWIFPGQKDERPVTIQDTWRLIHRGLGHTTRISQSVITVEDFETIDAGYYICTAQNLQGQTTVATTVEFS

SEQ ID NO: 341460 - DNA, 1128 bp, Artificial Sequence
  derived and/or modified sequence
atgaaagtttggttgctgctgggactactgctggtacatgaggcgctggaagatgttacaggtcaacatttaccaaaaaataaacgacctaaagagccgggagaaaaccggataaagcctaccaacaagaaggttaagccaaaaatccccaagatgaaagacagggactctgcgaactctgctccgaaaacgcagtccattatgatgcaggttctcgataaaggacggttccaaaagcccgcggctaccctctccctcctggccggccaaaccgtggaattaagatgtaaaggcagccgcataggctggagctatccagcttatctggacacattcaaggatagcaggctcagcgtgaagcagaacgagcgatacggacaactgaccctggtgaacagcacatccgctgataccggagagttctcctgttgggtacagctctgttccggttacatttgtagaaaggacgaagctaaaacaggctcaacctacatttttttcactgaaaaaggtgagttattcgtaccgtctcctagttatttcgacgtggtgtatctcaaccccgaccgacaggccgtggtaccttgccgagtcacagtcctgtctgcgaaggtaacattgcatcgggagtttccagcgaaggagatacctgctaacggcaccgacatagtttacgacatgaagagaggtttcgtctatctgcagcctcattccgagcaccaaggggttgtgtattgtcgtgcagaagccggcggaagatcccagatctccgtcaaataccagctcttatacgtggcagtgcctagcggcccacctagcacgaccattctcgcgtcttctaataaggttaaatccggagacgatatttcagtcctgtgcacagtgctcggcgagccggatgtcgaagtggagtttacttggattttccctggtcaaaaagatgagagacctgtgaccattcaagacacctggaggctgatccacaggggactgggtcataccacccggatcagccagagcgtgataaccgtagaggatttcgaaacaattgacgcaggttattacatctgcactgctcagaacttgcagggacagacaaccgtggccacaactgtggaattcagctag

SEQ ID NO: 341461 - DNA, 1128 bp, Artificial Sequence
  derived and/or modified sequence
atgaaggtgtggcttttgcttggattattgctggtccacgaggcgctggaggacgtgaccggacagcatctacccaagaataaacggcccaaggagcccggcgagaaccgaatcaaacctaccaacaaaaaggtaaagcccaagatcccaaagatgaaggatcgggactccgccaactccgctcctaagacacagagcattatgatgcaagtcctggacaagggacgatttcagaagcctgcagccacactttcactgcttgccggccagactgtagaactacggtgcaaaggaagtaggatcgggtggtcttaccccgcctatctcgatacatttaaagattctcggctatccgtgaaacaaaacgagagatatggccagttgacgttggtgaattctacctccgccgacactggcgaattcagctgttgggtccaattatgttcagggtacatttgtcggaaggacgaggcgaaaacgggatctacttacatattcttcactgaaaagggggagctctttgtgcccagccctagttatttcgatgttgtgtacttgaatcccgacaggcaggctgtagtcccttgccgggtgactgtactgagtgccaaggtgaccctgcatagagaattcccagcaaaagaaattccagcaaacgggacggacattgtgtacgacatgaaacgagggttcgtctatctgcagcctcacagcgagcaccagggtgtggtatactgtcgagcagaagcgggtggcaggtcgcagatctcagttaaatatcagcttctttacgtggccgtgccctcagggcccccctccaccacgattcttgcctcttctaacaaggttaagagtggagatgatataagcgtgctgtgcacagttctgggagagccggacgtggaggtcgaattcacatggatcttccctggccagaaggatgagagaccagttacaatccaggatacctggaggctaattcaccggggtctgggacatactactcgcatctcccagagcgtcatcacggtcgaagatttcgaaacaatcgacgccgggtattacatttgcacagcccaaaatctacaggggcagacaactgtagcaaccactgtggaattctcttag

SEQ ID NO: 341462 - DNA, 1128 bp, Artificial Sequence
  derived and/or modified sequence
atgaaagtgtggctccttctgggtctgcttctcgtccacgaggccctcgaggacgtgaccggacagcatcttcctaaaaataagcgccctaaggaaccaggtgaaaaccgcattaagcccaccaataaaaaagtgaaaccgaaaatcccaaagatgaaggaccgagattccgcaaattcagcacctaagacgcaatccattatgatgcaggtgctggacaagggtcggttccagaaaccagctgccactctcagtctcttggctggtcagaccgtggaactacgctgcaaagggagtcggattggttggtcttatccggcctatctggacactttcaaggattctcggttatcagtgaaacaaaatgagagatatggtcagcttacgctggtgaattcaacgtctgccgacacaggtgaattttcatgctgggtgcagctttgtagcggctacatatgtcgtaaggacgaggcaaaaacaggctccacctacattttcttcactgagaaaggagagctttttgtgccgagcccttcctactttgatgttgtgtacctcaaccctgaccggcaagctgtggtaccgtgccgggtaactgttctgtctgccaaggtaacactgcacagggagttccctgccaaagaaatccccgccaatggcaccgatatagtgtacgacatgaaacgcggatttgtgtacctgcaaccacattccgagcaccagggggtcgtatactgtcgcgcggaggccggcgggaggtcccaaatctcagtcaagtatcagctgctgtatgttgccgtgccttcagggcccccatccacaaccatactggcgagctccaataaagtgaaatccggagacgacatatctgtcctctgcacggtgctcggcgagccagatgtggaggtcgagttcacttggatcttccccggccagaaagacgaacgccctgtgactattcaagatacctggagattgatacatagaggacttggccatacgacccggatatcccagtcagttattaccgtcgaggacttcgagaccattgatgccggatattacatctgtacagcacaaaatctccagggtcagacaactgtggcaactaccgtggagtttagttag

SEQ ID NO: 341463 - DNA, 1128 bp, Artificial Sequence
  derived and/or modified sequence
atgaaggtgtggctgctgctgggcctgctgctggtgcatgaggccctggaggatgtgacaggccagcacctgcccaagaacaagaggcccaaggagcctggagaaaatcgcatcaagcccaccaacaagaaggtgaagcccaagatccccaagatgaaggaccgggacagcgccaacagcgcccccaagacccagagcatcatgatgcaggtgctggacaagggccgcttccagaagccagctgccaccctgagcctgctggccggccagacagtggagctgcgctgcaagggcagcagaattggctggagctacccagcctacctggacaccttcaaggacagccggctgtctgtgaagcagaatgaaagatatggccagctgaccctggtgaacagcaccagcgctgacaccggggagttcagctgctgggtgcagctgtgcagcggctacatctgcaggaaggatgaggccaagacaggcagcacctacatcttcttcacagagaagggggagctgtttgtgcccagccccagctactttgatgtggtgtacctgaacccagaccggcaggccgtggtgccctgccgggtgacagtgctgagcgccaaggtgaccctgcaccgggagttccctgccaaggagatcccagccaatggaacagacatcgtgtatgacatgaagaggggctttgtgtacctgcagccccacagcgagcaccagggcgtggtgtactgcagagctgaggccggcggccgcagccagatctctgtgaagtaccagctgctgtatgtggccgtgcccagcggcccccccagcaccaccatcctggccagcagcaacaaggtgaagtctggagatgacatctctgtgctgtgcaccgtgctgggggagccagatgtggaggtggagttcacctggatcttccctggccagaaggatgagaggcctgtgaccatccaggacacctggaggctcatccaccggggcctgggccacaccacccgcatcagccagagcgtcatcaccgtggaggactttgagaccattgatgctggctactacatctgcacagcccagaacctgcagggccagaccaccgtggccaccaccgtggagttctcctag

SEQ ID NO: 341464 - DNA, 1128 bp, Artificial Sequence
  derived and/or modified sequence
atgaaggtgtggctgctgctgggcctgctgctggtgcacgaggccttggaggacgtgaccggccagcatcttcccaaaaataagcggcccaaagagcccggcgagaacagaatcaagcccactaataagaaggtaaaaccaaaaatccccaaaatgaaagaccgtgatagcgcgaattccgccccaaagacccagtctatcatgatgcaggtcttggataaaggtcggtttcagaagcctgcagcaacactttccctgctggccggccagacggtcgagcttaggtgcaaggggtccaggatcggatggagctacccggcctaccttgacacattcaaagactcacgactctccgtaaagcagaacgaaaggtacggccagctgacactggtgaattccacctcagcggacaccggagagttcagttgctgggtccagctgtgcagcggctatatttgccggaaagacgaagccaagactggatctacctacatattctttaccgagaagggagaacttttcgtaccatccccaagctactttgacgtggtctatctgaaccccgacaggcaagctgtggtcccctgccgagttactgtgctgtcggccaaggtgacacttcaccgggagttcccagcaaaggagatccctgcaaatggaactgacattgtttatgatatgaaacgaggattcgtgtacctccagcctcatagcgaacaccagggcgttgtgtattgcagagcggaggcaggcgggcgctcccagatttccgttaagtatcagttgctttatgtggcggtgccgtctggaccccctagcacgacaattctcgcttccagtaacaaggtgaaatccggcgacgacatatcagtcctatgcactgttctgggcgaacccgacgtcgaggtggagtttacttggatttttccgggtcagaaggacgaaaggcccgttacaatccaggacacgtggcggctgatccaccgtggcttggggcacacaactcgcatatcacagtctgtgatcacggtcgaagactttgagaccattgatgccggttactatatctgtaccgcccagaacttacaggggcagaccaccgtggcaactaccgtggagttttcctag

SEQ ID NO: 341465 - DNA, 1128 bp, Artificial Sequence
  derived and/or modified sequence
atgaaggtgtggctgctgctgggcctgctgctggtgcacgaggccctagaggacgtgaccgggcagcatttgcctaaaaataagcgtcctaaagagcccggagagaaccggatcaagcctaccaataagaaagtgaaaccaaaaatcccgaaaatgaaggaccgggactccgccaattctgcccctaaaacacaaagtattatgatgcaagttctcgacaaggggcgattccagaagccagcagctaccttgagcctcctggcaggacagacagtggagctcagatgcaaagggagccgcattggttggtcgtatcccgcctatcttgataccttcaaggacagtagactgtccgttaagcaaaacgaacgctatggtcagctgactcttgtcaatagcaccagcgctgatactggagaattcagctgttgggtgcagttatgtagtggctatatctgtaggaaggatgaagccaagaccggatcgacatatatttttttcaccgaaaaaggcgagcttttcgtcccctctccctcttactttgatgttgtctatctgaatccagatcggcaagcagtcgtaccttgtcgtgtcacggtgctgtctgccaaagtcacattgcaccgggagtttccagctaaggagattccagctaacggcacggatattgtctacgatatgaagagggggttcgtataccttcaaccacatagcgagcaccagggagtggtttactgccgcgcagaggcgggcggcaggagccagattagcgtgaaataccagctgctgtacgtggctgttcctagcgggcctccaagtactaccattctggctagctctaataaggtgaagtcaggggatgatatctccgttctatgtaccgtgttgggtgagcccgacgtggaagtggaattcacctggatatttcccggccagaaagacgaaaggccagtgaccatccaggacacttggaggctgattcaccgcggactggggcatacaacacgcattagtcaaagtgtgattactgtcgaggactttgagaccatcgatgcaggctattacatctgcacagctcagaacctgcaggggcagacgacagtggcaaccactgtcgagttcagctag

SEQ ID NO: 341466 - DNA, 1128 bp, Artificial Sequence
  derived and/or modified sequence
atgaaggtgtggctgctgctgggcctgctgctggtgcacgaggccctggaagatgtcaccgggcagcatcttcccaagaacaaaaggccaaaggagcccggtgaaaaccgtatcaaacccacaaacaagaaggttaagcctaaaatcccaaaaatgaaagatagagattccgccaacagcgccccaaaaacacagtccattatgatgcaggtcctcgacaaaggcaggtttcagaaacctgcagctacactgtccctgctggcgggccaaaccgtggagctgagatgcaagggttcccggatcgggtggtcttacccagcctatttggacacatttaaagattcgcggctgtctgtcaaacagaacgagcgctacggacagctgaccctggtgaactcaaccagtgctgatactggcgagttttcatgttgggtccagctttgtagtggctacatttgccgaaaggatgaagccaaaacagggtctacctacatctttttcactgagaagggagagctgttcgtgccctcaccttcatactttgatgtggtgtacctgaatccagaccgccaggcggtcgtaccatgtcgcgtcactgtgttaagtgccaaggtgaccttgcatcgtgaatttcccgctaaggagatcccagccaacggcacggatattgtgtacgacatgaagaggggtttcgtttacctgcagccacactccgagcatcagggcgtggtatattgccgggcggaagcaggaggtcgtagccagatctcggtgaaatatcaactcctgtacgtcgctgtcccttcagggcccccatcaaccaccattctcgccagctctaacaaggtgaaatctggcgatgatatcagcgtgctttgtactgtgttgggcgagcccgacgtggaggtagagttcacctggatcttccccggacaaaaggacgaacgccccgtgactatccaggatacttggagacttattcacagaggcctagggcatactactcgcattagtcaatctgtgataactgtggaggactttgagacaatcgatgctgggtactatatttgcacagcacagaatctgcaagggcagaccaccgtcgccacaaccgttgagttctcatag

SEQ ID NO: 341467 - DNA, 1875 bp, Artificial Sequence
  derived and/or modified sequence
acttctgccttgttatcagaggagcgaggatgtggcctgtgtgccgcctaatcatgcctagaactgtctgcacctgctgatcttttgcttctgcgaactggctgcacctgctgttctcctgctcataccctagcccgtgcttaccctaattccctgttctcctgcctcaccaccagaggcccgggttgtctgcacagtctcattttccacgttattcctgtaatgaacccgtcctcccacccccaccagcagttacagggctgggtgcggagaccaactctggccagacacagaggagcagcaagaacccggggcaacggtcctaaaccgaatcctcccgcttcggcgtcccaggagcccgcccctcgcccgccgcctcccctgcgtccccgccccgcgcagccgccgcgctcctgcgctccgaggtccgaggttcccgagatgaaggtctggctgctgcttggtcttctgctggtgcacgaagcgctggaggatgttactggccaacaccttcccaagaacaagcgtccaaaagaaccaggagagaatagaatcaaacctaccaacaagaaggtgaagcccaaaattcctaaaatgaaggacagggactcagccaattcagcaccaaagacgcagtctatcatgatgcaagtgctggataaaggtcgcttccagaaacccgccgctaccctgagtctgctggcggggcaaactgtagagcttcgatgtaaagggagtagaattgggtggagctaccctgcgtatctggacacctttaaggattctcgcctcagcgtcaagcagaatgagcgctacggccagttgactctggtcaactccacctcggcagacacaggtgaattcagctgctgggtgcagctctgcagcggctacatctgcaggaaggacgaggccaaaacgggctccacctacatcttttttacagagaaaggagaactctttgtaccttctcccagctacttcgatgttgtctacttgaacccggacagacaggctgtggttccttgtcgggtgaccgtgctgtcggccaaagtcacgctccacagggaattcccagccaaggagatcccagccaatggaacggacattgtttatgacatgaagcggggctttgtgtatctgcaacctcattccgagcaccagggtgtggtttactgcagggcggaggccgggggcagatctcagatctccgtcaagtaccagctgctctatgtggcggttcccagtggccctccctcaacaaccatcttggcttcttcaaacaaagtgaaaagtggggacgacatcagtgtgctctgcactgtcctgggggagcccgatgtggaggtggagttcacctggatcttcccagggcagaaggatgaaaggcctgtgacgatccaagacacttggaggttgatccacagaggactgggacacaccacgagaatctcccagagtgtcattacagtggaagactttgagacgattgatgcaggatattacatttgcactgctcagaatcttcaaggacagaccacagtagctaccactgttgagttttcctgacttggaaaaggaaatgtaatgaacttatggaaagcccatttgtgtacacagtcagctttggggttccttttattagtgctttgccagaggctgatgtcaagcaccacaccccaaccccagcgtctcgtgagtccgacccagacatccaaactaaaaggaagtcatccagtctattcacagaagtgttaacttttctaacagaaagcatgattttgattgcttacctacatacgtgttcctagtttttatacatgtgtaaacaattttatataatcaatcatttctattaaatgagcacgtttttgt

SEQ ID NO: 341468 - DNA, 1495 bp, Artificial Sequence
  derived and/or modified sequence
cctgcgtccccgccccgcgcagccgccgcgctcctgcgctccgaggtccgaggttcccgagatgaaggtctggctgctgcttggtcttctgctggtgcacgaagcgctggaggatgttactggccaacaccttcccaagaacaagcgtccaaaagaaccaggagagaatagaatcaaacctaccaacaagaaggtgaagcccaaaattcctaaaatgaaggacagggactcagccaattcagcaccaaagacgcagtctatcatgatgcaagtgctggataaaggtcgcttccagaaacccgccgctaccctgagtctgctggcggggcaaactgtagagcttcgatgtaaagggagtagaattgggtggagctaccctgcgtatctggacacctttaaggattctcgcctcagcgtcaagcagaatgagcgctacggccagttgactctggtcaactccacctcggcagacacaggtgaattcagctgctgggtgcagctctgcagcggctacatctgcaggaaggacgaggccaaaacgggctccacctacatcttttttacagagaaaggagaactctttgtaccttctcccagctacttcgatgttgtctacttgaacccggacagacaggctgtggttccttgtcgggtgaccgtgctgtcggccaaagtcacgctccacagggaattcccagccaaggagatcccagccaatggaacggacattgtttatgacatgaagcggggctttgtgtatctgcaacctcattccgagcaccagggtgtggtttactgcagggcggaggccgggggcagatctcagatctccgtcaagtaccagctgctctatgtggcggttcccagtggccctccctcaacaaccatcttggcttcttcaaacaaagtgaaaagtggggacgacatcagtgtgctctgcactgtcctgggggagcccgatgtggaggtggagttcacctggatcttcccagggcagaaggatgaaaggcctgtgacgatccaagacacttggaggttgatccacagaggactgggacacaccacgagaatctcccagagtgtcattacagtggaagactttgagacgattgatgcaggatattacatttgcactgctcagaatcttcaaggacagaccacagtagctaccactgttgagttttcctgacttggaaaaggaaatgtaatgaacttatggaaagcccatttgtgtacacagtcagctttggggttccttttattagtgctttgccagaggctgatgtcaagcaccacaccccaaccccagcgtctcgtgagtccgacccagacatccaaactaaaaggaagtcatccagtctattcacagaagtgttaacttttctaacagaaagcatgattttgattgcttacctacatacgtgttcctagtttttatacatgtgtaaacaattttatataatcaatcatttctattaaatgagcacgtttttgt

SEQ ID NO: 341469 - DNA, 1905 bp, Artificial Sequence
  derived and/or modified sequence
acttctgccttgttatcagaggagcgaggatgtggcctgtgtgccgcctaatcatgcctagaactgtctgcacctgctgatcttttgcttctgcgaactggctgcacctgctgttctcctgctcataccctagcccgtgcttaccctaattccctgttctcctgcctcaccaccagaggcccgggttgtctgcacagtctcattttccacgttattcctgtaatgaacccgtcctcccacccccaccagcagttacagggctgggtgcggagaccaactctggccagacacagaggagcagcaagaacccggggcaacggtcctgtgaaaaccgaatcctcccgcttcggcgtcccaggagcccgcccctcgcccgccgcctcccctgcgtccccgccccgcgcagccgccgcgctcctgcgctccgaggtccgaggttcccgagatgaaggtctggctgctgcttggtcttctgctggtgcacgaagcgctggaggatgttactggccaacaccttcccaagaacaagcgtccaaaagaaccaggagagaatagaatcaaacctaccaacaagaaggtgaagcccaaaattcctaaaatgaaggacagggactcagccaattcagcaccaaagacgcagtctatcatgatgcaagtgctggataaaggtcgcttccagaaacccgccgctaccctgagtctgctggcggggcaaactgtagagcttcgatgtaaagggagtagaattgggtggagctaccctgcgtatctggacacctttaaggattctcgcctcagcgtcaagcagaatgagcgctacggccagttgactctggtcaactccacctcggcagacacaggtgaattcagctgctgggtgcagctctgcagcggctacatctgcaggaaggacgaggccaaaacgggctccacctacatcttttttacagagaaaggagaactctttgtaccttctcccagctacttcgatgttgtctacttgaacccggacagacaggctgtggttccttgtcgggtgaccgtgctgtcggccaaagtcacgctccacagggaattcccagccaaggagatcccagccaatggaacggacattgtttatgacatgaagcggggctttgtgtatctgcaacctcattccgagcaccagggtgtggtttactgcagggcggaggccgggggcagatctcagatctccgtcaagtaccagctgctctatgtggcggttcccagtggccctccctcaacaaccatcttggcttcttcaaacaaagtgaaaagtggggacgacatcagtgtgctctgcactgtcctgggggagcccgatgtggaggtggagttcacctggatcttcccagggcagaaggatgaaaggcctgtgacgatccaagacacttggaggttgatccacagaggactgggacacaccacgagaatctcccagagtgtcattacagtggaagactttgagacgattgatgcaggatattacatttgcactgctcagaatcttcaaggacagaccacagtagctaccactgttgagttttcctgacttggaaaaggaaatgtaatgaacttatggaaagcccatttgtgtacacagtcagctttggggttccttttattagtgctttgccagaggctgatgtcaagcaccacaccccaaccccagcgtctcgtgagtccgacccagacatccaaactaaaaggaagtcatccagtctattcacagaagtgttaacttttctaacagaaagcatgattttgattgcttacctacatacgtgttcctagtttttatacatgtgtaaacaattttatataatcaatcatttctattaaatgagcacgtttttgtaaaaaataaaaagtgggataagtgtt

SEQ ID NO: 341470 - DNA, 1128 bp, Artificial Sequence
  derived and/or modified sequence
atgaaggtgtggctgttgcttggcctcctgctagtacacgaggccttggaggacgtgaccggccagcatctccctaagaacaagcgccctaaagaacccggagaaaaccgcattaaacccacaaataagaaggtgaagcccaagatccccaagatgaaagatcgcgacagcgcaaactccgccccaaagacccagtccataatgatgcaggtgcttgataaaggaaggttccagaagccagccgcaacactcagtttgctggccggacaaacagtggagctgcggtgtaaaggctctcgaatcggttggagttacccagcctacctggatacattcaaagactcccggctgtcagtgaaacagaatgaacgctatggccaactgactctggtgaactcgacatccgctgacaccggggagtttagttgctgggtccaactctgttctggttatatctgccgaaaggatgaggctaagacgggcagcacttacatcttcttcacagaaaagggagaattgtttgtgccttcaccctcctactttgacgtggtttatctgaatcctgacagacaagccgtcgtcccatgcagggtgacagtgctgagtgctaaggtcaccctgcacagagagttccctgcaaaggagattcccgctaatggcacggatatcgtttatgatatgaaacgcggttttgtgtacctgcagcctcactctgagcatcagggcgtggtctattgccgggctgaggcaggcggaagaagccagatctctgtgaagtaccaactgttgtatgtggccgtgcctagtggaccacctagcaccacaattctagcaagttctaataaggtgaagtctggcgatgacatttccgttctgtgcaccgtgctgggcgaaccagacgtagaagtggagttcacatggatattccctggccagaaggatgagcggcctgtaaccatccaggatacctggaggctcattcacagaggattggggcacactactaggatttctcaatcggtgattaccgtcgaggacttcgaaaccattgatgcaggctactacatttgtacagcacagaatttgcagggtcaaaccacagtggcaacaacggtggagttttcgtag

SEQ ID NO: 341471 - DNA, 1128 bp, Artificial Sequence
  derived and/or modified sequence
atgaaggtgtggctgctgctgggcctcctacttgtgcacgaggcccttgaagacgtcactggccagcatctgcccaagaacaagcgccctaaagaacctggtgagaacagaatcaaaccaaccaacaagaaagtcaaaccaaagatcccgaagatgaaagatcgtgattccgccaacagtgcgcctaagacacagtcaattatgatgcaggtactagacaagggcagattccagaagccagcagccaccttgtctctgctcgccggacagacagtggagcttaggtgtaagggatcccggatcgggtggagctatcccgcttatctggacacattcaaagattccaggttaagtgtcaaacagaatgaacggtatggccagcttaccctggtgaattcgacatccgctgacacaggcgaattctcctgttgggtccaactgtgcagcggatacatttgtagaaaggatgaggctaagactggttccacctatatctttttcaccgagaaaggtgagctgtttgtcccctccccctcttacttcgatgttgtctatctgaatccagatcgccaagcagttgttccatgccgggtgaccgtactcagcgccaaggtcacactacaccgagaattccctgccaaggagatccccgctaacggaacggacatcgtgtacgatatgaagcggggattcgtgtacctccaaccgcactctgaacaccagggcgtggtgtactgccgggctgaagccggaggcagaagccaaatcagcgtaaagtaccagctgctgtacgtcgcagttcccagcggacctccctctactaccatcctggcatcttctaacaaagtcaaatcgggggacgacattagtgtgttgtgtacagtgcttggtgagcccgatgtcgaggtggaatttacatggatctttcctgggcaaaaggacgagcgtccagtcacgatccaggatacttggaggttaatccacaggggcttaggccacaccaccagaatatcccagagcgttatcacggttgaagacttcgaaaccatcgatgcaggttactatatttgcacagcccagaatctgcagggccagacaaccgtggccacgactgtagaattctcttag

SEQ ID NO: 341472 - DNA, 1128 bp, Artificial Sequence
  derived and/or modified sequence
atgaaagtttggttattactgggcctgctcctcgtacacgaggccctcgaggatgtgactggtcaacacctgcctaaaaataagaggcccaaggaaccgggagaaaataggatcaagccaactaacaagaaggttaagccgaagataccaaagatgaaggacagagactctgcaaactccgctccaaagactcagtccattatgatgcaggtactggataagggcaggtttcagaagcctgcggctaccctcagtctgcttgccggacaaacagtagagttgaggtgcaaagggtcccgaatagggtggagttacccagcttacttggatacctttaaggactcacgcttgtctgtgaaacagaatgagagatatggacagcttacactagtgaatagtacttctgctgatacgggggagttttcatgttgggtgcagctgtgttcaggatacatatgccgcaaagacgaagccaagactggcagtacttacatcttttttacagagaagggggagctctttgtaccttcaccaagttacttcgacgttgtgtatctcaaccccgatcgacaagcggtggttccatgtcgagtgaccgtgctgtcggccaaagtgacactgcacagggagtttccggctaaagagatccctgccaatgggacagatatcgtgtacgacatgaaacgagggtttgtgtatctgcaaccacactccgagcatcaaggagtagtttactgcagggcagaggctggaggaagatcccaaatatccgtcaaataccaactgctatacgtggccgtgccaagtggtccgcctagcaccaccatactggccagctccaacaaagtgaagtcaggagatgacattagcgtgctatgtactgttctgggagaaccagacgtcgaagtggagttcacttggatcttccccggacagaaagatgaacgacctgtgacaattcaagacacctggcggctgattcatcgcggactggggcatactactaggatctctcaaagcgtaatcaccgtggaggactttgaaacaatagacgctggctattacatatgcacagcccagaatctccaggggcagactacggttgcaacgacagttgagttctcatag

SEQ ID NO: 341473 - DNA, 1128 bp, Artificial Sequence
  derived and/or modified sequence
atgaaggtgtggctgctgctgggcctgctgctggtgcacgaggccctggaggacgtgaccggccagcacctgcccaagaacaagagacccaaggagcccggcgagaacagaatcaagcccaccaacaagaaggtgaagcccaagatccccaagatgaaggacagagacagcgccaacagcgcccccaagacccagagcatcatgatgcaggtgctggacaagggcagattccagaagcccgccgccaccctgagcctgctggccggccagaccgtggagctgagatgcaagggcagcagaatcggctggagctaccccgcctacctggacaccttcaaggacagcagactgagcgtgaagcagaacgagagatacggccagctgaccctggtgaacagcaccagcgccgacaccggcgagttcagctgctgggtgcagctgtgcagcggctacatctgcagaaaggacgaggccaagaccggcagcacctacatcttcttcaccgagaagggcgagctgttcgtgcccagccccagctacttcgacgtggtgtacctgaaccccgacagacaggccgtggtgccctgcagagtgaccgtgctgagcgccaaggtgaccctgcacagagagttccccgccaaggagatccccgccaacggcaccgacatcgtgtacgacatgaagagaggcttcgtgtacctgcagccccacagcgagcaccagggcgtggtgtactgcagagccgaggccggcggcagaagccagatcagcgtgaagtaccagctgctgtacgtggccgtgcccagcggcccccccagcaccaccatcctggccagcagcaacaaggtgaagagcggcgacgacatcagcgtgctgtgcaccgtgctgggcgagcccgacgtggaggtggagttcacctggatcttccccggccagaaggacgagagacccgtgaccatccaggacacctggagactgatccacagaggcctgggccacaccaccagaatcagccagagcgtgatcaccgtggaggacttcgagaccatcgacgccggctactacatctgcaccgcccagaacctgcagggccagaccaccgtggccaccaccgtggagttcagctag

SEQ ID NO: 341474 - protein, 282 aa, Artificial Sequence
  derived and/or modified sequence
MDFSFSFMQGIMGNTIQQPPQLIDSANIRQEDAFDNNSDIAEDGGQTPYEATLQQGFQYPATTEDLPPLTNGYPSSISVYETQTKYQSYNQYPNGSANGFGAVRNFSPTDYYHSEIPNTRPHEILEKPSPPQPPPPPSVPQTVIPKKTGSPEIKLKITKTIQNGRELFESSLCGDLLNEVQASEHTKSKHESRKEKRKKSNKHDSSRSEERKSHKIPKLEPEEQNRPNERVDTVSEKPREEPVLKEEAPVQPILSSVPTTEVSTGVKFQVGDLVWSKVGTYP

SEQ ID NO: 341475 - DNA, 78 bp, Artificial Sequence
  derived and/or modified sequence
atggacttcagcttcagcttcatgcagggcatcatgggcaacaccatccagcagcccccccagctgatcgacagctag

SEQ ID NO: 341476 - DNA, 48 bp, Artificial Sequence
  derived and/or modified sequence
atggacttcagcttcagcttcatgcagggcatcatgggcaacacctag

SEQ ID NO: 341477 - DNA, 78 bp, Artificial Sequence
  derived and/or modified sequence
atggatttctcattctcttttatgcagggaataatggggaataccatacagcaaccaccccaacttattgactcttag

SEQ ID NO: 341478 - DNA, 48 bp, Artificial Sequence
  derived and/or modified sequence
atggatttttctttctcgtttatgcagggaattatgggcaacacctag

SEQ ID NO: 341479 - DNA, 78 bp, Artificial Sequence
  derived and/or modified sequence
atggacttctccttctccttcatgcagggcatcatgggcaacaccatccagcagcccccccagctgattgacagctag

SEQ ID NO: 341480 - DNA, 48 bp, Artificial Sequence
  derived and/or modified sequence
atggacttctccttctccttcatgcagggcatcatgggcaacacctag

SEQ ID NO: 341481 - DNA, 78 bp, Artificial Sequence
  derived and/or modified sequence
atggacttcagcttcagcttcatgcagggcatcatgggcaacaccatccagcagccaccacagctgattgattcatag

SEQ ID NO: 341482 - DNA, 78 bp, Artificial Sequence
  derived and/or modified sequence
atggactttagcttcagctttatgcagggcataatgggaaataccattcagcagcccccacagctgatcgactcttag

SEQ ID NO: 341483 - DNA, 48 bp, Artificial Sequence
  derived and/or modified sequence
atggatttcagcttctcgtttatgcagggaattatggggaacacctag

SEQ ID NO: 341484 - DNA, 600 bp, Artificial Sequence
  derived and/or modified sequence
atgagcaagagcgcggtgaagatttcactggatctgctgagtaatccactgtgtgagcaggaccaagacctgcttaacatggttactgcactagacaccgcgatgaaaaggatggatgcttttaaccaggaaaaagtgaatcaaattcagaaaacagttatcgagcccttgaaaaagttcgggtcggtctttccctccttaaacatggccgtcaagagacgagaacaagcattacaagactaccggcgcctccaggccaaggttgagaaatacgaggagaaggagaagaccgggcctgttctggccaagctccatcaggccagggaggagctcaggcccgtcagagaagacttcgaggctaagaacagacagcttctcgaagagatgcctcgcttttacgggtcaagactggactactttcagccatctttcgagtcccttatacgagcccaagtggtgtactatagcgaaatgcataaaatcttcggcgatctgagccaccagctggatcagcctgggcattcagatgagcagagagagcgggagaatgaagccaaattgtccgagttgagggctctgagcatcgtcgcggacgactag

SEQ ID NO: 341485 - DNA, 600 bp, Artificial Sequence
  derived and/or modified sequence
atgagcaagtctgctgtgaagatcagcctggacctgctgagcaaccccctgtgtgagcaggaccaggacctgctgaacatggtgacagccctggacacagccatgaagaggatggatgccttcaaccaggagaaggtgaaccagatccagaagacagtcatcgagcccctgaagaagtttggcagcgtcttccccagcctgaacatggctgtgaagagaagagagcaggccctgcaggactaccgccgcctgcaggccaaggtggagaagtatgaggagaaggagaagacaggccctgtgctggccaagctgcaccaggcccgggaggagctgcggcctgtgcgggaggactttgaggccaagaaccggcagctgctggaggagatgccccgcttctacggcagccggctggactacttccagcccagctttgagagcctcatccgggcccaggtggtgtactacagcgagatgcacaagatctttggagacctgagccaccagctggaccagcccggccacagtgatgagcagcgggagcgggagaatgaggccaagctgtctgagctgcgggccctgagcatcgtggctgatgactag

SEQ ID NO: 341486 - DNA, 600 bp, Artificial Sequence
  derived and/or modified sequence
atgagcaagagcgccgtgaagatcagcctggacctgctgagcaaccccctatgcgagcaggatcaagatctgttgaatatggtgactgcattagataccgcgatgaagaggatggatgcattcaaccaggagaaggtgaatcagatccagaaaaccgtgatcgagccactgaaaaagttcgggagtgtgttccctagccttaatatggcagtcaaacggagagagcaagcgctgcaggattatcgccgtctgcaagccaaggtggaaaaatacgaggaaaaggaaaaaactggtccagtcctcgccaaactccatcaggctagagaggaacttcgcccagtgcgggaagacttcgaggctaaaaacagacagctgctcgaagagatgccccggttctacggttcaagactcgattactttcagccatcattcgaaagcctgatcagggctcaggttgtctactattccgaaatgcacaaaatcttcggagacttgagccaccaactagatcaacctggacacagcgatgagcagcgagagagagaaaacgaggcaaaactgagtgagctgagagccctgtcgatagtggcagatgattag

SEQ ID NO: 341487 - DNA, 600 bp, Artificial Sequence
  derived and/or modified sequence
atgtccaagtccgcggtgaagatatcactggatctgctatctaacccactttgtgagcaggatcaggatttgctgaacatggtcacagccctggacacagcaatgaagcggatggacgcgtttaaccaggagaaagttaaccagattcagaaaaccgtgatcgagccactgaagaaattcgggagtgtgttcccttctctaaacatggctgttaagagaagggaacaagccctccaagattaccggaggctccaggcaaaagttgagaaatatgaagagaaagaaaagacagggccagtgctggccaaactgcaccaagcccgtgaggaactgcgacccgtgcgggaagacttcgaggccaaaaaccgacaattgctggaagagatgcccagattctatggctcccgattggattattttcaaccctccttcgaatccctcatcagggcacaggttgtgtactacagcgaaatgcacaaaatctttggagatctttcgcaccagctcgaccagccaggccatagcgacgagcaaagggagagggaaaatgaggctaaactgtcagagctcagggcccttagcatcgtggcggatgactag

SEQ ID NO: 341488 - DNA, 600 bp, Artificial Sequence
  derived and/or modified sequence
atgagcaagagcgccgtgaagatcagcctggacctgctgagcaaccccctgtgcgagcaggaccaggacctgctgaacatggtgaccgccctggacaccgccatgaagagaatggacgccttcaaccaggagaaggtgaaccagatccagaagaccgtgatcgagcccctgaagaagttcggcagcgtgttccccagcctgaacatggccgtgaagagaagagagcaggccctgcaggactacagaagactgcaggccaaggtggagaagtacgaggagaaggagaagaccggccccgtgctggccaagctgcaccaggccagagaggagctgagacccgtgagagaggacttcgaggccaagaacagacagctgctggaggagatgcccagattctacggcagcagactggactacttccagcccagcttcgagagcctgatcagagcccaggtggtgtactacagcgagatgcacaagatcttcggcgacctgagccaccagctggaccagcccggccacagcgacgagcagagagagagagagaacgaggccaagctgagcgagctgagagccctgagcatcgtggccgacgactag

SEQ ID NO: 341489 - DNA, 8370 bp, Artificial Sequence
  derived and/or modified sequence
atgcccagcgacgccaaggacagcgtgaacggcgacctgctgctgaactggaccagcctgaagaacatcctgagcggcctgaacgccagcttccccctgcacaacaacaccggcagcagcaccgtgaccaccagcaagagcatcaaggaccccagactgatgagaagagaggagagcatgggcgagcagagcagcaccgccggcctgaacgaggtgctgcagttcgagaagagcagcgacaacgtgaacagcgagatcaagagcacccccagcaacagcgccagcagcagcgaggtggtgcccggcgactgcgccgtgctgaccaacggcctggacaccccctgcttcaagaccagcgtgaacgacagccagagctgggcccacaacatgggcagcgaggactacgactgcatcccccccaacaaggtgaccatggccggccagtgcaaggaccagggcaacttcagcttccccatcagcgtgagcaacgtggtgagcgaggtggagaaccagaaccacagcgaggagaaggcccagagagcccagcaggagagcggcaacgcctacaccaaggagtacagcagccacatcttccaggacagccagagcagcgacctgaagaccatctaccagaccggctgccagaccagcaccgtgttccccctgaagaagaaggtgagcatcgacgagtacctgcagaacaccggcaagatgaagaacttcgccgacctggaggacagcagcaagcacgaggagaagcagaccagctggaaggagatcgacaacgacttcaccaacgagaccaagatcagccccatcgacaactacatcgtgctgcaccaggagtacaaggagagcgagagccacaacagcttcggcaagagctgcgacaagatcctgatcacccaggagctggagatcaccaagagcagcaccagcaccatcaaggacaaggacgagctggaccacctggccctggagtggcagatcacccccagcttcgagagcctgagccagaagcacccccagcacagcgtggagtacgagggcaacatccacaccagcctggccatcgcccagaagctgatggagctgaagctgggcaagatcaaccagaactacgccagcatcatcaccgaggccttccccaagcccaaggacatcccccaggccaaggagatgttcatcgacaccgtgatcagcagctacaacatcgagaccgcccacgacagcagcaactgcagcatcaccagagagcacatctgcgtgcacagaaagaacgagaacgagcccgtgagcctggagaacatccagagagactacaaggagaccgcctacgtggaggacagaggccaggaccacaacctgttctgcaacagccagctgagcaacgacatctggctgaacgtgaacttcaagaagcagaccgacagagagaaccagaacgaggccaaggagaacagcgccagctgcgtggagaacaacatcgagaacatctacggcgacaagaagcaggacagccacaccaacgagaacttcagcaacatcgacgagaaggaggacaagaactaccacaacatcgagatcctgagcagcgaggagttcagcaccaagttcaacctgatctgcagagaggacaacgccgtgagcgccgccaccgccctgctggagagcgaggaggacaccatcagcgccgtgaagcagaaggacaccgagaacaccggcagaagcgtggagcacctggccagcaccaccttccccaagaccgccagcagcagcgtgtgcgtggccagcaacgccgccatccagatcgccagcgccaccatgcccgccctgagcctgaacaacgacgaccaccagatctaccagttcaaggagacctgcagcagcgagagccccgacttcggcctgctggtgaagcacagagtgagcgactgcgagatcgacaccgacaagaacaagagccaggagagcttccaccagagcatcaacgagaacctggtgctgcagagcatcgagctggagagcgagatcgagatcgagctggaggactgcgacgacgccttcatcttccagcaggacacccacagccacgagaacatgctgtgcgaggagttcgtgaccagctacaaggccctgaagagcagaatcagctgggagggcctgctggccctggacaacggcgagatggaggtgctggagagcaccaccggcagagagaacagcgaccagcactacagcaaggagagcaactacttctacagcagcacccagaacaacgagaccgagctgaccagccccatcctgctgcccgacctgcagatcaagatcaccaacatcttcagacccggcttcagccccaccgccgacagcctggccctgaaggacagcttctgcacccacgtgaccgaggccaccaagcccgagatcaacaaggaggacggcgagatcctgggcttcgacatctacagccagcccttcggcgagaacgccgactacccctgcgaggacaaggtggacaacatcagacaggagagcggccccgtgagcaacagcgagatcagcctgagcttcgacctgagcagaaacaccgacgtgaaccacaccagcgagaaccagaacagcgagagcctgttcaccgagcccagcaacgtgaccaccatcgacgacggcagcagatgcttcttcaccaagagcaagaccgactacaacgacaccaagaacaagaaggaggtggagagcagaatcagcaagagaaagctgcacatcagcagcagagaccagaacatcccccacaaggacctgagaagacacaagatctacggcagaaagagaagactgaccagccaggacagcagcgagtgcttcagcagcctgagccagggcagaatcaagaccttcagccagagcgagaagcacatcaagagcgtgctgaacatcctgagcgacgaggccagcctgtgcaagagcaagtgcctgagcagaaagctggacaaggccgtggtgcacctgaagaaggcccacagaagagtgcacaccagcctgcagctgatcaccaaggtgggcgaggagagaaagggccccctgcccaagagctacgccatcatctgcaacaacttctgggagagctgcgacctgcagggctacagcagcgtgagccagagaaagtactacagcaccaagcacttcagcagcaagagaaagtacgacaagagaagaaagaagagagcccccaaggccgacatcagcaagagcctgacccacgtgagcaagcacaagagctacaagaccagcggcgagaagaagtgcctgagcagaaagagcatggccagcagcgtgagcaagagccaccccaccaccagccacatgggcgagttctgcaaccaggagcaccccgagagccagctgcccgtgagcagcaccagccagagcaccagccagagcgtgtactacaacagcagcgtgagcaaccccagcctgagcgaggagcaccagcccttcagcggcaagaccgcctacctgttcagccccgaccacagcgacgagaagctgatcgagaaggagaaccagatcgacaccgccttcctgagcagcaccagcaagtacgagaagctggagaagcacagcgccaaccacaacgtgaaggacgccaccaaggagaacagctgcgacgccaacgaggtgatcaacgagagcaacagcgtgagcctgagctgcatcaaggagaacatcaacagcagcaccggcaacgactgcgacgccacctgcatcggccacaccaaggccaagaccgacgtgctgatcagcgtgctggacagcaacgtgaagcacttcctgaacgacctgtaccagcagggcaacctgatcctgagcgactgcaagagaaacctggaggtgaagtggaccgaccccatcgagagacccaagcagaacatcatcaccggcaacttcctgatgggccccctgaacctgaccctgatcgccagcaagaagtacagcatcccccagctgagcgccgccgccgtgaccgacagcgagggcgagagcagcaagagctacctggacaagcagagaatcctgaccgtggacagcttcgccgccagcagcaccgtgccccactgcgagcagagctgcagagagaaggagctgctgaagaccgagcagtgcagcagcggcaactgcctgcacaccgacggcaacgagaccaacgtgaccgagaactacgagctggacgtggccagcggcaccgaggaggacaagagctacggcgagaacatcgtggagctgagcagcagcgacagcagcctgctgctgaaggacaacgtgaagggcagcagcagcgagacctgcatcgtgaagaaggacaccgaggacagaatcacctggaaggtgaagcaggccgagaaggccaaggacagcgtgtacaagagaagcatgaccgagggcagcaccgtgaacaccgagtacaagaaccagaagaaccagatcagcgaggagagctgcctgaacgagaagatcatcaccaccaacctgatcgacagccacctgagcaccaagaacaccaccaccgagagcgtgcccctgaagaacaccgtgagcaaccccctgaacaagagagagaagaagggcgagatcaaggtgagcaaggacagccagagcgacctgaccctgcacagcgagatcgcctacatcagcaagcccggcatcctgggcgtgaaccacacccccatcctgcccgcccacagcgagacctgcaaggtgcccaccctgctgaagaagcccgccagctacgtgagcgacttcaaggagaagcactgcagcgccaaccacaccgccctgatcgccaacctgagccagatcctgcagagagccgacgaggccagcagcctgcagatcctgcaggaggagaccaaggtgtgcctgaacatcctgcccctgttcgtggaggccttcgagagaaagcaggagtgcagcgtggagcagatcctgatcagcagagagctgctggtggaccagaacctgtggaacaactgcaagcacaccctgaagccctgcgccgtggacaccctggtggagctgcagatgatgatggagaccatccagttcatcgagaacaagaagagacacctggagggcgagcccaccctgagaagcctgctgtggtacgacgagaccctgtacgccgagctgctgggcaagcccagaggcttccagcagcagagcaacttctaccccggcttccagggcagactgaagtacaacgccttctgcgagctgcagacctaccacgaccagctggtggagctgctggaggagaccaagagagagaagaacagctactacgtgttcctgaagtacaagagacaggtgaacgagtgcgaggccatcatggagcactgcagcgactgcttcgacttcagcctgagcgtgcccttcacctgcggcgtgaacttcggcgacagcctggaggacctggagatcctgagaaagagcaccctgaagctgatcaacgtgtgcggcgacagccccaaggtgcacagctaccccggcaagcaggaccacctgtggatcatcatcgagatgatcagcagcaaggtgaacttcatcaagaacaacgaggccgtgagagtgaagatcagcctgtacggcctggagcacatcttcttcgacgccgccaagaacctggtgtggaaggagagaacccagagcttcagcaagaagtacagccagaagaaggacgaggagagactgctgagagtgaacaagtgcgccttcagcaagctgcagaagatctacgacaccctgagcaaggacctgaacaacgagcccatcagccccatcggcctggaggaggacaccatcatcgccagcagaaagagcgaccaccccatcaacgaggccaccatcagcatcgagaacagcaagttcaacagcaacctgctggcccaccccgacatctgctgcatcagcgagatcctggaccaggccgagttcgccgacctgaagaagctgcaggacctgaccctgagatgcaccgaccacctggagatcctgaagaagtacttccagatgctgcaggacaacaacatggacaacatcttcatcaccgaggagaacgtgctggacgtggtgatcaaccacagccacgaggccatcatcctgaagcccgaggccatcgagatgtacatcgagatcgtgatggtgagcgagaccatccacttcctgaagaacagcatcgccaagaagctggacaagcagagattcagaggcatgctgtggttcgacctgagcctgctgcccgagctggtgcagtgccaggagaagatggccagcttcagcttcctgaaggacaacagcaccgacgtgtgcctgtggaaggtgatcgagaccgccgtgagcgagctgaagaaggacctggacatcatctgcaagtacaacgaggccgtgaactgcagctacgccatccacctgctgagcagagagctgcaggagctgagcgagatcaagaagctgctgaagaagagcaagtacttcatcagcacctacatcgacttcgtgccctacatcgccagcatcaactacggcagcaccgtgaccgagctggagtacaactacaaccagttcagcaccctgctgaagaacgtgatgagcgcccccagaaaggacctgggcaagatggcccacatcagaaaggtgatgaagaccatcgagcacatgaagatgatctgcaccaagaacgccgagctgaccatcagcttcttcctgtgccagatgctgtacaacagaagaaagatcctgcagctgaagagaaaggagaagatgaacatccacatcgtgaagcccggcgagaacaacaacaagttcagcatcagcaccatgctgccccccgtgagcgagtgcatcaacaagaacatcagcaacagcagcaagaagagacccagcaccgtggacaagtgcgaggacagccaggagcagcagcaggacaccaccgtgagcagctgcaagaagctgaaggtggacatgaaggacgtgaccaagatcaacagagagaaggccaccttcaagcaccccagaaccaccggcagccaccccaagagcgagaacaagatcgtgcccagcagctgcgacagcctgaagagaaaccacctgacccccaagaaggtggagatgcagagaagcctgcccggcagcctgctgcccctggagaaccccaaggacacctgcgccagcaagagcgagagcaagatcgacctgaccgtgagcagcgaccacttcagcggccagcaggagaacctgaacagcatgaagaagagaaacgtgaacttcagcgccgccgagaccaagagcgacaagaaggactgcgccgccttcgccatctgcgaccagaagagcgtgcacggcaccttcagccccgaccacggcaccctgctgcagaagttcctgaagaacagccccgaccccacccagaagagctgcctgagcgacatcaaccccgagaccgacgtgagcctggtgcccgacgccagcgtgctgagcaagcccatcttctgcttcgtgaaggacgtgcaccccgacctggagatgaacgacaccgtgttcgagctgcaggacaacgacatcgtgaacagcagcatcaagaacagcagctgcatgaccagccccgagcccatctgcatccagaacaagatccccaccctgcagatcaacaagctgcagcccaccgagaccgagagcgaggacaagtacatgaaggacaccctgaaccccaacaccgtgcacaccttcggcgccagcggccacatcaccctgaacgtgaaccagggcgccgagtacagcctgagcgagcagcagaacgacaagaacagcaaggtgctgatgcagaacgccgccacctactggaacgagctgccccagagcgcctgcaaccccacctacaacagcagcgagcacctgttcggcaccagctacccctacagcgcctggtgcgtgtaccagtacagcaacagcaacggcaacgccatcacccagacctaccagggcatcaccagctacgaggtgcagcccagccccagcggcctgctgaccaccgtggccagcaccgcccagggcacccacagcaacctgctgtacagccagtacttcacctacttcgccggcgagccccaggccaacggcttcgtgcccgtgaacggctacttccagagccagatccccgccagcaacttcagacagcccatcttcagccagtacgccagccaccagcccctgccccaggccacctacccctacctgcccaacagattcgtgccccccgaggtgccctgggtgtacgccccctggcaccaggagagcttccaccccggccactag

SEQ ID NO: 341490 - DNA, 8370 bp, Artificial Sequence
  derived and/or modified sequence
atgccatccgacgccaaagattcagttaacggtgatctgctcctgaattggacaagtctgaagaatatcctctctgggctcaatgccagtttccctcttcacaacaacactggttccagtaccgtcactactagcaagtctatcaaagacccacggctgatgaggcgggaggagtccatgggggaacagagcagcaccgctggacttaatgaggttctgcagttcgagaaatccagcgacaatgttaactctgagattaaaagtacaccctctaattcagcctcttcctccgaggttgtgccgggagattgcgctgtgcttaccaacggtctggatactccttgtttcaagacatctgttaacgatagccaaagctgggcgcataatatgggctcagaagactatgactgtatacccccaaacaaggtcacaatggccggccagtgcaaagaccagggcaattttagttttcctatcagtgtgtcaaatgtggtttcagaggtggaaaatcagaaccacagcgaggaaaaagctcaaagggcacagcaagagtcagggaacgcatacaccaaggaatattcaagccacattttccaggattcgcaatcatcagacttgaagacgatctaccaaactggatgtcagacaagtacagtctttcctttgaagaagaaagtgtccatagacgagtacctgcagaatactggaaaaatgaagaactttgcagatctcgaggatagttccaagcacgaagaaaaacaaaccagttggaaagagatcgataatgactttactaatgaaactaaaatcagtcctatcgacaattatatcgttttgcaccaggaatacaaagagtccgagtcacataactcttttggaaaatcttgcgataagatcctaatcactcaagaactggaaatcaccaaaagttcaacttccaccattaaggataaggatgaacttgaccacctagccctggaatggcagatcaccccatccttcgagtctctctcccagaagcacccacaacactccgtggagtatgagggtaacattcatacctcattagccattgcccaaaagctcatggaactaaagctgggcaagatcaaccagaactacgcgtcaatcatcacagaagcatttccgaaacccaaggacataccacaggccaaggagatgttcattgacactgtgatttcatcttacaacatcgaaaccgcccacgatagtagtaactgctcgataactcgggagcacatttgcgtgcaccggaaaaacgaaaacgagcctgtgtcattggagaatatccaacgggattacaaggagacggcttacgtagaggatcggggccaggaccataatcttttttgcaactcccagctcagcaatgacatctggctgaacgtgaacttcaagaaacagaccgaccgggagaaccaaaacgaggccaaggaaaattctgccagctgcgttgaaaataacatcgagaacatttacggagataaaaagcaggatagtcataccaacgagaatttctctaacatcgacgaaaaagaggataaaaactaccacaatattgagattctgtcatccgaggaattcagcacaaagtttaatctgatctgccgtgaggacaacgctgtgtcagccgcaacagcgctgcttgagtctgaggaagacactatctcagctgtgaagcagaaagacaccgaaaacacaggccgaagcgttgagcatctcgctagcacgacatttccaaagactgcaagtagctctgtctgtgtagcctccaatgcggctatacagattgcaagcgctacgatgcccgcattatctcttaataacgacgaccatcagatataccaattcaaggagacatgttcgagcgagtctcccgactttggcctccttgtcaaacatcgcgtatcagactgtgaaattgataccgataaaaataaaagccaagaatcctttcaccagagtatcaacgagaacctcgtcctccagtccattgaactcgagtcagagatcgagattgaacttgaggattgtgatgacgccttcattttccagcaggatacccattcccatgagaatatgctctgcgaggaattcgtgaccagctataaggccctgaagtcccgaatttcctgggaaggtcttcttgctctggacaacggcgagatggaagttctagagtctactacagggagagaaaattcagaccagcattattcaaaagaatccaattacttctatagtagcacccagaacaacgagaccgaacttacttcaccgatcctgcttccagacctgcagatcaaaataaccaatatcttccgtcctgggttcagcccaaccgccgattccctcgccctgaaggattccttttgtacacatgtgacggaggcgacgaagccggagatcaataaggaagacggggagatactgggattcgatatttactcacagccctttggtgagaacgcggattacccctgcgaagataaggtggataacatccgccaggagtctgggccagtgagcaatagcgaaatctccctgagctttgatctgtccagaaataccgatgtcaaccacactagtgagaatcaaaattccgagagtctgttcacggaaccgtcgaacgtgaccaccatagacgacggttcgagatgctttttcaccaaatcaaagactgactacaacgatacgaagaataaaaaggaggttgagagcaggatatctaaaaggaagctccatatctccagtcgggaccagaatattccacacaaggacctcagaagacacaagatatacggcaggaaaagaaggctgacatctcaggacagcagtgagtgttttagcagtctgtctcagggtaggattaagacttttagccaaagcgagaaacacataaagagcgtgcttaatatcctgagcgatgaggccagcctgtgcaagtctaagtgcttgtccagaaagctggataaagctgtcgtgcatctcaagaaggcccaccgaagagtacataccagtctccagctgattacgaaagtgggtgaagaaagaaagggccccttacctaagtcatacgcaattatttgcaacaacttctgggaatcatgtgatctgcaggggtattcaagcgtctctcagcggaagtattactccactaagcatttctcttctaaacgcaaatacgacaaaaggcggaagaagcgcgcacccaaggccgatatcagtaagagtctgacacacgtgtcaaaacacaaatcgtacaagacttccggtgagaaaaaatgtctgagtcggaagtctatggctagcagtgtgagcaagagccacccaacgacctcgcacatgggggagttctgcaatcaagaacacccagaaagccagcttcccgtttcttcgacctctcagtctactagccaatcagtttattacaatagttccgtgagtaacccctccctatctgaagaacatcagccgttctcgggcaagacggcttaccttttttcccctgatcattctgacgagaaactgattgagaaagaaaaccagatcgacacagccttcctgtcatcgacgtccaagtatgagaaactcgaaaaacatagtgctaaccacaatgttaaggatgctactaaggagaactcgtgtgatgcaaatgaggtgattaatgagtccaattcagtgtccctctcttgtatcaaggaaaacatcaacagtagcacgggcaatgactgcgatgccacatgcatcgggcacacaaaagccaagaccgatgtactgatctctgtgcttgacagtaatgtcaaacattttctcaatgatttataccagcagggcaacctgatcttgtccgactgcaagcgcaatctggaggtgaaatggactgaccctatagaacgacccaagcaaaacattatcacgggcaattttcttatggggcccctgaacctcactttaatcgcatccaagaaatacagcatcccacaactgtccgctgcagctgtcacagattcagaaggggagagctcaaaaagctatttagataagcagagaattctgacagtggatagctttgcagccagctcaaccgtccctcactgtgagcagtcgtgtcgcgagaaggagctcctgaaaacggaacagtgtagcagcgggaattgcttgcatacggacggtaatgagacgaacgtaacagagaactacgagttggacgtggcttccggtacggaagaggataagtcctatggggaaaatatagtcgaattgtccagctccgactcatccctcctgctgaaagataacgtaaaggggtccagctcagaaacctgtatcgtaaagaaagatactgaagacagaattacttggaaagtcaaacaggctgaaaaggccaaggattccgtgtacaagaggtccatgactgaggggagcactgtgaatacagagtacaaaaatcagaagaaccagatcagtgaagaaagctgcttgaacgagaagattattaccacgaacctgatagattctcatctcagtacaaagaatacaaccaccgagtccgtgccactgaagaacaccgtctctaaccccctgaataagcgcgaaaagaagggggagatcaaagtgagcaaggattctcagagcgacctgacacttcattcagagattgcttacattagcaagccggggattctgggcgtgaatcatacccccatactgcctgcccactccgaaacctgtaaggttccaactctgctcaaaaagccagctagttacgtaagtgatttcaaggaaaaacactgcagcgccaaccacaccgccctgatcgctaacctgtctcagatccttcagcgagccgacgaggcctcttccctacagattctacaggaggagactaaggtgtgcctaaatatacttccactctttgtggaagctttcgagcgtaaacaggagtgtagcgtagagcagatcttgatttcacgcgaactgctcgtggaccagaatctttggaacaactgtaaacatactctgaagccttgcgcggtcgacaccttggtcgagctacagatgatgatggagacaatccaattcatagaaaataaaaagcggcatctcgaaggcgagcccaccttacgctcactgctgtggtacgacgagaccctatatgcagagctgctggggaaacctagggggttccagcaacaatcaaacttttaccccgggtttcagggtagactgaaatataatgcgttttgtgaactacaaacatatcacgatcagctggtcgaactgctggaggaaactaagcgggagaagaatagctactatgtgttccttaaatataaacggcaggtaaatgagtgcgaggccattatggagcactgctctgactgcttcgatttttccctgtctgtccccttcacttgcggggtgaactttggtgatagcctggaggatctggagattctgcggaaatctaccctcaagctgattaacgtctgtggcgactcacccaaggtccatagctaccctggcaaacaggatcatctgtggataatcattgagatgatttccagcaaggttaactttataaagaacaacgaggccgtgcgggtgaagatttctctctatggactggaacacatattcttcgatgccgccaagaacctcgtttggaaagaacggacgcaatcatttagtaaaaagtactcacagaaaaaggacgaagagcggcttctcagagtgaacaagtgtgctttctctaagcttcagaagatctacgataccctcagcaaagatctcaataatgaacccatttctcctattggactagaggaggacacgattatagcttctcggaagagcgaccacccaattaacgaagcaacaatcagcatagaaaactcgaaattcaatagcaacttgcttgcccatcctgacatatgttgtatctcagagatactcgaccaggcggagttcgctgatctgaaaaagctccaggacctgactttgagatgtaccgaccatctggagatactcaaaaaatactttcagatgctccaagataacaacatggataatatattcatcacggaggagaacgtgctcgacgttgtgattaaccactcccacgaggctattattctcaaacctgaagcaatcgagatgtacattgagatagtcatggtctccgaaaccattcatttcctgaaaaattcaattgcgaagaagctggataaacagaggttcaggggcatgctctggtttgatctctctctgcttcctgaactcgttcaatgtcaggagaagatggcatcctttagtttcctcaaagacaactcaacagacgtgtgtctgtggaaggttattgaaaccgccgtgtcagagctgaagaaagacttagacattatttgcaaatataacgaagctgtgaactgttcctacgctatccatctgctctccagggagttacaggaactgagcgagatcaagaaacttctcaagaagtctaagtactttatttcaacctacatagacttcgtcccatacatcgcttcaattaactatggctcaacggtcacagagctagagtacaactacaaccagttcagtactctgcttaaaaacgtcatgtctgctcctaggaaggatctcggcaagatggctcacatccggaaggttatgaaaacaatcgaacatatgaaaatgatctgcacaaagaatgccgaactaacaatctctttctttttgtgccagatgctatataataggagaaagatacttcagctgaagaggaaagaaaaaatgaatatccacatcgttaagccaggagagaacaataataagttttcaattagcactatgctaccacccgtgagtgagtgcatcaataagaatatctccaactcctccaagaagagaccatccacggttgacaagtgcgaggactcccaggagcagcaacaggatactacagtgtcctcctgtaaaaaacttaaagtggatatgaaggatgttacaaagataaatcgtgaaaaggccactttcaagcaccctagaacaaccggttcacatcccaagtccgaaaataagatcgtgcctagtagttgcgactcattaaagagaaatcacctaacccccaaaaaggtcgagatgcaacggtctctccccggctctctattgccacttgagaatccgaaggatacgtgcgcctccaagtcagagagcaaaattgacttgaccgtgtcaagcgaccacttctccggtcagcaggagaatttaaattccatgaagaaacgtaacgtgaatttctcggccgctgaaactaagtctgacaaaaaggattgtgcagcatttgccatctgtgatcagaagagcgtgcatggcaccttcagccccgaccacggcaccctgttacagaagtttcttaaaaactcccccgatcctacacaaaagtcatgcctctctgacataaaccccgaaaccgacgtttcactggttcctgatgcaagtgtgctgagtaaaccaatcttctgctttgttaaggacgtacatccagacctcgagatgaacgacacagtgttcgagcttcaggacaatgatatagttaattcctccattaagaactcgtcgtgtatgacatctccggagcccatttgcattcagaataaaatccctactctccagatcaataaactgcagccaacagaaacggagtctgaggacaagtacatgaaagatacactgaatcctaataccgttcacacgtttggcgcctccggacatataaccctcaatgttaaccagggcgctgagtactcgctgagcgaacagcaaaatgacaaaaactcaaaggtcctaatgcagaacgccgccacctattggaatgaattgccacagagtgcatgcaatccgacatataactcgagcgaacatttatttggaacctcctatccctattccgcttggtgcgtctatcagtacagcaattctaatggcaacgcaatcacccagacctaccagggcatcacgtcatacgaggtgcagccgagcccttctggactgctcaccacggtcgccagcactgcccagggcacccattctaacctgctctactcacagtatttcacttattttgccggcgagccccaggccaatggctttgtccctgtgaacggatactttcaaagccagattcctgccagtaatttcagacaaccaatcttttcacagtatgcgagtcatcagccattgccacaggcaacctatccctacctaccaaacaggttcgtgcctccggaggtcccttgggtctacgccccatggcatcaggagtcgtttcatcctggccactag

SEQ ID NO: 341491 - DNA, 8370 bp, Artificial Sequence
  derived and/or modified sequence
atgcccagtgatgccaaggacagcgtgaatggagacctgctgctgaactggaccagcctgaagaacatcctgagcggcctgaatgccagcttccccctgcacaacaacacaggcagcagcacagtgaccaccagcaagagcatcaaggacccccggctgatgagaagagaggagagcatgggagagcagagcagcacagctggcctgaatgaggtgctgcagtttgagaagagcagtgacaacgtgaacagcgagatcaagagcacccccagcaacagcgccagcagcagcgaggtggtgcctggggactgtgctgtgctgaccaacggcctggacaccccctgcttcaagacctctgtgaatgacagccagagctgggcccacaacatgggctctgaagattatgactgcatcccccccaacaaggtgaccatggccggccagtgcaaggaccagggcaacttctccttccccatctctgtgtccaatgtggtgtctgaggtggagaaccagaaccacagcgaggagaaggcccagagggcccagcaggagagcggaaatgcctacaccaaggagtacagcagccacatcttccaggacagccagagcagtgacctgaagaccatctaccagacaggctgccagaccagcaccgtcttccccctgaagaagaaggtgtccattgatgagtacctgcagaacacaggcaagatgaagaactttgctgacctggaggacagcagcaagcatgaggagaagcagacctcctggaaggagattgacaatgacttcaccaatgagaccaagatcagccccatcgacaactacatcgtgctgcaccaggagtacaaggagagcgagagccacaacagctttgggaagagctgtgacaagatcctgatcacccaggagctggagatcaccaagagcagcaccagcaccatcaaggacaaggatgagctggaccacctggccctggagtggcagatcacccccagctttgagagcctgagccagaagcacccccagcacagcgtggagtatgagggcaacatccacaccagcctggccatcgcccagaagctgatggagctgaagctgggcaagatcaaccagaactatgccagcatcatcacagaggccttccccaagcccaaggacatcccccaggccaaggagatgttcatcgacaccgtcatcagcagctacaacattgaaacagcccatgacagcagcaactgcagcatcacccgggagcacatctgtgtgcacaggaagaatgaaaatgaacctgtgtccctggagaacatccagagggactacaaggagacagcctacgtggaggaccggggccaggaccacaacctcttctgcaacagccagctgagcaatgacatctggctgaatgtgaacttcaagaagcagacagaccgggagaaccagaatgaggccaaggagaacagcgccagctgtgtggagaacaacatcgagaacatctacggggacaagaagcaggacagccacaccaatgaaaacttcagcaacattgatgagaaggaggacaagaactaccacaacatcgagatcctgagcagcgaggagttcagcaccaagttcaacctgatctgcagagaagataatgctgtgtctgctgccacagccctgctggagagcgaggaggacaccatctctgctgtgaagcagaaggacacagagaacacaggccgctctgtggagcacctggccagcaccaccttccccaagacagccagcagctctgtgtgtgtggccagcaatgctgccatccagatcgccagcgccaccatgcctgccctgagcctgaacaatgatgaccaccagatctaccagttcaaggagacctgcagcagcgagagcccagactttggcctgctggtgaagcaccgggtgtctgactgtgaaattgacacagacaagaacaagagccaggagagcttccaccagagcatcaatgaaaacctggtgctgcagagcattgagctggagagcgagattgaaattgagctggaggactgtgatgatgccttcatcttccagcaggacacccacagccatgagaacatgctgtgtgaggagtttgtgaccagctacaaggccctgaagagccgcatctcctgggagggcctgctggccctggacaatggagagatggaggtgctggagagcaccaccggccgggagaacagcgaccagcactacagcaaggagagcaactacttctacagcagcacccagaacaatgaaacagagctgaccagccccatcctgctgcctgacctgcagatcaagatcaccaacatcttccggcccggcttcagccccacagctgacagcctggccctgaaggacagcttctgcacccacgtgacagaggccaccaagccagagatcaacaaggaggatggagagatcctgggctttgacatctacagccagccctttggagaaaatgctgactacccctgtgaggacaaggtggacaacatccggcaggagagcggccctgtgagcaacagcgagatcagcctgagctttgacctgagcaggaacacagatgtgaaccacaccagcgagaaccagaacagcgagagcctcttcacagagcccagcaatgtgaccaccattgatgatggcagccgctgcttcttcaccaagagcaagacagactacaatgacaccaagaacaagaaggaggtggagagccgcatcagcaagaggaagctgcacatcagcagccgggaccagaacatcccccacaaggacctgcggcggcacaagatctacggcaggaagaggcggctgaccagccaggacagcagcgagtgcttcagcagcctgagccagggccgcatcaagaccttcagccagagcgagaagcacatcaagtctgtgctgaacatcctgagtgatgaggccagcctgtgcaagagcaagtgcctgagcaggaagctggacaaggctgtggtgcacctgaagaaggcccacagaagagtgcacaccagcctgcagctgatcaccaaggtgggggaggagaggaagggccccctgcccaagagctatgccatcatctgcaacaacttctgggagagctgtgacctgcagggctacagctctgtgtcccagaggaagtactacagcaccaagcacttcagcagcaagaggaaatatgacaagaggaggaagaagagggcccccaaggctgacatcagcaagagcctgacccacgtgtccaagcacaagagctacaagaccagcggggagaagaagtgcctgagcaggaagtccatggccagctctgtgtccaagagccaccccaccaccagccacatgggagagttctgcaaccaggagcaccctgagagccagctgcctgtgagcagcaccagccagagcaccagccagagcgtgtactacaacagctctgtgagcaaccccagcctgtctgaggagcaccagcccttcagcggcaagacagcctacctgttctccccagaccacagtgatgagaagctgattgagaaggagaaccagattgacacagccttcctgagcagcaccagcaaatatgagaagctggagaagcacagcgccaaccacaacgtgaaggatgccaccaaggagaacagctgtgatgccaatgaggtgatcaatgaaagcaacagcgtgtccctgagctgcatcaaggagaacatcaacagcagcactggaaatgactgtgatgccacctgcatcggccacaccaaggccaagacagatgtgctgatctctgtgctggacagcaatgtgaagcacttcctgaatgacctgtaccagcagggcaacctgatcctgagtgactgcaagaggaacctggaggtgaagtggacagaccccatcgagcggcccaagcagaacatcatcaccggcaacttcctgatgggccccctgaacctgaccctgattgccagcaagaagtacagcatcccccagctgtctgctgctgctgtgacagattctgagggggagagcagcaagagctacctggacaagcagaggatcctgactgtggacagctttgctgccagcagcacagtgccccactgtgagcagagctgccgggagaaggagctgctgaagacagagcagtgcagcagcggcaactgcctgcacacagatggaaatgagaccaacgtgacagagaactatgagctggatgtggccagcggcacagaggaggacaagagctatggagagaacatcgtggagctgagcagcagtgacagcagcctgctgctgaaggacaacgtgaagggcagcagcagcgagacctgcatcgtgaagaaggacacagaagatcgcatcacctggaaggtgaagcaggccgagaaggccaaggacagcgtgtacaagaggtccatgacagagggcagcacagtgaacacagagtacaagaaccagaagaaccagatcagcgaggagagctgcctgaatgagaagatcatcaccaccaacctgattgacagccacctgagcaccaagaacaccaccacagaatctgtgcccctgaagaacacagtgagcaaccccctgaacaagcgggagaagaagggggagatcaaggtgtccaaggacagccagagcgacctgaccctgcacagcgagatcgcctacatcagcaagccaggcatcctgggcgtgaaccacacccccatcctgcctgcccacagcgagacctgcaaggtgcccaccctgctgaagaagccagccagctatgtgtctgacttcaaggagaagcactgcagcgccaaccacacagccctgattgccaacctgagccagatcctgcagagagcagatgaggccagcagcctgcagatcctgcaggaggagaccaaggtgtgcctgaacatcctgcccctgtttgtggaggcctttgagaggaagcaggagtgcagcgtggagcagatcctgatcagccgggagctgctggtggaccagaacctgtggaacaactgcaagcacaccctgaagccctgtgctgtggacaccctggtggagctgcagatgatgatggagaccatccagttcatcgagaacaagaagaggcacctggagggggagcccaccctgcggagcctgctgtggtatgatgagaccctgtatgcagagctgctgggcaagccccggggcttccagcagcagagcaacttctacccaggcttccagggccgcctgaagtacaatgccttctgtgagctgcagacctaccatgaccagctggtggagctgctggaggagaccaagcgggagaagaacagctactacgtgttcctgaagtacaagaggcaggtgaatgaatgtgaggccatcatggagcactgcagcgactgctttgacttcagcctgtctgtgcccttcacctgtggggtgaactttggagacagcctggaggacctggagatcctgaggaagagcaccctgaagctgatcaacgtgtgtggggacagccccaaggtgcacagctacccaggcaagcaggaccacctgtggatcatcatcgagatgatcagcagcaaggtgaacttcatcaagaacaatgaggccgtgcgggtgaagatcagcctgtatggcctggagcacatcttctttgatgctgccaagaacctggtgtggaaggagaggacccagagcttcagcaagaagtacagccagaagaaggatgaggagcggctgctgcgggtgaacaagtgtgccttcagcaagctgcagaagatctatgacaccctgagcaaggacctgaacaatgagcccatcagccccatcggcctggaggaggacaccatcatcgccagcaggaagagtgaccaccccatcaatgaggccaccatcagcattgagaacagcaagttcaacagcaacctgctggcccacccagacatctgctgcatcagcgagatcctggaccaggccgagtttgctgacctgaagaagctgcaggacctgaccctgcgctgcacagaccacctggagatcctgaagaagtacttccagatgctgcaggacaacaacatggacaacatcttcatcacagaggagaatgtgctggatgtggtgatcaaccacagccatgaggccatcatcctgaagccagaggccatcgagatgtacattgaaattgtgatggtgtctgagaccatccacttcctgaagaacagcatcgccaagaagctggacaagcagcgcttccggggcatgctgtggtttgacctgagcctgctgcctgagctggtgcagtgccaggagaagatggccagcttctccttcctgaaggacaacagcacagatgtgtgcctgtggaaggtgattgaaacagctgtgtctgagctgaagaaggacctggacatcatctgcaagtacaatgaggccgtgaactgcagctatgccatccacctgctgagccgggagctgcaggagctgtctgagatcaagaagctgctgaagaagagcaagtacttcatcagcacctacatcgactttgtgccctacatcgccagcatcaactacggcagcacagtgacagagctggagtacaactacaaccagttcagcaccctgctgaagaatgtgatgtctgcccccaggaaggacctgggcaagatggcccacatcaggaaggtgatgaagaccatcgagcacatgaagatgatctgcaccaagaatgctgagctgaccatctccttcttcctgtgccagatgctgtacaacagaaggaagatcctgcagctgaagaggaaggagaagatgaacatccacatcgtgaagccaggagagaacaacaacaagttcagcatcagcaccatgctgccccctgtgtctgagtgcatcaacaagaacatcagcaacagcagcaagaagaggcccagcacagtggacaagtgtgaggacagccaggagcagcagcaggacaccaccgtgagcagctgcaagaagctgaaggtggacatgaaggatgtgaccaagatcaaccgggagaaggccaccttcaagcaccccaggaccaccggcagccaccccaagtctgagaacaagatcgtgcccagcagctgtgacagcctgaagaggaaccacctgacccccaagaaggtggagatgcagaggagcctgcccggcagcctgctgcccctggagaaccccaaggacacctgtgccagcaagtctgagagcaagattgacctgactgtgtccagtgaccacttcagcggccagcaggagaacctgaacagcatgaagaagagaaatgtgaacttctctgctgctgagaccaagagtgacaagaaggactgtgccgcctttgccatctgtgaccagaagtctgtgcacggcaccttctccccagaccacggcaccctgctgcagaagttcctgaagaacagcccagaccccacccagaagagctgcctgagtgacatcaaccctgagacagatgtgtccctggtgcctgatgcctctgtgctgagcaagcccatcttctgctttgtgaaggatgtgcacccagacctggagatgaatgacacagtgtttgagctgcaggacaatgacatcgtgaacagcagcatcaagaacagcagctgcatgaccagccctgagcccatctgcatccagaacaagatccccaccctgcagatcaacaagctgcagcccacagaaacagaaagtgaggacaagtacatgaaggacaccctgaaccccaacacagtgcacacctttggagccagcggccacatcaccctgaatgtgaaccagggcgctgagtacagcctgtctgagcagcagaatgacaagaacagcaaggtgctgatgcagaatgctgccacctactggaatgagctgccccagagcgcctgcaaccccacctacaacagcagcgagcacctgtttggcaccagctacccctacagcgcctggtgtgtgtaccagtacagcaacagcaatggaaatgccatcacccagacctaccagggcatcaccagctatgaggtgcagcccagccccagcggcctgctgaccaccgtggccagcacagcccagggcacccacagcaacctgctgtacagccagtacttcacctactttgctggggagccccaggccaacggctttgtgcctgtgaatggctacttccagagccagatcccagccagcaacttccggcagcccatcttcagccagtatgccagccaccagcccctgccccaggccacctacccctacctgcccaacagatttgtgcccccagaggtgccctgggtgtatgccccctggcaccaggagagcttccaccctggccactag

SEQ ID NO: 341492 - DNA, 8370 bp, Artificial Sequence
  derived and/or modified sequence
atgcccagcgacgccaaggacagcgtgaacggcgacctgctgctgaactggacctcactcaagaatatcctctcaggccttaacgctagttttcctcttcataacaacaccggaagtagtacagtaacaactagcaagagcattaaagatccaagactgatgcgcagggaagaatccatgggcgagcaatcaagcacggctggtttgaacgaggtgctccaattcgaaaaatctagcgataacgtaaattcggagatcaagtcaactccttctaactccgccagctcttcagaggtggtaccaggcgattgcgctgtgctcactaatggcctcgacacaccttgttttaagacctctgttaacgactctcagtcatgggctcataatatggggagtgaagattacgattgcataccaccaaacaaagtgaccatggcgggtcagtgcaaggatcaaggcaacttttctttccccatctcagtcagcaatgttgtgagcgaggtggaaaatcaaaaccattccgaggagaaggcccagcgagcacaacaggagtctggtaatgcctacaccaaagaatacagtagccatatctttcaggattcccagtcttctgatctgaagacaatttatcagacagggtgccagacatcgaccgtgttccctctgaagaaaaaagttagcatcgatgagtatctgcagaataccgggaagatgaagaactttgctgacctagaagatagctccaaacacgaagaaaagcagacatcctggaaagagattgataatgactttaccaacgaaacgaagatcagtcctatagacaattatattgtgctccaccaggagtataaagaatctgagagccataattcctttggaaagagctgcgataagattctgatcacccaagagctcgaaattactaaaagtagtacgtctacaattaaggacaaggacgaactcgatcatctggcccttgagtggcaaatcacacctagcttcgaatcattatcacagaaacatcctcaacattcggtggaatatgagggcaacatccatacgagcttagctattgcccagaagctaatggaactcaagctgggcaaaatcaatcagaattacgctagtatcattaccgaagcgtttccaaagcctaaagacataccccaggccaaagaaatgttcatcgacaccgtgattagctcttataacattgagacagcacacgatagcagcaattgttccatcaccagggaacacatctgcgtacatagaaagaatgaaaatgagccagtgtctctcgagaatatccagagggactacaaggagacagcttacgttgaggatcggggccaggatcacaacctcttttgcaattcgcagctgtcaaacgacatctggctgaatgtcaatttcaagaagcagactgacagagagaaccagaacgaagcaaaagagaatagcgcttcctgtgtggaaaacaatatcgagaatatttacggcgacaagaagcaggattcacacaccaacgagaacttctctaacatcgacgagaaagaagacaagaactatcataacattgagatcctgtcgtcggaagagttctcgaccaagttcaacctgatctgccgggaggataacgccgtgtccgctgcgactgccctgttagagtccgaagaagacactattagcgctgtgaagcagaaggatacagagaacaccggcaggtccgtagaacacctggcctccaccaccttccccaagactgcctcctcgagcgtgtgcgttgcatctaacgccgcaatacagattgctagcgcaacgatgccggcactctcccttaacaatgatgaccaccagatttaccaatttaaagaaacttgctccagtgagagccctgactttgggctcctggttaagcaccgggtctccgactgtgagattgacacagataaaaataagtctcaagagagtttccaccagagtattaatgagaatctggtgctgcagtccatagaactcgagagcgagatcgagatcgaacttgaagactgtgacgacgcctttatctttcagcaagacacgcactcccatgagaatatgctgtgtgaggagttcgtaacgtcgtacaaagccctaaagtcaagaatcagctgggaaggactcttggctctggacaatggggagatggaagtgcttgaaagtaccacaggccgtgagaactcggaccagcattacagcaaagaatcaaactacttctattcaagcactcagaataatgaaactgagctgacgagtcccattctcctacccgatttgcagataaaaatcacaaatatcttccgccctggatttagccccacagccgacagtcttgctctaaaggattctttctgcactcacgtgacagaggccacaaagccggagatcaacaaagaagatggcgagatcctgggtttcgatatttactcccagccctttggcgaaaatgccgactatccttgcgaggataaagtggacaacatccgccaggagagcggacctgtttcaaacagcgagatctctctgtccttcgatctgtccagaaataccgatgttaaccacacctcagaaaaccaaaactctgagagcttgtttactgaaccctctaacgttacaaccatagacgatggctcccggtgcttttttactaagagtaaaacagattataatgacactaagaacaaaaaggaagtggagtccagaatatcaaagcgcaaactacacataagttcacgggaccagaacattccacacaaggatctacggcggcataaaatatatggccgaaaacgccgcctgacttcccaggattcttctgaatgtttttcctccctgtcccaaggtcggattaaaacattttcccagtccgaaaagcatatcaagtctgttctgaatattctctcagatgaggcttccctctgcaagtcgaagtgcctgtcgagaaagctcgataaagcagtagtgcatttaaagaaagctcacaggcgggtgcacacctcgctccagctcattactaaagtcggagaggagcggaagggcccactgcctaagtcttacgcgattatctgcaacaacttttgggagagttgtgacctgcaaggttatagcagcgtgagccagaggaagtattattctaccaagcatttttcatcaaagcgaaagtacgacaagagaagaaagaaaagagcaccaaaggcagatatctcaaagagcctgactcatgtgagtaaacacaaaagctacaagacttccggagaaaaaaagtgcctttctaggaagtccatggcatcctctgtgtcgaagtcccacccaacaaccagccacatgggggaattctgtaatcaggaacatcctgaatctcaacttcccgtctcttccactagtcagtctacgagtcagtctgtctattataatagttccgtctcaaacccgagtctcagcgaagaacaccagccttttagcggtaagactgcatacctgttcagccctgatcactcagatgaaaaattaatcgaaaaggaaaatcagattgatacggctttcttgagctctacctcaaagtatgagaagctcgagaaacacagtgcaaaccacaacgtgaaggatgccaccaaagaaaattcatgcgatgcaaacgaagtgataaatgaaagcaattcagtttcactcagctgcataaaggagaacatcaattccagcacaggtaatgattgcgacgctacttgtatcgggcatacgaaggccaagactgatgtgttaatatccgtgctggactctaatgttaaacactttctcaatgacctgtatcagcagggtaacttaattctgtccgattgtaaacgcaatttggaagtgaagtggacagaccccattgaaagacccaagcaaaacataatcaccggcaactttctcatgggcccactcaacctgacgctgatcgctagtaagaagtatagcatcccccagcttagtgctgccgccgttacagacagtgagggtgaaagtagcaagtcctatctggacaagcaaaggattcttacagtggattcctttgctgcatccagcaccgtaccccattgtgaacagagctgtcgcgagaaggagctgttgaagacagaacaatgctcttctggaaactgcctccacacagacgggaatgagacgaatgtaacggagaattacgaactcgacgttgcctctggtaccgaagaagacaaatcttatggcgagaacatcgtcgaactctctagctcagactcaagcctgctgctgaaggataacgtgaagggttcttcaagcgaaacgtgtatcgtgaagaaggacacggaagatagaattacttggaaagtgaagcaggctgagaaggctaaggattcagtgtacaaacgctcgatgaccgaaggctccactgtaaatacagagtacaaaaaccaaaagaatcaaataagtgaagagtcatgtcttaatgaaaagataatcaccaccaatctgattgactctcacctctccacaaaaaacactacaactgagtccgtccctctgaaaaatactgtgagtaaccccctgaacaaacgagaaaaaaaaggagaaataaaagtttcgaaggactctcaaagtgacttgacccttcactcagagattgcttatatttcaaagcctggaatcctcggggtgaaccatacgccaatactgcccgcgcactccgaaacatgcaaagtaccaacgctgctgaagaagcctgcctcatacgtgagcgacttcaaagagaaacattgcagtgctaaccatacagcactcattgcaaacctgtcacagatcctccagcgtgctgatgaagcctcatccctgcagattctgcaggaggagacaaaggtgtgtctgaacatcttaccacttttcgttgaggcatttgagaggaaacaggagtgttctgtagagcaaattcttatctctagggagctgctggtcgatcagaatttatggaacaactgcaagcacaccctcaagccctgcgccgtggacactcttgtggagctgcagatgatgatggagaccatccagttcatcgaaaacaagaagcggcacttagaaggagaacctactctgaggtctctgctctggtatgatgagacactgtacgccgaactgctgggcaagcccaggggtttccaacagcagagcaacttctatccagggttccagggaagactcaaatacaatgcgttctgtgagctacaaacgtatcacgaccagctggtggaattattggaggaaacaaagagagaaaaaaattcatactacgtctttctgaaatacaaacgtcaggtcaacgagtgcgaggcaatcatggaacattgcagtgattgtttcgacttcagcttgtcggtgccattcacatgtggggtcaacttcggcgacagccttgaggacctcgagattctccgaaagtcgactctgaagctgatcaatgtgtgcggggacagccccaaagtgcacagctatcccggaaaacaggaccacttgtggatcatcatcgagatgatttcatctaaggtaaacttcatcaagaacaacgaagcagtgcgcgtgaagatctcgctctacggactggaacacatcttcttcgatgcagccaagaatctcgtgtggaaggagagaacccagagcttttccaaaaaatattctcagaagaaagacgaggaacgactgctccgcgtaaacaaatgtgctttctccaagctgcagaagatctatgacaccctgtctaaggatttaaacaacgaaccgatttctccaataggtttggaggaggacaccatcatcgcgagtcgcaagagtgaccatcctatcaacgaggccaccatcagcatagagaattctaagttcaactcgaacttgctggctcacccagatatctgttgcatctcggaaattctcgaccaagccgaattcgccgacttgaaaaagctccaagatttgaccctgagatgcacggaccacttagagatccttaagaaatacttccaaatgcttcaggataataatatggataacatttttattacggaagaaaacgtgctcgacgttgtgattaatcactctcatgaagcgatcatccttaagcccgaagcaattgagatgtatattgagatagtgatggtgtctgagaccattcacttcctcaaaaatagtatagccaaaaaactggacaaacagcgctttcgaggcatgctgtggtttgacctgtcccttcttcccgagttggtccagtgtcaggagaaaatggcttcctttagctttctcaaggacaattctaccgacgtgtgtttatggaaggtgatcgagacagctgtgtccgaactgaaaaaggatcttgatataatctgcaagtacaacgaagcagttaattgttcttacgccattcatcttctgtcacgcgaattacaggaactcagcgagatcaaaaagctgctcaaaaagtcaaaatacttcatatctacctacatcgactttgttccttacatcgcatccataaactacgggtccacagtgaccgaactggaatacaattacaatcagttctccaccttattgaagaatgtaatgtctgcgccccgcaaggatctggggaaaatggcccacatacgaaaagttatgaagactatcgaacatatgaaaatgatctgtaccaagaacgctgagcttactatctccttctttctatgccagatgctgtacaataggcgaaaaatcctccagctcaaacgcaaagagaagatgaacatccacattgttaaacccggcgagaacaataacaagttctccatctctaccatgctccctcccgtctctgaatgtatcaacaagaatatttctaactcttccaaaaagcgcccatcaaccgtggacaagtgcgaggactcccaggagcagcagcaggatacaacagtgtccagctgtaaaaaactgaaagtggacatgaaagatgtgacgaagatcaatcgagaaaaagctaccttcaagcatccccggacgaccggtagccatcccaagagcgaaaacaaaatcgtccctagctcctgcgacagtctgaagcgcaaccacctgactcccaaaaaggtggaaatgcagaggtctctgccaggaagcctgctcccactggagaaccccaaagacacatgcgcgtccaagagtgaatccaaaattgacctgacagtgtcaagtgaccacttttctgggcaacaagaaaacctgaacagcatgaagaaaagaaacgtcaacttctctgctgccgaaacaaagtccgataaaaaggattgtgccgcttttgctatttgtgaccagaagagtgttcacggcaccttcagtcctgatcatggcaccctgctgcaaaagtttctgaaaaattctccagacccaacacaaaagagttgtttgagtgatatcaacccagaaaccgacgtgtccctggttcccgacgcaagtgtgctcagtaagcctatattttgcttcgtaaaagatgtgcatccagacctggaaatgaatgacaccgtctttgaactgcaggacaacgatatagtcaatagctcgatcaaaaactcctcgtgtatgacctctccagagccaatctgtattcaaaataaaatccctactctgcaaatcaacaagctgcaaccaacggaaaccgagtccgaagataagtacatgaaagacactctcaaccctaacaccgtccatacttttggagccagcggtcatattactctaaacgtcaaccaaggggccgagtacagcctctctgagcagcaaaacgacaaaaactccaaggtgctgatgcaaaatgctgccacatactggaatgagctgcctcagtctgcttgcaaccccacttataatagctcggaacatttattcgggacctcatatccatatagcgcatggtgtgtttatcaatactccaactctaacgggaatgctattacgcagacctaccagggtattacttcttacgaagtgcagcccagcccaagtggactgttgactacggtagcttctactgcccagggaacccattctaatctgttatatagccaatacttcacatattttgcgggcgagccacaggcaaacgggttcgttcctgtcaatggctacttccagagccaaataccagcttctaattttcggcaaccaatcttttctcagtacgcaagccatcagcccctgccccaggccacctatccatacctccctaatcggtttgttcctcctgaagtgccctgggtgtacgctccctggcaccaagagagtttccacccagggcactag

SEQ ID NO: 341493 - DNA, 8370 bp, Artificial Sequence
  derived and/or modified sequence
atgcccagcgatgccaaggactcagtcaatggagacctgctacttaactggacgtctctgaagaacatactgagcggcctcaacgcttccttcccactccacaacaatacgggctcaagtacggtgaccacatctaagtccataaaagaccccaggttgatgagaagggaggagtcaatgggcgagcaatcttctactgccggactgaacgaagtgctgcagttcgagaaatcgtctgacaatgtgaactcggagataaagagtaccccaagtaatagcgcctcatcctcggaagttgtgcctggtgactgcgcggtcctgaccaacgggcttgacaccccttgtttcaaaactagcgtaaacgacagtcagtcctgggcacataacatgggcagtgaagactacgactgcatccctccgaataaggtgacaatggctggccaatgcaaagatcagggaaacttctccttccccatcagtgtgtctaacgtagtctctgaagtggagaaccagaaccactccgaggaaaaagctcagagggctcagcaggagtctggaaacgcctacacgaaggaatattcaagccatatcttccaggacagccaatcatcagatctgaagacgatctatcagactggatgccagacgtcaaccgtgttccccctaaaaaaaaaagtgtctatcgatgaatatctccagaacacgggcaaaatgaagaatttcgcggatctcgaggacagctcaaagcatgaagaaaaacagacttcatggaaggaaatcgataacgattttacaaacgagaccaagatatcacctattgacaactacatcgtgttacaccaggagtacaaggagtccgaaagccacaatagtttcggtaaatcctgcgacaaaatccttataacacaggaactggaaatcactaagtcctctacaagcactataaaagacaaggacgagttagatcaccttgccctggagtggcagattacaccgtctttcgagtccctttcgcagaaacatcctcagcacagtgtcgagtacgagggaaacatccatacatcactggctattgctcaaaaactgatggaactaaagcttggcaaaatcaaccagaactatgcttctattatcactgaagccttccctaaacctaaggacattcctcaggccaaggaaatgtttatcgatacagtgatcagctcgtacaacatcgaaaccgctcatgattcttcaaattgcagcatcacaagagaacacatatgtgtccatcgtaaaaacgagaacgagcctgtgagcctggaaaatattcagagagactataaggaaactgcttacgtggaggacagagggcaggaccacaatttgttctgcaattcacagctttctaacgacatttggttaaacgtgaactttaagaagcagactgaccgtgagaaccagaatgaggccaaggaaaacagtgcttcttgcgttgagaataatattgagaatatatacggcgataaaaaacaagactcgcataccaacgagaactttagcaacattgatgaaaaagaggataagaattaccataacatcgaaatcttaagttccgaggaattttctaccaaatttaatctgatctgcagggaagacaacgcagtgtccgccgctaccgcacttctagagtcagaggaagatacaatctctgcagtgaagcaaaaggacaccgaaaatactgggcgttccgtggaacaccttgcttcgactacattccctaagacagcgagtagcagcgtttgcgtcgcctcaaatgcggcaatccaaatagcatcggccaccatgcctgccctttcccttaataatgacgaccaccaaatttaccagttcaaggagacatgcagctccgagagtcccgattttggattgttggtcaaacatcgagtgtcagattgcgaaatcgataccgataaaaataagagtcaggagtccttccaccagtcgataaatgagaacctcgtcttgcaaagcatagagctagaatcagaaattgaaatcgaactggaggactgcgacgatgcctttattttccaacaggatacccacagtcatgaaaatatgctttgcgaagaattcgtgacttcatataaggctcttaagagtcgaattagctgggaaggattgttagccttggacaatggggagatggaggtcctggaatcaacaaccggaagagaaaactcagaccagcattactccaaggagtccaattacttttactccagtacccagaacaacgagaccgaactgacaagccctatactcctaccagacctgcagatcaaaatcaccaatatcttccggcctgggttctctcccaccgccgactctcttgccctgaaagacagtttctgcacccacgtcaccgaagccaccaagccagagattaacaaggaggacggggaaattctggggttcgatatctatagccagcctttcggggagaacgcagactacccatgcgaggataaagttgataatattaggcaggagtcaggtccagtgagcaacagtgaaatcagccttagctttgacttgtccagaaataccgatgtaaatcacactagcgagaaccagaatagcgagtccttattcactgaacctagcaacgtgaccactatcgatgacggatcccgatgtttttttaccaagtcaaaaacggactacaatgacaccaaaaacaaaaaagaagtggagtccaggatttctaagagaaaactccatatctcttcgcgggaccaaaacatcccacataaggacctccgacgacacaaaatctatggccgaaaacgcagactgacttcccaagacagctcagagtgcttttccagccttagtcagggcagaatcaagactttttcacagtctgaaaaacacattaaatctgtgctcaacattctgagcgacgaagcaagtctatgtaagtctaaatgcttgtcccggaaactagacaaagctgtcgtccacctgaagaaagctcacaggagggtgcatacatctctacagttgattacgaaggtcggcgaagagcgtaagggtcctctccctaagagctatgcaattatctgcaacaatttttgggagagttgcgacttgcaggggtatagcagcgtctcccaaaggaaatattactcaaccaagcattttagcagcaagcgtaaatacgacaaacggaggaaaaagagggcccctaaagccgacatctccaagtctctcactcacgtatccaaacataagtcctacaagactagcggtgaaaaaaagtgtcttagccggaaaagcatggccagcagcgtttccaaatcccaccccacaacatcacacatgggtgagttttgtaatcaggagcacccagaatcacagttgcctgtgtcttctacatctcagagcacctcacagagcgtgtactacaattcttccgtgagtaacccctccctttctgaggagcaccaaccattttctggtaaaactgcctacttgtttagtccggaccattctgacgagaagctaatcgaaaaagagaatcagatcgacacagcctttctgtcaagcacctcaaaatatgagaaactggagaagcacagcgcgaatcataatgtaaaagatgctacaaaagaaaacagttgtgacgctaacgaagtaatcaacgagtccaactctgtcagcttgtcatgcattaaggagaatattaatagttctacaggtaacgactgcgacgctacgtgtatcggccacactaaggctaagacggacgtgcttatttccgtattggactccaacgttaaacactttctcaatgacctgtaccagcagggaaatctcatcctttctgattgtaaaagaaatctcgaagtaaaatggacggatcccatcgagcgccctaaacaaaacattataaccggcaactttctaatgggccctttaaatctcacacttattgccagcaagaagtatagcattccacagttgtctgctgccgctgtgacagactcagagggggagtcttccaaatcctatctggacaagcagcggatcttaaccgtagactcctttgcggcaagcagcacagttccacattgcgagcaaagctgtagggaaaaggagctgctgaagaccgagcagtgctcctctggaaactgccttcacaccgatggcaatgagaccaatgtgacagagaattacgaactcgatgttgcatccggtacagaggaggataagagttatggagagaacatcgttgaactgagcagcagtgacagttccctactcctgaaggataacgtgaagggctctagctctgaaacttgtatcgtaaagaaagataccgaagaccgcataacatggaaggttaaacaggccgaaaaggctaaagattccgtctataagcgatcaatgacggaagggtcaaccgtcaacacagaatataagaatcagaagaatcagatttctgaagagagctgcctaaatgagaagatcattactacgaatctgattgatagccatctttctacaaaaaacacaactacagagtcggtacccctaaagaacaccgtaagcaaccccttgaacaagcgggagaaaaagggagagataaaagtaagcaaggactcacagtcagatttgactctgcactccgagatcgcttacatatccaaacccggtatcctcggcgtgaatcatacccccatcctgccggcacactctgagacgtgtaaagtccctacacttctgaagaagcccgcttcatatgttagcgattttaaagaaaaacactgcagcgctaatcatactgccctgatcgctaacctaagtcagattctgcagcgcgctgatgaagcctcgtcccttcagatactgcaggaggagaccaaggtttgtctgaacattttgccactattcgtggaggcttttgagcgtaagcaggaatgctcagtggagcaaatcctcatctcacgggagctgcttgtggatcagaatctgtggaacaactgtaaacacaccctgaagccatgtgctgtggacaccctcgtggaactgcaaatgatgatggaaacaatacaatttatcgagaacaaaaagcggcatctggagggggaaccaacactccgcagcctactgtggtacgacgagacattatacgccgagctactcggcaagcctcggggtttccagcaacagtctaatttttatcccggattccaagggagactcaaatataatgccttctgtgagctgcaaacctatcacgaccagctcgtggagctgctcgaagagaccaaaagagagaaaaacagttattatgtctttctaaaatacaagcggcaggtaaatgagtgcgaggcgattatggaacactgctcagactgtttcgattttagcttgtccgtgccatttacttgtggagtaaacttcggagattccttggaggacctggagatcttgaggaaatcaacacttaagctcattaacgtgtgcggtgacagtccaaaagttcactcctacccaggaaagcaggatcacctctggatcataatcgaaatgattagttccaaggttaacttcatcaagaataacgaggccgtcagggtgaagatctctctatatggcctcgagcacattttcttcgatgccgctaaaaatctcgtctggaaagagagaacccagtcctttagtaaaaagtacagccagaagaaagatgaagaacgtctgcttagggtcaataagtgtgcctttagtaaactccagaagatttacgacactctctcaaaagacctgaacaacgagcccattagcccaatagggctcgaggaggacaccattatcgcaagccgcaaaagcgatcaccccataaatgaagccaccataagtattgagaacagtaagtttaactcaaatttactcgctcaccccgatatttgctgtatcagcgaaattttggatcaagcagaatttgctgacctgaagaaattacaagatttgacccttcgctgtacagaccatttagaaattctgaaaaaatatttccaaatgctccaggacaataatatggacaacatttttatcacagaagaaaatgtcctggatgtggtgatcaatcacagtcacgaagccataatactgaagccagaggccattgagatgtatatagaaattgtgatggtttccgaaaccatacacttcctcaaaaacagcatcgccaagaagctggataagcagcgcttcaggggtatgttgtggttcgatctgtccctcctgcccgaactggtgcagtgccaggagaagatggcatcattcagcttcctgaaggataatagcaccgatgtgtgcctgtggaaggtgatcgaaaccgctgtatccgagctgaagaaggatctggacataatatgcaagtataacgaagccgtcaactgctcctacgccatccacctgctctcgcgggaactgcaggaactgtcagaaatcaaaaaactgctgaaaaaatctaaatatttcatcagcacctacatcgactttgtcccatacatcgcgagcatcaattatggttcaactgtcaccgaacttgagtataactacaaccaattttcaacgctgctgaaaaacgtgatgagtgctccaagaaaagatttgggcaagatggctcacatcagaaaggtaatgaaaacgatcgagcacatgaaaatgatctgcacaaaaaacgctgagctcacaatcagcttttttctctgccagatgctgtacaacaggaggaagatactgcaactgaagagaaaagagaaaatgaacatacacatagtgaaaccaggggagaacaataataaattcagtatatctacaatgttaccgcctgtgtccgaatgcataaataaaaatatcagtaattcttctaaaaaacgccctagtaccgtggacaagtgcgaggatagccaggagcagcagcaggacactaccgttagctcttgtaagaagctgaaagtagatatgaaggatgtcacaaagatcaacagggagaaggccacatttaaacaccctcgtacaacaggatcacacccaaagtccgagaataagatcgtgccctcaagctgtgattctctgaaaaggaaccacttgacccctaaaaaagtagaaatgcagagatctcttccgggaagcctgttaccactggagaaccccaaagacacttgcgccagcaagagtgagtcgaagattgacttaactgtgagcagcgatcactttagtggtcagcaggaaaacctgaacagtatgaaaaaacgcaacgtcaatttttctgcagcggagaccaagagcgacaagaaggattgcgccgctttcgctatctgtgatcaaaagagtgtgcatggcactttcagtccagatcacgggacgttactccagaagttcctcaaaaatagcccagatcctactcagaaatcctgcctgtctgacattaaccctgaaacagatgtgtccctcgtgcctgatgcctccgtgcttagcaagcctattttttgtttcgtgaaggacgtccatccagacttggagatgaatgacaccgtcttcgagctccaggataatgacatcgtcaatagctctatcaaaaacagttcgtgtatgacctctcctgagccaatctgtatccagaacaagattcccacactccagatcaacaagctccaacctactgagaccgagtccgaagacaagtacatgaaggacacattgaaccctaacaccgtccatacatttggcgcttcaggacatatcacactgaacgttaaccagggggcagagtacagcctctccgagcagcagaatgacaagaattcaaaagttctgatgcaaaatgccgctacctactggaacgaacttccacaatccgcgtgcaatccaacctacaacagcagtgagcacctctttggaacctcttatccatacagcgcatggtgcgtgtaccaatatagcaattccaatggaaacgcaattacccagacttatcaggggataactagctatgaggtgcagcctagtccctctgggctcctcactacggtggcatcaactgcgcagggtacccactccaaccttctctactcccaatacttcacttactttgcaggtgagccccaggctaatgggttcgtgcccgtaaacggatactttcagagtcagattcccgcatccaactttaggcagcccatattttcacaatatgcctcacaccagcctctgccccaggcaacttacccatatctccctaaccgctttgtgccccctgaagtgccgtgggtgtatgccccttggcatcaggagagctttcacccaggccattaa

SEQ ID NO: 341494 - DNA, 10187 bp, Artificial Sequence
  derived and/or modified sequence
ggacagacagagcacagtttagcagaaattagagacacttctcaagtacttgcacatgattcagacatttcacttatgcccagtgatgccaaagacagtgttaatggtgaccttttgttaaattggacaagtcttaaaaatattttaagtggtcttaatgcttcttttcctcttcacaacaatactggctcaagcacagtcactacttcaaaatccatcaaagacccaagactgatgaggagagaagaaagtatgggagaacagagtagtactgcaggcttaaatgaggttttgcaatttgagaagagttcagataatgttaattcagaaataaaatcgacaccatctaattctgcctcctcctcagaagttgtccctggtgattgtgctgttcttactaatggtttggataccccttgctttaaaacttctgttaatgattcacaatcttgggctcacaacatgggctctgaggactatgactgtatacctcccaataaagttaccatggcagggcaatgtaaggaccaaggtaatttttccttcccaatttctgtgtcaaatgtagtgtcagaggttgagaaccaaaaccacagtgaggagaaggctcagagagcccaacaggagtccggtaatgcttatacaaaagagtacagtagtcacatttttcaggactcgcagtcttctgatttaaaaacaatttatcagactggttgccaaacgtctacagtttttccactcaaaaagaaagtaagcattgatgaataccttcaaaatactggaaagatgaaaaacttcgctgacctggaagacagttccaaacatgaagaaaagcaaacttcatggaaagaaattgataatgatttcactaatgaaacaaaaatcagtccaatagataattacattgttttgcaccaagaatacaaagagagtgagagtcataattcttttgggaaaagctgtgataaaatattaattactcaagagttagaaataacaaaatcttctacatctaccataaaggataaggatgaactagatcatctagcattggaatggcaaattactccaagttttgagagcctgtcacaaaagcatcctcagcactctgtggagtatgagggtaacattcatacaagtttagccattgctcaaaagctaatggaactgaaattggggaaaataaatcaaaattatgctagcattataactgaagctttcccgaaaccaaaagacataccccaggccaaagaaatgttcattgatacagttatttcatcttataacatagaaacagctcatgacagttcaaattgcagcataactagagaacatatatgtgtccataggaaaaatgaaaatgaaccagtgtcattagagaacattcagagagactataaagaaactgcttatgttgaagataggggtcaggatcacaatctgttctgtaattcacagttaagcaatgatatatggctgaatgttaatttcaaaaaacaaacagatagagaaaaccaaaatgaggctaaagagaatagtgcttcatgtgtagaaaacaacatagagaacatatatggagacaaaaagcaggattctcatacaaacgaaaatttcagcaatatagatgaaaaggaggacaaaaattaccacaatatagaaattttgagttctgaagaattttctactaaatttaacttgatttgcagagaagataatgcagtgtcagcagcaactgcattattagagagtgaagaagataccattagtgccgtgaaacaaaaagatactgaaaatactggaagaagtgtagagcatttggcttccacgacatttcccaaaactgcaagttcttcagtgtgtgtagcctcaaatgctgcaatacagatagctagtgctactatgcctgcattaagcctaaataatgacgatcaccagatataccagtttaaagaaacttgttcttctgaaagtccagattttggtttgttagtaaaacatagggtttctgattgtgaaattgatacggataaaaataaatcacaagaatcatttcatcaatcaataaatgagaacttagttcttcagagcattgaattggaaagtgaaattgaaatagaattagaagattgtgatgatgcttttatatttcaacaagatacacatagccatgaaaacatgctttgtgaagaatttgtgacctcatataaggctctgaagtctcgtatcagttgggaaggtctgttagcacttgataacggggagatggaagttttggaaagcaccacaggaagggagaatagtgatcagcattattctaaggaaagtaactatttttattcctctacacaaaacaatgaaacagaacttaccagcccaattttacttccagatctacaaattaaaattactaatatatttaggccaggattcagcccgacagctgactcccttgcattgaaagatagtttttgcacacatgtaactgaagccacaaaaccggaaataaataaggaagatggagaaattctaggatttgacatttattcccagccttttggtgaaaatgcagattatccatgtgaagataaagttgataatataaggcaagaatcagggccagtgagtaactctgaaatctccctttcttttgacttgagtcgtaatacagatgtgaatcatacgtctgaaaatcagaacagtgaatctttgtttactgaaccttctaatgtcacaacaatagatgatggaagcagatgtttctttacaaaatcaaaaactgactataatgataccaaaaataaaaaggaggtagaatcaagaattagcaaaaggaagctacatatatcttccagggatcagaacataccacataaagatttaagacgacataaaatttatgggagaaagaggaggctaaccagtcaagactcatctgagtgtttctcttcattatcccaaggacgaattaaaacattttcacagtcagaaaagcacattaagagtgtcctaaatatcctaagtgatgaagcatctttatgtaaaagcaaatgtctttccagaaaactagacaaagcagttgttcacttaaaaaaagctcatagaagagttcacacatctttgcagcttataactaaagtaggagaagaaagaaagggcccattaccaaaatcatatgcaataatatgcaataatttctgggaaagttgtgaccttcaaggttatagttctgtgtctcaaagaaaatattattctactaagcatttttcgtcaaaaagaaaatatgacaaacggagaaagaaaagagctccaaaagctgatatttctaaatcattaacccatgtgtcaaagcacaagtcttataaaacaagtggagagaaaaaatgcctttctaggaaaagtatggctagcagtgtctcaaaaagtcaccccaccaccagtcacatgggagaattttgtaatcaagaacatcctgaatcacagttgcctgtatcctccacatcccaaagtacaagtcagtcagtttattataatagcagtgtaagcaatccaagtttatcagaagaacatcagcccttttctggaaaaactgcatatctgttttccccagaccactcagatgagaaactaatagaaaaagaaaatcaaattgatacagcatttttatctagcactagtaaatatgaaaagcttgaaaaacattcagcaaatcataatgttaaagatgcaactaaagaaaacagttgtgacgctaatgaagtaataaatgaaagtaattctgtatctttaagttgcataaaagaaaacataaattctagtacaggcaacgattgtgatgcaacttgcataggtcacacaaaggcgaaaactgacgtacttatatcagtcttagattcaaatgtgaagcactttttaaatgatctctaccaacaaggtaaccttattttatctgattgtaaaagaaacctggaagtaaagtggacagatcctattgagagacccaaacaaaacattattacaggaaacttccttatgggcccattaaacctaactttgatagcaagtaaaaagtacagtattcctcagttatcagccgctgcagtgacagatagtgagggagaatcttcaaaatcttacttggataagcagagaattcttactgtagattcttttgcagcatccagtactgtaccacactgtgagcagagctgtagagaaaaagagcttctaaagacagaacagtgctcttcaggtaattgcctccatacagatgggaatgaaacaaatgtcactgagaattatgagttggatgtagcatcaggaactgaagaagataaaagttatggggaaaatatagtggaattatcttccagtgatagttctctgcttttaaaagataatgtaaaaggctcctcttcagaaacatgtattgtgaagaaagacactgaggacagaataacgtggaaagttaaacaagcggaaaaagcaaaagattctgtttacaaaagaagcatgactgaaggatcaactgttaatactgagtacaaaaatcaaaagaatcagatctcagaagaatcctgcttaaatgagaaaattattacaactaacttgattgattcccatctgagcactaaaaatactaccactgagtcagtccctttgaagaacacagtttctaatccgcttaacaaaagagagaagaagggggaaattaaagttagtaaagactcgcagtctgacttgacattacattcagaaatagcctatatttccaaaccaggaattctaggagttaatcatacgcctattttacctgcccactctgaaacctgtaaagtccctactcttctgaagaaacctgcgtcatacgtgagtgattttaaagaaaaacattgctcagctaatcatacggcccttatagctaatctatctcaaattttgcagagggcagatgaagcatcatctttgcagattctacaggaagaaactaaggtttgtctaaatattctccctttatttgtggaagcttttgaaagaaagcaagaatgttcagttgaacaaatcctgatttcaagagaactgttggtagaccaaaacctgtggaataattgcaaacacacattaaaaccatgtgctgttgacactttggtagaacttcaaatgatgatggaaacaattcaattcattgaaaacaaaaaaaggcacttagaaggtgaaccaacattgcgaagcttgctttggtatgatgaaacactgtatgctgagcttcttggaaaaccacgtggatttcaacagcagtctaatttctatcctggtttccaaggaagattaaaatataatgcattctgtgagttacagacttaccatgatcaattagttgaattgcttgaagaaacaaaaagggaaaagaattcatactatgtattcttaaagtacaaacgacaggttaatgaatgtgaagccataatggagcattgttccgattgctttgatttttctctttctgttccatttacctgtggagttaactttggagatagtttagaagacctggaaatcttaagaaaaagtactttaaagttgatcaatgtatgtggggactctcctaaagttcattcgtatccaggaaaacaggaccatctgtggattatcatagaaatgatctcctcaaaggttaattttattaagaacaacgaggcagtacgtgttaaaatatctctttatggtctggaacatatcttttttgatgctgcaaaaaatcttgtttggaaagagagaacacaatccttcagcaaaaaatactcacaaaagaaggacgaagaaaggctactcagagtgaataaatgtgccttttctaagttgcagaagatatatgatactttgtctaaagatttaaacaatgaaccaatttcccctattgggcttgaggaggatactataattgcttccagaaagtcagatcatccaataaacgaagcaacaattagcatagaaaattctaaatttaacagtaatttgcttgcacacccagatatttgttgtattagtgagatattggatcaggctgaatttgcagaccttaaaaaattacaggatctcaccttgagatgtacagatcacttagaaattttaaaaaaatactttcagatgctacaagataataacatggataatatttttatcacagaagaaaatgttttagacgtggtgataaaccacagccatgaggctatcattttaaagcctgaagctattgaaatgtatattgaaatcgtcatggtctcagaaacaattcactttcttaaaaactcaatagcaaagaaactagacaaacagaggtttcgaggtatgctttggtttgatttgtcacttcttcctgagctggttcagtgccaagaaaaaatggcttctttttcatttcttaaagataactcaacagatgtttgcctttggaaagtgatagagactgctgtttccgaacttaagaaagatctggatattatctgcaaatataatgaagctgttaattgctcatatgctattcatttgctctcaagagaacttcaagaactttcagaaataaaaaagcttctgaagaagtccaagtattttatttccacatatattgactttgtgccatatatagcatccataaattatggaagcactgtgacagagttagaatacaactacaatcaattttctacactgctgaagaatgtaatgtctgcccctaggaaagatttaggaaaaatggcccacattaggaaagtcatgaaaacgattgaacatatgaagatgatatgtactaaaaatgctgaactaaccatttcctttttcctatgccaaatgctgtataacagaaggaagattttacagctgaagagaaaagaaaaaatgaatattcatattgtaaaacctggggaaaataacaataaatttagtatttctacgatgttgcccccagtatcagagtgcataaacaaaaacatctcaaattcctctaaaaaacgaccgagcactgtagacaaatgtgaagactctcaggaacaacagcaagatactactgtttccagttgtaaaaagctaaaggtagacatgaaagatgtcacaaaaatcaacagagaaaaggcaacattcaagcatccaaggactacaggatctcatcccaaaagcgaaaacaaaatagtaccaagttcatgtgacagtctgaaaagaaatcatttaacgccaaaaaaggttgaaatgcaaagatcactacctggctcacttttacccttagagaacccaaaagacacttgcgcatcaaagtcggaaagcaaaatagacttaactgtttcatctgatcacttcagtggacaacaggaaaatttaaatagcatgaagaaaagaaatgtgaacttcagtgctgctgaaacaaaaagtgataagaaagattgtgctgcttttgcaatttgtgaccaaaaaagtgtacatggcacattttcaccagaccatgggacgcttttgcagaaatttcttaaaaattccccagatcccacccaaaaatcctgcctttctgatataaacccagaaactgatgtttctcttgtgcctgatgcgtcggtgctctcaaagccaattttctgttttgtgaaagatgtccatcctgatctagaaatgaatgacacagtctttgaacttcaagataatgatatagtaaattcatctattaaaaattcctcatgcatgacttctccagaacccatctgtatccagaacaaaattcctactctgcagataaacaaactacagcctacagaaactgagtcagaggacaaatacatgaaggatacattgaatcccaatactgtgcatacttttggagcatctgggcatataacccttaatgtgaatcaaggagcagagtactctctttctgaacaacagaatgacaaaaattcaaaagtcctaatgcagaatgctgccacatattggaatgaacttccacagtctgcatgtaacccaacatataattcttctgagcatttatttggaacttcatatccatactctgcttggtgtgtttatcagtacagcaacagcaatggcaatgccattacccagacataccaagggataacatcatatgaagtacagccatctccttctgggctgttgaccacagttgcaagtactgcccagggcacacattctaatcttctgtactctcaatattttacttattttgcgggggagccacaagcaaatggctttgtgccagtgaatgggtattttcaatctcaaatacctgcttctaattttcggcagccaattttttcacaatatgcttctcatcagccattaccacaagctacatacccttaccttcctaatcgatttgtgcctccagaagttccttgggtttatgctccatggcaccaagaatcctttcatccaggacactgaaaatagtcttctgtctattgaaataagacataacaagtttttccaaatattttttacttatatattttttaacatttagcgatttttaatgtttgtaaatgtggtaggaaatataaatcatatggtcctttgtaaaatatacaaataatctaacacatatcatataggacatcaatttctaacatctgatataccagaattatttccatgcaattataaggggagggtaatatgatcaaagttaagcaatagtggtaaaatctttaaaactagattcttgcttctgatatgtttcaatacattgttgatggcattgtgccatttgagctgaaagcaggattttttttcattagtcatcaaaccaagaattttataattcttgacactttattatataatttacaattctatgccagatatggcaaatttcttcaatttcagtattttatagtttctacttgtaaaatatttttaataagaaaaattggtttgcataatctcagtgtttccttgagtagagatgttttaaatgtttatgttggaagcaattgtagttaattatattggcaatgaagcactttcaatgcctttttctacaagagccatttccagaagattattttgtttttggatttcacaatttaaatagttattttaatgattttctagcaaataatagagaataatgtttatgcttatgcagttagtctttattacagtaatttaaacaatgtggcacaaacatagttttttcatgctcttgtcatagacttttctttttaaccttctgcaaaagtaaaaactctcttagtaataatcatcatagggcaacaggatatagtatgtaactgcagtcttgagctgtctcttttcatgtattacctttcttgctcaacagctattcctgttttctgtaagatcctagtcagacagagccctcacaactggatagacctttctcaagggttagccctaaaatgtgacaagagaattggtttggctgaatcacaacaaataactagcaaagcttcagtgcttttgcaaactttttatgtaagcaaactttttgtgttatctggcacaggcctttgaaaagactataattctactttgtttaatgtagagtaactaatttttcaatttagaaagacagtgagaatccccaggataagcctctttatactcacttaaaccaactgggatggaattcagaatacctaagctgcttctttaacatagagatctttaaaaagggaaggtcaagcaaagaactgtaaccgaaagaagtaagagatttgaaaagacgatagagttaaaacaatatttaaaaaacatttctatttggtccatgcagttttatttgaaaatagtctgtcaaaatcagaactcctgaacaactttgaaagcagtaatattaactggtattcaaaaatgaataacagccaaaaatgaataacagccatttgatttatgtttccctcagtcatttggtttatgtttggttatggcaagatgttacagcatttatagttaatactactactaatatgtaaaccaaaagttaaatattctagttaaggattgtttctttaaacaactttcagattctgttgacattgtctttgtggtatttttatttcatgggttttaatttctcttaaagacttacctaaatattcagttacatttttaaaaaatctgtacgtgacagaatattaaaacatggaatatttttgcttcaa

SEQ ID NO: 341495 - protein, 121 aa, Artificial Sequence
  derived and/or modified sequence
MQKQLLPLAAGQRCDYSQRESCCQSPHRAESAGDRSTDNGLHRGAERSFCCALDPLPRRPPAGRRGRDRSSSACPGARARVWPPGACASFRDSHKRFIMRRTALFHFTPTSFHLRYTLRKL

SEQ ID NO: 341496 - DNA, 366 bp, Artificial Sequence
  derived and/or modified sequence
atgcagaagcagctgctgcccctggccgccggccagagatgcgactacagccagagagagagctgctgccagagcccccacagagccgagagcgccggcgacagaagcaccgacaacggcctgcacagaggcgccgagagaagcttctgctgcgccctggaccccctgcccagaagaccccccgccggcagaagaggcagagacagaagcagcagcgcctgccccggcgccagagccagagtgtggccccccggcgcctgcgccagcttcagagacagccacaagagattcatcatgagaagaaccgccctgttccacttcacccccaccagcttccacctgagatacaccctgagaaagctgtag

SEQ ID NO: 341497 - DNA, 366 bp, Artificial Sequence
  derived and/or modified sequence
atgcagaagcagctcttgcctcttgctgctggccagcgctgtgattactcccagagggaatcctgttgccagagcccacacagggccgagtccgcaggtgaccggtctactgataacggcctacatcggggggccgagcgttctttctgctgtgcactggatccactacctaggcgacctccggcgggaaggagaggtagggatcggagctcaagtgcttgtcccggcgcacgggcacgggtatggcccccgggagcctgtgcctcctttcgtgactcccacaagcgctttattatgcggagaacagccctcttccacttcacgcccacctcctttcacctgaggtacaccctgcggaaattgtag

SEQ ID NO: 341498 - DNA, 366 bp, Artificial Sequence
  derived and/or modified sequence
atgcagaagcagctgctgcccctggccgccggccagagatgtgactacagccagcgggagagctgctgccagagcccccacagagctgagagcgctggggacaggagcacagacaatggcctgcacagaggagctgagaggagcttctgctgtgccctggaccccctgccccggcggcccccagctggccggcggggccgggacaggagcagcagcgcctgccctggggcccgggcccgggtgtggcccccaggggcctgtgccagcttccgggacagccacaagcgcttcatcatgagaagaacagccctcttccacttcacccccaccagcttccacctgcgctacaccctgaggaagctgtag

SEQ ID NO: 341499 - DNA, 366 bp, Artificial Sequence
  derived and/or modified sequence
atgcagaagcagctgctgcccctggccgccggccagcggtgcgactattcgcagcgggaaagctgttgccagtctccacatagggctgagtccgctggagacaggtctactgacaacggcttgcatagaggcgcagagaggagcttctgctgtgctcttgaccccctgcctcgcagacctcccgctgggcgacgaggaagagacagatcctccagcgcttgtccaggggctagggccagagtttggcccccaggggcttgcgcgagtttcagggattcccataagagatttatcatgcgccggacagcgttattccacttcacaccgacgtcattccacctacggtacacactgcgcaaactgtag

SEQ ID NO: 341500 - DNA, 366 bp, Artificial Sequence
  derived and/or modified sequence
atgcagaagcaactcctccccctggctgctggccaaagatgcgattactctcagcgagagtcatgctgtcaatcaccgcatcgggcagagagtgctggagaccgatcaaccgacaatggactgcacagaggcgcagaaagaagtttttgttgcgccctggatccactgcctcggcgacctcctgcagggaggagaggtcgcgacaggtcttcttcagcctgccccggagcaagagctagagtatggccccctggcgcatgtgcgagtttccgagatagtcacaaacgtttcatcatgcgcagaactgcactgttccacttcacccctacatcatttcacctcagatatactcttcggaagctatag

SEQ ID NO: 341501 - DNA, 2188 bp, Artificial Sequence
  derived and/or modified sequence
gatgcatatgttccttcaacttattcagtacttccatgtgcagggctctggactagactttcaggatctaaggctgaatcctacacagtcctccctctgggaaagtgatgaaacctgtgagctctcctagcaactctgcagtcttccttcaagggcctgtgcttccttcagagactcacacaagaggtttatcatgagaaggaccgcactatttcatttcactcctacaagttttcatttacgttacacattgagaaagttatgagaagcaactgtcactctctggaggtggagactgccgtgattcacaaagacaagaggtaattttcctgtaatcacaggatgactcaggatggatcatgaagccgcccagctggagaagcagcatgtgcacaatgtgtacgagagcacagccccttacttcagcgacctgcagagcaaagcctggcctcgtgtccgccagttcctgcaagagcagaagccaggcagcctcatcgctgacataggttgtgggactggaaaatatcttaaagtgaacagccaggtacataccgtgggctgtgactactgtgggccactggtagagattgcccggaatagaggatgtgaagccatggtatgtgacaaccttaatctcccctttagggatgagggcttcgatgccatcatctccataggagtcatacatcatttttctacaaaacaaagaagaatcagagcaataaaagaaatggccagggtcttagttcccggaggccaactgatgatttacgtttgggcaatggaacaaaagaaccgtcactttgagaagcaagacgtgcttgttccatggaacagggctctgtgttcccagctcttctcagagtccagccagtctgggaggaagaggcagtgtggatacccagaaagaggccatccctaccatcctccttgctctgagtgtagctgttctgtttgttttaaagagcagtgtggttcaaaacggtcccacagcgtgggctatgaacctgctatggcaagaacctgttttgcaaatatttctaaggaaggcgaggaagaatatggattttacagcacattaggaaaatcgtttcgttcctggtttttctccagatctttggatgaatcgactctgaggaagcaaattgaaagagtaagacccttgaaaaacacagaagtttgggccagtagcactgtaacagtccagccttccagacactctagtttagactttgatcaccaagagccattttcaacaaaagggcaaagtttagatgaggaagtgtttgtggaatcttcttctggaaaacacttggagtggctgagagcaccaggcactctgaaacatttaaatggagaccatcaaggggaaatgaggagaaatggagggggaaattttctggatagcactaatactggtgtgaattgtgtggatgcaggcaacatagaagatgataatccttctgctagtaaaatattgagaaggatttctgcagttgattccacagatttcaacccagatgatacaatgtctgtcgaagatccacagactgatgttttggactccacagcctttatgcgctactaccatgtgtttcgagaaggggagctctgcagtctgctcaaggagaatgtgtcagagctccgtatcctgagttctgggaatgatcatggtaactggtgtatcattgcagagaaaaagagaggttgtgattgattggatccttttagacaactcctccaaaagatgaaccacattctttcctcttggtttgatatggttacctgaatttgcattcagtgttatttgttaatccatttacgctttggtctgcagagactattaattatttggttgttttgttttcatttttgaataagcacagattctggcattgaaagcacttgacaaagggtatttgtgcttaaatgttaatatacaagatctgaagaagcaacagaaagtacccttcagtacacctcagacttttttttaaccccagagagataaaatacatgtatagtgtttttcagtattacacattgatttaaaaagattatgctgttaaataatcttttaaaacggtatttttataaagtgaggggataatttctggttctcaggttataactgagagcagtgtgcaagataataggtaaatttgatccattgcacagatatactttg

SEQ ID NO: 341502 - DNA, 1104 bp, Artificial Sequence
  derived and/or modified sequence
atggtgtgcgacaacctgaacctgcccttcagagacgagggcttcgacgccatcatcagcatcggcgtgatccaccacttcagcaccaagcagagaagaatcagagccatcaaggagatggccagagtgctggtgcccggcggccagctgatgatctacgtgtgggccatggagcagaagaacagacacttcgagaagcaggacgtgctggtgccctggaacagagccctgtgcagccagctgttcagcgagagcagccagagcggcagaaagagacagtgcggctaccccgagagaggccacccctaccaccccccctgcagcgagtgcagctgcagcgtgtgcttcaaggagcagtgcggcagcaagagaagccacagcgtgggctacgagcccgccatggccagaacctgcttcgccaacatcagcaaggagggcgaggaggagtacggcttctacagcaccctgggcaagagcttcagaagctggttcttcagcagaagcctggacgagagcaccctgagaaagcagatcgagagagtgagacccctgaagaacaccgaggtgtgggccagcagcaccgtgaccgtgcagcccagcagacacagcagcctggacttcgaccaccaggagcccttcagcaccaagggccagagcctggacgaggaggtgttcgtggagagcagcagcggcaagcacctggagtggctgagagcccccggcaccctgaagcacctgaacggcgaccaccagggcgagatgagaagaaacggcggcggcaacttcctggacagcaccaacaccggcgtgaactgcgtggacgccggcaacatcgaggacgacaaccccagcgccagcaagatcctgagaagaatcagcgccgtggacagcaccgacttcaaccccgacgacaccatgagcgtggaggacccccagaccgacgtgctggacagcaccgccttcatgagatactaccacgtgttcagagagggcgagctgtgcagcctgctgaaggagaacgtgagcgagctgagaatcctgagcagcggcaacgaccacggcaactggtgcatcatcgccgagaagaagagaggctgcgactag

SEQ ID NO: 341503 - DNA, 1104 bp, Artificial Sequence
  derived and/or modified sequence
atggtctgtgacaatctgaatttgccctttagggatgagggctttgacgcaatcatcagtattggagttattcaccacttttcaaccaaacagcgccgcatcagagccatcaaggaaatggccagggtgctggtcccaggtggccaactcatgatatacgtgtgggcaatggaacagaagaaccgccatttcgagaaacaggatgttctggtgccctggaatagggcattgtgttcgcagctgttttcagagtctagccagagcggtcgcaaacgacagtgcgggtaccctgaaagaggccatccgtaccatccaccatgctccgaatgctcttgcagcgtctgctttaaagaacagtgtggaagcaagagatcacattcagtgggctacgagcccgccatggctagaacctgctttgccaacatcagtaaggagggtgaagaagaatacgggttttacagtaccctggggaagagcttccggagctggtttttctcgcggagtctcgatgaatccacattgcggaagcaaattgagagggtgcgccctctgaagaacacggaagtgtgggcgtcatctacggtgacagtgcaaccgtccaggcattccagcctggatttcgaccaccaggagcccttttccacaaaaggccaaagcttagacgaggaagtcttcgtggagtctagctctggcaaacacctcgagtggctgagggcccccggaacattgaagcatctaaatggggaccaccaaggagaaatgagacgaaacggaggggggaacttcctggattcaacaaataccggagtgaattgcgttgatgctggtaatattgaggacgacaatcctagcgcctctaagattctccgtaggatcagcgccgttgattcgacagatttcaaccctgatgacaccatgtctgtcgaggatccacagaccgacgtgcttgattctacggcttttatgcggtattatcacgtgttcagagagggtgaactgtgctctctgttgaaagagaacgtgtctgagctcaggattctaagctcaggaaacgaccacggcaattggtgcattatcgcagagaagaaaagaggctgcgactag

SEQ ID NO: 341504 - DNA, 1104 bp, Artificial Sequence
  derived and/or modified sequence
atggtgtgtgacaacctgaacctgcccttcagagatgagggctttgatgccatcatcagcattggagtcatccaccacttcagcaccaagcagaggcgcatccgggccatcaaggagatggcccgggtgctggtgcctgggggccagctgatgatctacgtgtgggccatggagcagaagaacagacactttgagaagcaggatgtgctggtgccctggaacagagccctgtgcagccagctgttcagcgagagcagccagagcggcaggaagaggcagtgtggctacccagagcggggccacccctaccaccccccctgcagtgaatgtagctgcagcgtgtgcttcaaggagcagtgtggcagcaagaggagccacagcgtgggctatgagcccgccatggcccggacctgctttgccaacatcagcaaggagggggaggaggagtatggcttctacagcaccctgggcaagagcttccgctcctggttcttcagccgcagcctggatgagagcaccctgaggaagcagatcgagcgggtgcggcccctgaagaacacagaggtgtgggccagcagcacagtgacagtgcagcccagccgccacagcagcctggactttgaccaccaggagcccttcagcaccaagggccagagcctggatgaggaggtgtttgtggagagcagcagcggcaagcacctggagtggctgcgggcccctggcaccctgaagcacctgaatggagaccaccagggcgagatgagaagaaatggaggcggcaacttcctggacagcaccaacacaggagtgaactgtgtggatgctggcaacattgaagatgacaaccccagcgccagcaagatcctgcggcgcatctctgctgtggacagcacagacttcaacccagatgacaccatgtctgtggaggacccccagacagatgtgctggacagcacagccttcatgagatactaccacgtgttccgggagggggagctgtgcagcctgctgaaggaaaatgtgtctgagctgcgcatcctgagcagtggaaatgaccacggcaactggtgcatcatcgccgagaagaagaggggctgtgactag

SEQ ID NO: 341505 - DNA, 1104 bp, Artificial Sequence
  derived and/or modified sequence
atggtgtgcgacaacctgaacctgcccttccgggacgagggcttcgacgccatcatctctataggtgtcatacaccacttctctaccaagcagaggcggatacgagccataaaagagatggccagggtcctggtgcctggcggtcagttgatgatctatgtgtgggccatggaacagaagaataggcactttgagaagcaggacgtgctcgtaccctggaatagagctctgtgttcacagctgttctccgaatctagccagagcggaagaaaacggcaatgcggctatccggagcggggtcatccctatcatccaccctgcagcgagtgcagttgttctgtctgctttaaagagcagtgcggctcaaaacgcagccacagcgttggatatgagcctgccatggcacggacttgcttcgcaaacatctccaaagaaggcgaggaagagtatgggttttattcgaccttgggcaagagctttaggagctggtttttctctcggtctctagatgaatccactttaagaaaacagatcgagagagtcaggccattgaagaacacagaagtgtgggcatcttccaccgtgaccgtccagcctagtaggcatagctctctcgatttcgaccatcaggagcctttcagcacgaaggggcagtccctggacgaggaggttttcgtcgagagcagctcggggaaacaccttgaatggcttcgggccccaggcacactgaaacacctgaatggcgaccaccagggggagatgagacgtaacgggggaggtaattttttggactcaacgaatactggcgtgaattgcgttgacgccggaaacatagaggacgacaaccccagcgcctctaaaatcctgcggcgcatttcggcagtcgatagcacggacttcaacccagacgacactatgagtgtcgaggaccctcagactgacgtgctcgatagtactgcctttatgcgctattatcacgtgtttagagagggtgagctgtgtagtctcctgaaggagaatgtctctgagttacggattctctctagcggcaacgatcacggaaactggtgcattatcgctgaaaagaaacgtggatgtgactag

SEQ ID NO: 341506 - DNA, 1104 bp, Artificial Sequence
  derived and/or modified sequence
atggtgtgtgacaatttaaacctgccgttcagagatgaagggtttgatgctatcatcagtatcggagttattcatcacttcagcacaaagcaaaggcgcatacgagctattaaggaaatggctcgggtccttgtcccgggaggccaactgatgatatatgtttgggctatggagcaaaaaaaccgtcactttgaaaagcaagacgtgcttgtaccgtggaatcgggctctttgttcacaactgttctcagaatcttcccagtcggggaggaaacggcagtgtggctaccctgagagagggcacccttaccacccaccatgctcagagtgtagctgctccgtgtgcttcaaggaacagtgcgggagtaaaaggagtcactcagtcggctatgaacccgcaatggctagaacttgctttgcaaatatttctaaagaaggggaggaagaatacggcttctactcgactttgggtaaatcctttcggtcctggttcttctctcgttcactggatgagtctactctgaggaaacaaattgagagagttcggcctctgaaaaacacagaggtgtgggcaagctccactgtgacggttcagccctcaagacacagttccttggacttcgatcaccaggaacccttctctaccaaaggacagtccctggacgaggaggtgtttgtggagagctcatcgggtaagcacttggagtggctccgggcacctggcacattgaaacaccttaatggagatcatcagggcgagatgcgtagaaatggcggaggtaatttcctcgactcgacaaatactggagttaactgcgtggacgccggtaacattgaagatgacaacccatctgcttccaaaattctgaggaggattagcgcggtcgactctacggacttcaacccagacgacaccatgtccgtggaagatccccaaaccgacgtgctggattccacagcattcatgcgatactaccacgtcttcagggaaggtgagctgtgtagccttctcaaggaaaatgtgagtgaactgagaattctgtcgtccggtaacgaccacggtaactggtgcatcatagccgagaaaaagagggggtgcgactag

SEQ ID NO: 341507 - DNA, 348 bp, Artificial Sequence
  derived and/or modified sequence
atgccctatgtggacaggcagaatcgcatttgtggctttttagacatagaagagcacgaaaactccggaaagtttctacgccggtacttcattttggatacccaagccaattgtctgctctggtatatggataacccccagaacttggccatgggcgcaggagccgtcggtgccctgcaactgacctacatctccaaggtgagcatagcaaccccaaagcagaagcctaagaccccattttgttttgttatcaacgctctgagccaacgctatttcctgcaggctaacgatcagaaggatatgaaagactgggttgaagccctgaaccaggcctcaaagatcacctag

SEQ ID NO: 341508 - DNA, 348 bp, Artificial Sequence
  derived and/or modified sequence
atgccctacgtggaccggcagaaccgcatctgtggcttcctggacatcgaggagcacgagaacagcggcaagttcctgcggcgctacttcatcctggacacccaggccaactgcctgctgtggtacatggacaacccccagaacctggccatgggcgctggagctgtgggcgccctgcagctgacctacatcagcaaggtgtccatcgccacccccaagcagaagcccaagacccccttctgcttcgtcatcaatgccctgagccagcgctacttcctgcaggccaatgaccagaaggacatgaaggactgggtggaggccctgaaccaggccagcaagatcacctag

SEQ ID NO: 341509 - DNA, 348 bp, Artificial Sequence
  derived and/or modified sequence
atgccctacgtggaccggcagaaccggatctgcggcttcctggacattgaggagcatgaaaacagcgggaagtttctgcggcgatactttatcttggatactcaggctaactgtctcctatggtatatggacaaccctcagaatctggcaatgggggctggtgccgtaggcgccctccagttgacctacatatcaaaagtcagtatagcaacccctaagcagaaaccaaaaactccattctgtttcgtgatcaacgctctctcacagcggtactttctgcaagccaacgatcagaaagacatgaaggactgggtagaagcactaaaccaggcatccaaaatcacctag

SEQ ID NO: 341510 - DNA, 565 bp, Artificial Sequence
  derived and/or modified sequence
gcagacccagaaatccctggagcgcggcggacccggcggccggaggggcgaccccgcccgatgtaacgcgccccgcccgagccccggcccctgcacggggggcagcgaaacttctctgcgggttctggcgctggggcaccgaccccgcaacgactgcccgggctgcgggaggggaggagagcagagaacgtccccagggtgatgtgagcagagcccaggaatgccttatgtggatcggcagaaccgaatctgtgggtttctggacatcgaggagcatgagaacagcggcaagtttctgcggaggtacttcattctggacacccaggctaactgcctcctctggtatatggacaacccccagaatctggcaatgggggcaggagctgttggagctttgcagctgacctacatctcgaaggtgagcatagctaccccaaaacagaaaccaaaaactccattttgctttgttatcaatgccctgtctcagagatatttccttcaagccaatgatcagaaagatatgaaggactgggttgaagccctgaaccaagccagcaagatcacc

SEQ ID NO: 341511 - DNA, 348 bp, Artificial Sequence
  derived and/or modified sequence
atgccctacgtcgacagacagaataggatctgcgggttcctggatatcgaggagcacgagaattctggaaagttcctccggaggtatttcatattagacacacaggctaattgccttttgtggtatatggacaatccccagaatctagccatgggcgctggcgcagttggggcactgcagctgacgtacatttctaaggtttccatagccactccaaaacagaaaccaaagactcccttctgcttcgttattaacgcactgagccagcgatactttttgcaggccaatgaccaaaaagatatgaaggactgggttgaagccctgaaccaggccagcaagataacctag

SEQ ID NO: 341512 - DNA, 348 bp, Artificial Sequence
  derived and/or modified sequence
atgccctacgtggacagacagaacagaatctgcggcttcctggacatcgaggagcacgagaacagcggcaagttcctgagaagatacttcatcctggacacccaggccaactgcctgctgtggtacatggacaacccccagaacctggccatgggcgccggcgccgtgggcgccctgcagctgacctacatcagcaaggtgagcatcgccacccccaagcagaagcccaagacccccttctgcttcgtgatcaacgccctgagccagagatacttcctgcaggccaacgaccagaaggacatgaaggactgggtggaggccctgaaccaggccagcaagatcacctag

SEQ ID NO: 341513 - protein, 435 aa, Artificial Sequence
  derived and/or modified sequence
MEWLWLFFLHPISFYQGAAFPFALLFNYLCIMDSFSTRARYLFLLTGGGALAVAAMGSYAVLVFTPAVCAVALLCSLAPQQVHRWTFCFQMSWQTLCHLGLHYTEYYLHEPPSVRFCITLSSLMLLTQRVTSLSLDICEGKVKAASGGFRSRSSLSEHVCKALPYFSYLLFFPALLGGSLCSFQRFQARVQGSSALHPRHSFWALSWRGLQILGLECLNVAVSRVVDAGAGLTDCQQFECIYVVWTTAGLFKLTYYSHWILDDSLLHAAGFGPELGQSPGEEGYVPDADIWTLERTHRISVFSRKWNQSTARWLRRLVFQHSRAWPLLQTFAFSAWWHGLHPGQVFGFVCWAVMVEADYLIHSFANEFIRSWPMRLFYRTLTWAHTQLIIAYIMLAVEVRSLSSLWLLCNSYNSVFPMVYCILLLLLAKRKHKCN

SEQ ID NO: 341514 - DNA, 1308 bp, Artificial Sequence
  derived and/or modified sequence
atggagtggctctggcttttctttctgcaccctatctctttttaccagggcgccgctttcccattcgctctgctattcaactatctttgtatcatggactctttctccacccgcgctcgatacctttttctccttacagggggtggtgccttggccgttgctgcaatgggatcttacgcagtgctggtcttcacacctgccgtgtgtgccgtggccctgttatgttcactggccccgcagcaggtgcatcggtggaccttttgctttcaaatgtcatggcagacgctctgccatctgggcctccactacactgagtactatctgcatgaaccacctagcgtgcgcttttgtattacgttaagcagcctgatgctccttacacaaagagtgacctctctatcccttgatatttgcgaaggaaaagtgaaggcggcctctggtggcttcaggtcacgcagctctttgtccgaacatgtgtgcaaggcattgccatattttagttatcttctttttttcccagccctgctgggaggttccttgtgttcctttcagcggttccaggcccgcgtgcaggggagctctgccttacatccaagacactctttttgggccctgagttggagagggcttcagatcctcgggctcgaatgtctgaacgtcgctgtgtctagggtggtggacgctggtgctggactcactgattgtcagcaattcgagtgcatctacgtggtgtggactaccgccggtctgtttaaacttacttattattctcactggattctggatgactctttactgcacgcagcaggattcgggcctgaactgggacagtcccctggtgaagaaggttacgtgccagacgcagatatctggacgttggagagaactcaccgaatctccgtcttctcacggaagtggaatcagagcacagcccgatggcttcggcggctggtgtttcagcattctagggcttggcctctgctgcagactttcgctttcagtgcctggtggcatggcctgcacccggggcaggtgtttggcttcgtatgttgggccgtgatggtggaggctgactatttgatacatagttttgcgaatgaattcatcagaagctggcctatgcgattgttctataggactctaacctgggcacacacgcagctgattatagcatatattatgcttgctgtagaggtgcgttcactctcttctctctggctcctgtgcaattcctacaatagcgtgttccctatggtgtactgcatccttctactgctgcttgccaagcgcaaacacaagtgcaactag

SEQ ID NO: 341515 - DNA, 1308 bp, Artificial Sequence
  derived and/or modified sequence
atggagtggctgtggctgttcttcctgcaccccatctccttctaccagggcgccgccttcccctttgccctgctcttcaactacctgtgcatcatggacagcttcagcacccgggcccgctacctgttcctgctgaccggcggcggggccctggccgtggccgccatgggcagctatgctgtgctggtgttcaccccagctgtgtgtgctgtggccctgctgtgcagcctggccccccagcaggtgcaccgctggaccttctgcttccagatgtcctggcagaccctgtgccacctgggcctgcactacacagagtactacctgcacgagcccccatctgtgcgcttctgcatcaccctgagcagcctgatgctgctgacccagagggtgaccagcctgagcctggacatctgtgagggcaaggtgaaggccgccagcggcggcttccgcagccgcagcagcctgtctgagcacgtgtgcaaggccctgccctacttctcctacctgctcttcttccctgccctgctgggcggcagcctgtgcagcttccagcgcttccaggcccgggtgcagggcagcagcgccctgcaccccaggcacagcttctgggccctgtcctggaggggcctgcagatcctgggcctggagtgcctgaatgtggccgtgtcccgggtggtggatgctggggccggcctgacagactgccagcagtttgagtgcatctacgtggtgtggaccacagctggcctcttcaagctgacctactacagccactggatcctggatgacagcctgctgcacgccgccggctttggacctgagctgggccagagccctggagaggagggctacgtgcctgatgctgacatctggaccctggagaggacccaccgcatcagcgtcttcagcaggaagtggaaccagagcacagcccgctggctgcggcggctggtgttccagcacagccgggcctggcccctgctgcagacctttgccttcagcgcctggtggcacggcctgcaccctggccaggtgtttggatttgtgtgctgggccgtgatggtggaggccgactacctgatccacagctttgccaatgagttcatccgctcctggcccatgaggctcttctaccgcaccctgacctgggcccacacccagctgatcatcgcctacatcatgctggccgtggaggtgcgcagcctgagcagcctgtggctgctgtgcaacagctacaacagcgtcttccccatggtgtactgcatcctgctgctgctgctggccaagaggaagcacaagtgcaactag

SEQ ID NO: 341516 - DNA, 1512 bp, Artificial Sequence
  derived and/or modified sequence
agagacagcctggttgagattactcttggaggaaggcatcagttaaggacactggaaaagacaggctcttttgttctggttcctaatggagtggctttggctgttctttctccatcctatatcgttttaccagggggctgcatttccctttgcacttctcttcaattatctctgcatcatggattcattctccactcgtgccaggtacctctttctcctgactggaggaggtgccctggccgtggctgccatgggttcctacgccgtgctcgtcttcacccctgctgtctgcgctgtggctctcctctgttccctggctcctcagcaagtccacaggtggaccttctgctttcagatgagctggcagaccttgtgtcacctaggtctgcactacactgagtattatctgcatgagcctccttctgtgaggttctgcatcactctttcttctctcatgctcttgacccagagggtcacgtccctctctctggacatttgtgaggggaaagtgaaggcagcatctggaggcttcaggagcaggagctctttgtctgagcatgtgtgtaaggcactgccctatttcagctacttgctctttttccctgctctcctgggaggctctctgtgctccttccagcgatttcaggctcgtgttcaagggtccagtgctttgcatcccagacactctttctgggctctgagctggaggggtctgcagattcttggactagaatgcctaaacgtggcagtgagcagggtggtggatgcaggagcgggactgactgattgccagcaattcgagtgcatctatgtcgtgtggaccacagctgggcttttcaagctcacctactactcccactggatcctggacgactccctcctccacgcagcgggctttgggcctgagcttggtcagagccctggagaggagggatatgtccccgatgcagacatctggaccctggaaagaacccacaggatatctgtgttctcaagaaagtggaaccaaagcacagctcgatggctccgacggcttgtattccagcacagcagggcttggccgttgttgcagacatttgccttctctgcctggtggcatggactccatccaggacaggtgtttggtttcgtttgctgggccgtgatggtggaagctgactacctgattcactcctttgccaatgagtttatcagatcctggccgatgaggctgttctatagaaccctcacctgggcccacacccagttgatcattgcctacatcatgctggctgtggaggtcaggagtctctcctctctctggttgctctgtaattcgtacaacagtgtctttcccatggtgtactgtattctgcttttgctattggcgaagagaaagcacaaatgtaactgacatctttccctggctttcaccttaaacacccaggaaacattttagaaagtgccagatgacgcatcgataatgcatacatttgaacttttccataataaaattttttctaaagttttgga

SEQ ID NO: 341517 - DNA, 1308 bp, Artificial Sequence
  derived and/or modified sequence
atggagtggctgtggctgttcttcctgcaccccatcagcttctaccagggtgccgccttcccttttgcgctcctgttcaattatctgtgtatcatggactctttcagtaccagagcccgataccttttcctgctgacaggcggcggagctcttgctgtggctgcaatggggtcttatgcggtcctagtttttaccccggcggtatgcgctgtggctctgctgtgtagtcttgcccctcaacaagtgcaccgatggaccttctgcttccagatgagctggcagaccttgtgtcatttaggactgcattataccgagtactatcttcatgagccaccctccgtgcgattttgcattacacttagctccctgatgctgctaacacagagagtgacttcattaagtctggacatatgcgaagggaaggtgaaggcagcttctggaggatttcgaagtcgatccagcttgtctgaacatgtatgcaaagccctaccatatttttcatatctcctgtttttccctgccctgctaggtggcagtctgtgttcctttcagagattccaagcacgagttcaaggtagttcagccctacaccctcggcactctttctgggccctctcttggcgtggcctgcagattctgggactagagtgtctgaatgtagccgtgtcacgggtcgtggacgccggcgccggcctgacagattgccaacagtttgagtgcatatatgtcgtgtggaccacagccggcctcttcaaacttacctactattcccactggattctcgacgattcccttctgcacgctgctggattcggtcctgagcttgggcagagccccggcgaggaggggtatgtgccagatgccgacatttggacacttgagaggacccacaggatctccgtgttttctaggaagtggaaccaaagcacagctcggtggctgagacgcttggtgttccaacattcccgagcatggccgctgttgcaaacctttgctttctccgcctggtggcatggactccaccctggtcaagtctttggattcgtatgctgggccgtgatggtggaagcagactatttgatccacagctttgcaaacgaatttattaggagctggcccatgcggctcttctacagaacacttacctgggcccacacccagctgattatcgcctacatcatgctggccgtggaagttagaagcctgagcagtctctggctgctctgtaatagctataattctgttttccctatggtgtactgtatcttactcctgttgctggccaagaggaagcacaagtgtaactag

SEQ ID NO: 341518 - DNA, 1308 bp, Artificial Sequence
  derived and/or modified sequence
atggagtggctgtggctgttttttttgcacccaatatccttctaccagggagctgctttcccttttgcactgttatttaattacctgtgtatcatggactctttcagcacccgagctaggtatttgttcctgctcaccggcggaggcgctcttgcggtcgcggcaatgggttcctacgctgtcttggtatttaccccagcagtctgcgctgtggcactcctgtgctctcttgcaccgcagcaggttcataggtggacattctgcttccagatgagctggcaaacactgtgtcacctgggtctgcactacaccgagtattatcttcatgaaccaccttctgtgcggttctgcattacactgagctccctgatgctgctgacacaaagggttacaagtctgtcactggatatctgcgaaggaaaagtcaaggcagcatccggaggttttcgttctcgttcgagcctgagcgagcatgtctgcaaagccttgccatatttttcctacctgctgttcttccctgcacttttgggagggtctctatgttcctttcagcggttccaagcacgcgttcaagggagctctgccttacaccctcgacatagtttctgggctctgtcctggaggggccttcagatactcggactggagtgcctcaatgtcgcggttagcagagttgttgatgctggcgcaggactcactgactgtcaacagtttgagtgtatttacgtggtctggactacagcaggccttttcaaattgacctactatagtcactggattctggatgattcccttcttcacgccgctggctttggcccagaactgggacagagcccaggcgaagaaggctatgtgccagacgccgacatctggaccttagagcgcacccacagaatcagtgtgttttcgcgcaaatggaaccaaagcaccgccagatggttgaggcggttggtgttccagcacagccgcgcatggccactgctgcaaacctttgccttttcagcatggtggcatggtctgcatcccggtcaagtattcggattcgtgtgctgggccgtgatggtggaggctgactacttgatccactccttcgcaaacgagttcattcggtcctggcctatgcggctgttctatcggacgctgacatgggcgcacacacagttaataatcgcctacatcatgctcgccgtcgaggtgcgctcactgtcatccttgtggcttctgtgcaactcatataactccgtcttcccaatggtctattgtattctcctgttgctgctggctaagcggaaacacaagtgcaactag

SEQ ID NO: 341519 - DNA, 1308 bp, Artificial Sequence
  derived and/or modified sequence
atggagtggctgtggctgttcttcctgcaccccatcagcttctaccagggcgccgccttccccttcgccctgctgttcaactacctgtgcatcatggacagcttcagcaccagagccagatacctgttcctgctgaccggcggcggcgccctggccgtggccgccatgggcagctacgccgtgctggtgttcacccccgccgtgtgcgccgtggccctgctgtgcagcctggccccccagcaggtgcacagatggaccttctgcttccagatgagctggcagaccctgtgccacctgggcctgcactacaccgagtactacctgcacgagccccccagcgtgagattctgcatcaccctgagcagcctgatgctgctgacccagagagtgaccagcctgagcctggacatctgcgagggcaaggtgaaggccgccagcggcggcttcagaagcagaagcagcctgagcgagcacgtgtgcaaggccctgccctacttcagctacctgctgttcttccccgccctgctgggcggcagcctgtgcagcttccagagattccaggccagagtgcagggcagcagcgccctgcaccccagacacagcttctgggccctgagctggagaggcctgcagatcctgggcctggagtgcctgaacgtggccgtgagcagagtggtggacgccggcgccggcctgaccgactgccagcagttcgagtgcatctacgtggtgtggaccaccgccggcctgttcaagctgacctactacagccactggatcctggacgacagcctgctgcacgccgccggcttcggccccgagctgggccagagccccggcgaggagggctacgtgcccgacgccgacatctggaccctggagagaacccacagaatcagcgtgttcagcagaaagtggaaccagagcaccgccagatggctgagaagactggtgttccagcacagcagagcctggcccctgctgcagaccttcgccttcagcgcctggtggcacggcctgcaccccggccaggtgttcggcttcgtgtgctgggccgtgatggtggaggccgactacctgatccacagcttcgccaacgagttcatcagaagctggcccatgagactgttctacagaaccctgacctgggcccacacccagctgatcatcgcctacatcatgctggccgtggaggtgagaagcctgagcagcctgtggctgctgtgcaacagctacaacagcgtgttccccatggtgtactgcatcctgctgctgctgctggccaagagaaagcacaagtgcaactag

SEQ ID NO: 341520 - protein, 622 aa, Artificial Sequence
  derived and/or modified sequence
MPGVARLPLLLGLLLLPRPGRPLDLADYTYDLAEEDDSEPLNYKDPCKAAAFLGDIALDEEDLRAFQVQQAVDLRRHTARKSSIKAAVPGNTSTPSCQSTNGQPQRGACGRWRGRSRSRRAATSRPERVWPDGVIPFVIGGNFTGSQRAVFRQAMRHWEKHTCVTFLERTDEDSYIVFTYRPCGCCSYVGRRGGGPQAISIGKNCDKFGIVVHELGHVVGFWHEHTRPDRDRHVSIVRENIQPGQEYNFLKMEPQEVESLGETYDFDSIMHYARNTFSRGIFLDTIVPKYEVNGVKPPIGQRTRLSKGDIAQARKLYKCPACGETLQDSTGNFSSPEYPNGYSAHMHCVWRISVTPGEKIILNFTSLDLYRSRLCWYDYVEVRDGFWRKAPLRGRFCGSKLPEPIVSTDSRLWVEFRSSSNWVGKGFFAVYEAICGGDVKKDYGHIQSPNYPDDYRPSKVCIWRIQVSEGFHVGLTFQSFEIERHDSCAYDYLEVRDGHSESSTLIGRYCGYEKPDDIKSTSSRLWLKFVSDGSINKAGFAVNFFKEVDECSRPNRGGCEQRCLNTLGSYKCSCDPGYELAPDKRRCEGCYDLQVGKPLLWDRHCFRLSTHGPEMLGTALRG

SEQ ID NO: 341521 - DNA, 909 bp, Artificial Sequence
  derived and/or modified sequence
atgccgggagtagcaaggctgccgcttctcctgggcctgctgctgctaccccgtcccggccggcccctggatctggcagactatacatatgatctagcagaagaagatgactctgaacctttgaattacaaagatccgtgcaaagccgccgcttttctgggcgatattgccttggacgaagaggacttgagggcctttcaagtccaacaggcagtcgatctcagacgccataccgcaaggaaatctagtatcaaggctgctgtgccaggtaacacgtccaccccctcatgtcaaagcaccaacggacaaccgcagaggggcgcttgcggtaggtggcgaggtcgctctaggtctagacgtgccgccaccagccggccagagcgggtgtggcctgacggtgtgatcccattcgtcatcggcggaaatttcacaggcagtcagcgtgcagtgtttaggcaggctatgaggcactgggaaaagcacacttgtgtcacttttctggaacggactgacgaagactcatatatagtatttacctaccggccctgcgggtgttgctcgtatgttggccggcgaggagggggcccacaggccattagcattggaaagaactgcgataaattcggaatagtggtccacgaactgggccacgtggtaggattctggcatgagcacacccggccggacagggaccgccatgtctctatcgtgcgggaaaacatacagccgggcgtcctccatagctcactcctccttctttcttgcgggtctagaaacggggcttcgtttccctgttcgctggaatccagtattcatcaggccctctgctggactgggcttttcttaaggccctcaccctttcccaggcttcctctggcagctcctcggacgctaagggcaggtgtgtag

SEQ ID NO: 341522 - DNA, 1869 bp, Artificial Sequence
  derived and/or modified sequence
atgcctggtgtcgcccgcctaccacttttactggggctgttactgctgccacgcccaggtcggcctctggaccttgccgactatacctacgatcttgccgaggaggatgattctgagccactgaactataaggacccatgtaaagccgcagctttcctgggggacatcgccctggatgaggaggatttgcgcgcgtttcaggttcaacaggcggtggatctgagacgacacactgctcgtaaatccagtatcaaggccgcggtaccaggaaatacgagtacaccaagctgtcagtctaccaatggccagccgcagcgcggagcctgcggtcggtggaggggcaggtctaggtcacgccgggccgcaaccagccggccagaaagggtatggccagatggtgtgatcccattcgtgattgggggcaatttcactggctcacagagagctgtgttcagacaggctatgagacactgggaaaaacacacttgcgttacatttctggaacgcaccgatgaagattcttacatcgtgttcacctaccgcccgtgtggctgctgctcctatgttgggaggcgcggcggcggaccccaggccattagtataggcaagaattgtgacaagtttggtattgttgtacatgaacttggacacgtcgtgggattctggcacgagcacaccagacccgatcgagacaggcatgtcagtatcgtccgcgaaaacattcaaccagggcaggaatacaacttccttaagatggagcctcaggaagtggagtcactaggggaaacctatgacttcgatagtatcatgcactacgcccggaacacatttagtcgcgggatttttttggacactatcgtgcccaagtatgaggtgaacggcgtgaagcccccaattggccagcggacccggctgtctaagggagacatcgcccaggctcggaaactctacaagtgccccgcctgcggggaaaccctgcaggatagcaccggaaacttttcctcccctgagtaccccaacgggtatagcgctcacatgcattgtgtgtggagaatttctgtcacgcctggcgagaaaattatactgaactttacgtcactcgatctgtatcgatcgagattatgctggtatgactatgtggaggtgagagatggcttttggaggaaagcacccctgagggggaggttctgtggctctaagttgcccgagcctatcgtctcaactgacagccgcctgtgggtcgagttcaggagcagctcaaattgggtgggcaaagggttttttgctgtgtatgaggctatctgcggcggagacgtcaaaaaggactacggccacatccagtctcctaactatccggacgattataggccttccaaggtgtgcatttggaggatccaagtgtccgagggcttccatgtggggttgacttttcagtccttcgagatcgagaggcatgattcatgtgcttatgattatctggaggtgcgcgacggacattctgagagtagcacactgatcggacggtactgcggatacgagaagcctgatgacattaaaagcaccagctcccgactgtggctgaagttcgtgagcgatggatctattaacaaagctggcttcgcagtgaacttttttaaggaggtggacgagtgcagtcggcccaaccgcggcggttgtgaacagagatgcctgaacactctcggatcctataaatgtagctgcgacccaggatacgagctcgccccagataaacgccgctgtgagggatgctatgaccttcaggtaggcaaacctctattatgggatcgacactgttttagactctctacgcacggtcccgagatgctgggaactgcactccgcggatag

SEQ ID NO: 341523 - DNA, 909 bp, Artificial Sequence
  derived and/or modified sequence
atgcctggggtggcccggctgcccctgctgctgggcctgctgctgctgcccaggcctggccggcccctggacctggccgactacacctatgacctggccgaggaggatgacagcgagcccctgaactacaaggacccctgcaaggccgccgccttcctgggggacatcgccctggatgaggaggacctgcgggccttccaggtgcagcaggccgtggacctgcggcggcacacagccaggaagagcagcatcaaggctgctgtgcccggcaacaccagcacccccagctgccagagcaccaacggccagccccagagaggagcctgtggccgctggaggggccgcagccgcagcagaagagctgccaccagcaggcctgagcgggtgtggccagatggagtcatcccctttgtgattggaggcaacttcaccggcagccagagagctgtgttccggcaggccatgaggcactgggagaagcacacctgtgtgaccttcctggagaggacagatgaggacagctacatcgtgttcacctaccggccctgtggctgctgcagctatgtgggcagaagaggaggcggcccccaggccatcagcatcggcaagaactgtgacaagtttggcatcgtggtgcatgagctgggccacgtggtgggcttctggcatgagcacaccaggccagaccgggacagacatgtgtccatcgtgcgggagaacatccagcccggggtgctgcacagcagcctgctgctgctgagctgtggcagcagaaatggagccagcttcccctgcagcctggagagcagcatccaccaggccctgtgctggacaggcctcttcctgcggcccagccccttcccccggctgcccctggccgcccccaggaccctgcgggccggcgtgtag

SEQ ID NO: 341524 - DNA, 1869 bp, Artificial Sequence
  derived and/or modified sequence
atgcctggggtggcccggctgcccctgctgctgggcctgctgctgctgcccaggcctggccggcccctggacctggccgactacacctatgacctggccgaggaggatgacagcgagcccctgaactacaaggacccctgcaaggccgccgccttcctgggggacatcgccctggatgaggaggacctgcgggccttccaggtgcagcaggccgtggacctgcggcggcacacagccaggaagagcagcatcaaggctgctgtgcccggcaacaccagcacccccagctgccagagcaccaacggccagccccagagaggagcctgtggccgctggaggggccgcagccgcagcagaagagctgccaccagcaggcctgagcgggtgtggccagatggagtcatcccctttgtgattggaggcaacttcaccggcagccagagagctgtgttccggcaggccatgaggcactgggagaagcacacctgtgtgaccttcctggagaggacagatgaggacagctacatcgtgttcacctaccggccctgtggctgctgcagctatgtgggcagaagaggaggcggcccccaggccatcagcatcggcaagaactgtgacaagtttggcatcgtggtgcatgagctgggccacgtggtgggcttctggcatgagcacaccaggccagaccgggacagacatgtgtccatcgtgcgggagaacatccagcccggccaggagtacaacttcctgaagatggagccccaggaggtggagagcctgggggagacctatgactttgacagcatcatgcactacgccaggaacaccttcagccggggcatcttcctggacaccatcgtgcccaagtatgaggtgaatggagtgaagccacccatcggccagaggacccggctgagcaaaggagacatcgcccaggccaggaagctgtacaagtgcccagcctgtggggagaccctgcaggacagcacaggcaacttcagcagccctgagtaccccaacggctacagcgcccacatgcactgtgtgtggaggatctctgtgaccccaggagagaagatcatcctgaacttcaccagcctggacctgtaccgcagccggctgtgctggtatgactatgtggaggtgagagatggcttctggaggaaggcccccctgcggggccgcttctgtggcagcaagctgcctgagcccatcgtgtccacagacagccggctgtgggtggagttccgcagcagcagcaactgggtgggcaagggcttctttgctgtgtatgaggccatctgtggaggagatgtgaagaaggactatggccacatccagagccccaactacccagatgactaccggcccagcaaggtgtgcatctggaggatccaggtgtctgagggcttccacgtgggcctgaccttccagagctttgaaattgaaagacatgacagctgtgcctatgactacctggaggtgagagatggccacagcgagagcagcaccctcatcggccgctactgcggctatgagaagccagatgacatcaagagcaccagcagccggctgtggctgaagtttgtgtctgatggcagcatcaacaaggccggctttgctgtgaacttcttcaaggaggtggatgagtgcagccggcccaacagaggaggctgtgagcagcgctgcctgaacaccctgggcagctacaagtgcagctgtgaccccggctatgagctggccccagacaagagaagatgtgagggctgctatgacctgcaggtgggcaagcccctgctgtgggacagacactgcttccggctgagcacccacggccctgagatgctgggcacagccctgcggggctag

SEQ ID NO: 341525 - DNA, 909 bp, Artificial Sequence
  derived and/or modified sequence
atgcccggcgtggcccggctgcccctgctgctgggcctgctgctgttgcccaggccaggaaggccgttggatcttgccgattacacgtacgaccttgctgaagaggatgactccgaaccgctaaactataaagacccttgtaaagccgctgcttttctgggagatattgcacttgacgaggaggacctgagggcttttcaggttcagcaagctgttgacctgcggcggcatacagcgcgcaagagtagcatcaaggcagccgtcccagggaacacgtccactccatcctgtcagagtacaaatggccagccacaacggggggcctgcggaaggtggcgaggtcgctcacggtctcgccgggctgccacctctcgtccagagcgtgtatggcccgatggtgtcatcccatttgttattggcggcaactttactgggagtcagcgcgcggtctttaggcaggcgatgcggcactgggagaagcacacatgtgtcacttttctggagcgcacggatgaagactcgtacatcgtatttacctatagaccttgcggctgctgctcgtacgttggacggcgcggcggagggccccaagccatttccatcggaaagaactgcgacaaattcggcatcgtagttcacgagcttggccacgtagtcggattttggcatgaacacacacgcccagatagagacagacacgtatcaattgtgagggagaacattcagcccggggtgttgcactcgtcattgcttctgctgtcctgcggatcccggaacggagctagttttccgtgctcgctcgagagcagcattcaccaggctctctgctggacagggctgttccttcgtccctctccctttccccggctgcctctggccgcaccaaggaccctcagagccggggtttag

SEQ ID NO: 341526 - DNA, 1869 bp, Artificial Sequence
  derived and/or modified sequence
atgcccggcgtggcccggctgcccctgctgctgggcctgctgctgcttcctcgcccaggtcgccccctcgacttagcggactatacttatgacctcgccgaagaggatgacagcgagcccctcaattacaaagatccctgcaaggccgccgcgttccttggcgacatcgctcttgacgaagaagatctgagggcctttcaggttcagcaggccgtcgatctgcggaggcataccgcccgaaaatcgagcatcaaggccgcagtgccaggcaacacatccaccccatcttgtcagtccacaaatgggcaaccccagcgcggcgcgtgtgggcgctggcgcggaaggtcgcgctccagacgtgctgctaccagtcgaccagagcgggtgtggcccgacggagtgatcccttttgtgatcggcgggaattttactggatcacagcgtgccgtcttcagacaagctatgaggcactgggagaaacacacctgcgtcacttttctcgaacggactgatgaagatagctacattgtgtttacttatcggccttgcgggtgctgcagctacgtgggcagaagaggaggcgggcctcaggccatttccattggcaagaactgtgacaagttcggcattgtcgtccacgagcttggccatgtggttggcttttggcacgaacacactaggccagatagagatcggcacgttagcattgtccgcgaaaatattcaacccggacaggaatacaacttcctgaagatggaaccacaagaggttgaaagtcttggtgagacttacgattttgattcaattatgcattatgccaggaacactttctccaggggaatcttcctagacaccattgtgcctaaatatgaagtgaacggtgtcaagcctcctatcgggcagagaaccaggctgagtaagggtgatatcgcgcaggctcgaaaactatataagtgtcccgcgtgcggtgaaaccctgcaggactctaccgggaatttttcttcgccagagtacccgaatggttacagcgcacatatgcactgcgtctggcggatctcggttacccctggcgagaagatcatcctgaattttactagcctggacttataccgatcccggctttgttggtatgattacgtggaagtgagggacggattctggaggaaagcacctctgcggggcagattctgcggttctaagctgcctgaaccaatcgtcagtacggacagtcggctgtgggtagagtttcgctccagttccaactgggttggaaaaggatttttcgcagtctatgaagccatctgtggcggagacgtgaaaaaggactacggtcacatccaaagcccaaattatcccgacgattatcgaccatccaaagtgtgcatttggcggatccaggtgtctgaagggttccatgtgggactcactttccagagttttgagattgagaggcacgacagctgtgcttatgactacctggaggtgagggacgggcatagcgagagcagtaccctgatcggcagatattgcggctacgagaaacctgacgatatcaaatccacctcatccagactgtggctgaaatttgtcagcgacggaagtattaacaaagccgggtttgcagttaacttcttcaaggaggtggatgagtgttcccggcccaatagggggggctgtgagcagcggtgcctcaacactctcggctcatacaaatgcagctgtgacccgggatacgaactagccccagacaagaggcgatgtgaaggatgctacgatctgcaggtgggcaaaccactgctttgggatcgccattgcttcagactatctacccatggacctgaaatgctgggcacagccttaagagggtag

SEQ ID NO: 341527 - DNA, 909 bp, Artificial Sequence
  derived and/or modified sequence
atgcccggtgtcgcaagacttccactgctcctgggattattactattacctcggcctggcagacccctggaccttgccgactatacatacgacctcgcagaggaagatgactcagaacctctaaattacaaagacccatgcaaagccgctgctttcctgggggacattgcgctagacgaagaggacctaagggcttttcaggtgcaacaggccgtagacttgagacggcacaccgctcgaaaaagttcaatcaaggcggcagtgcccggaaacacctcgaccccatcttgccagtccactaacggccagccccaaagaggtgcctgcgggcgttggagagggcgaagccgctcccgacgcgcagcaaccagcaggccagagcgggtgtggcccgatggagtaattccgttcgtcataggaggcaattttactggtagccagcgggctgtatttagacaggcgatgcggcattgggagaagcacacttgcgttacttttctggagagaaccgatgaggactcgtacattgtgtttacatatcgaccttgcggttgttgttcgtacgtcgggagacgaggaggaggtccacaggctatctccattgggaaaaactgcgataagtttggcattgttgtccatgaacttggtcacgtggttggattttggcacgagcacacacgccctgacagagatagacacgtcagcatagtgcgcgagaacatccagcccggtgtgcttcactcgagtctgctgctgctatcatgcgggtctagaaatggagcctcatttccatgttcactagagagtagcatacaccaggccttatgttggacgggactctttctgcggccatctccctttcctcggctccctctggcagcgcctagaacgttaagagctggagtgtag

SEQ ID NO: 341528 - DNA, 1869 bp, Artificial Sequence
  derived and/or modified sequence
atgccgggtgtggccaggctcccactcctgctgggcctgcttctcctgccgagacccggaagaccgttggatctcgccgactatacttatgatctggcagaagaggatgacagcgagcctctgaattataaggacccttgcaaggccgcagcgttcctcggggatattgctcttgatgaagaggacttaagggcttttcaggtgcaacaggccgtggaccttagacgccacactgcccgtaaaagcagtataaaagccgcagtgccgggaaacaccagtacccctagttgccagtccacaaatggacagccccagcgaggcgcttgtggccgatggcgcggaaggagtagatccaggagagcggctacatccaggccagaacgcgtgtggccggatggagtgatcccattcgtgattggcggaaacttcaccggaagccagagagctgttttcaggcaggccatgcgtcactgggaaaaacatacatgtgttaccttcctggaaaggactgatgaggacagttatatagtgtttacctatagaccatgcgggtgctgctcttatgtgggcagaaggggcggtggccctcaggcaatttcgatcgggaagaactgtgataagttcggtatcgttgttcatgagctcggtcatgtcgtcgggttttggcatgagcacaccagacccgatcgggatcggcatgtgtctatcgtgagagagaacatccagcccggacaggagtacaactttcttaagatggagccacaggaggttgaatctctgggcgaaacctatgatttcgattccattatgcactacgctagaaataccttctccagagggatttttttagacaccatcgtacctaagtatgaagtgaatggcgtgaaacctcccattgggcaaaggaccaggttgagcaagggtgatatagcacaggcgcgtaagttatacaaatgtcccgcatgcggtgagaccctgcaggatagtacgggcaacttttcctcgcctgaataccctaacggttattcggcccacatgcattgcgtttggcgcatctctgtcacgcccggagagaagataattcttaattttacatcgctggacttgtacaggagcagactgtgctggtacgactatgtggaggtgcgtgatggcttctggcgcaaagctccactaaggggtagattctgcggttcaaaactgcccgagccaatcgtgtctactgacagtcgcctgtgggtcgagttccgaagttcgtctaactgggttggcaaaggcttctttgccgtttatgaggccatttgtggcggagacgtgaagaaggactatggacacatccagtcaccgaactaccctgacgactatcgcccatcaaaagtgtgtatctggcggatacaggtgagcgagggattccacgtggggttgaccttccaaagcttcgaaatagagcgccacgactcctgcgcgtacgactatctggaggtacgagatggccactctgagagcagtactttgataggtagatactgcggatatgagaaacctgacgacatcaagtcgacctcttcccgcctgtggctgaagtttgtgtcggacgggtctattaataaggcgggattcgctgttaatttttttaaggaagtagatgagtgctcacgacccaatcggggaggatgcgaacagaggtgcctaaatactttggggtcttacaaatgtagctgtgacccagggtacgaattggcccctgacaagcgaaggtgtgaggggtgctacgacctgcaggtgggtaagcctctcctgtgggatcgccattgctttcgtctgtctacccacggcccagaaatgctgggcacagcattgcgaggttag

SEQ ID NO: 341529 - DNA, 2205 bp, Artificial Sequence
  derived and/or modified sequence
gaagaggtcggggagcgagggcgggagcggtcgcggtcgcgatcgagcaagcaagcgggcgagaggacgccctcccctggcctccagtgcgccgcttccctcgccgccgccccgccagcatgcccggcgtggcccgcctgccgctgctgctcgggctgctgctgctcccgcgtcccggccggccgctggacttggccgactacacctatgacctggcggaggaggacgactcggagcccctcaactacaaagacccctgcaaggcggctgcctttcttggggacattgccctggacgaagaggacctgagggccttccaggtacagcaggctgtggatctcagacggcacacagctcgtaagtcctccatcaaagctgcagttccaggaaacacttctacccccagctgccagagcaccaacgggcagcctcagaggggagcctgtgggagatggagaggtagatcccgtagccggcgggcggcgacgtcccgaccagagcgtgtgtggcccgatggggtcatcccctttgtcattgggggaaacttcactggtagccagagggcagtcttccggcaggccatgaggcactgggagaagcacacctgtgtcaccttcctggagcgcactgacgaggacagctatattgtgttcacctatcgaccttgcgggtgctgctcctacgtgggtcgccgcggcgggggcccccaggccatctccatcggcaagaactgtgacaagttcggcattgtggtccacgagctgggccacgtcgtcggcttctggcacgaacacactcggccagaccgggaccgccacgtttccatcgttcgtgagaacatccagccagggcaggagtataacttcctgaagatggagcctcaggaggtggagtccctgggggagacctatgacttcgacagcatcatgcattacgctcggaacacattctccaggggcatcttcctggataccattgtccccaagtatgaggtgaacggggtgaaacctcccattggccaaaggacacggctcagcaagggggacattgcccaagcccgcaagctttacaagtgcccagcctgtggagagaccctgcaagacagcacaggcaacttctcctcccctgaataccccaatggctactctgctcacatgcactgcgtgtggcgcatctctgtcacacccggggagaagatcatcctgaacttcacgtccctggacctgtaccgcagccgcctgtgctggtacgactatgtggaggtccgagatggcttctggaggaaggcgcccctccgaggccgcttctgcgggtccaaactccctgagcctatcgtctccactgacagccgcctctgggttgaattccgcagcagcagcaattgggttggaaagggcttctttgcagtctacgaagccatctgcgggggtgatgtgaaaaaggactatggccacattcaatcgcccaactacccagacgattaccggcccagcaaagtctgcatctggcggatccaggtgtctgagggcttccacgtgggcctcacattccagtcctttgagattgagcgccacgacagctgtgcctacgactatctggaggtgcgcgacgggcacagtgagagcagcaccctcatcgggcgctactgtggctatgagaagcctgatgacatcaagagcacgtccagccgcctctggctcaagttcgtctctgacgggtccattaacaaagcgggctttgccgtcaactttttcaaagaggtggacgagtgctctcggcccaaccgcgggggctgtgagcagcggtgcctcaacaccctgggcagctacaagtgcagctgtgaccccgggtacgagctggccccagacaagcgccgctgtgaggggtgttatgatctacaggttgggaaacccctgttgtgggacagacactgtttccgcctctccacgcatggtcccgagatgctggggacagcactccgaggctaatggctccagctcactaggccgatcctgctgtgcccccgagctgctccctttcctgcacctcccaggaccgcccctccctgaactgctttccctgagccccttattcccgctcactccctcttggaggaccttggcctgttcatttgcagagaagatagaaatggccacacttatgaccccttagctcccccactcctccctacaggcccacccctga

SEQ ID NO: 341530 - DNA, 909 bp, Artificial Sequence
  derived and/or modified sequence
atgcccggcgtggccagactgcccctgctgctgggcctgctgctgctgcccagacccggcagacccctggacctggccgactacacctacgacctggccgaggaggacgacagcgagcccctgaactacaaggacccctgcaaggccgccgccttcctgggcgacatcgccctggacgaggaggacctgagagccttccaggtgcagcaggccgtggacctgagaagacacaccgccagaaagagcagcatcaaggccgccgtgcccggcaacaccagcacccccagctgccagagcaccaacggccagccccagagaggcgcctgcggcagatggagaggcagaagcagaagcagaagagccgccaccagcagacccgagagagtgtggcccgacggcgtgatccccttcgtgatcggcggcaacttcaccggcagccagagagccgtgttcagacaggccatgagacactgggagaagcacacctgcgtgaccttcctggagagaaccgacgaggacagctacatcgtgttcacctacagaccctgcggctgctgcagctacgtgggcagaagaggcggcggcccccaggccatcagcatcggcaagaactgcgacaagttcggcatcgtggtgcacgagctgggccacgtggtgggcttctggcacgagcacaccagacccgacagagacagacacgtgagcatcgtgagagagaacatccagcccggcgtgctgcacagcagcctgctgctgctgagctgcggcagcagaaacggcgccagcttcccctgcagcctggagagcagcatccaccaggccctgtgctggaccggcctgttcctgagacccagccccttccccagactgcccctggccgcccccagaaccctgagagccggcgtgtag

SEQ ID NO: 341531 - DNA, 1869 bp, Artificial Sequence
  derived and/or modified sequence
atgcccggcgtggccagactgcccctgctgctgggcctgctgctgctgcccagacccggcagacccctggacctggccgactacacctacgacctggccgaggaggacgacagcgagcccctgaactacaaggacccctgcaaggccgccgccttcctgggcgacatcgccctggacgaggaggacctgagagccttccaggtgcagcaggccgtggacctgagaagacacaccgccagaaagagcagcatcaaggccgccgtgcccggcaacaccagcacccccagctgccagagcaccaacggccagccccagagaggcgcctgcggcagatggagaggcagaagcagaagcagaagagccgccaccagcagacccgagagagtgtggcccgacggcgtgatccccttcgtgatcggcggcaacttcaccggcagccagagagccgtgttcagacaggccatgagacactgggagaagcacacctgcgtgaccttcctggagagaaccgacgaggacagctacatcgtgttcacctacagaccctgcggctgctgcagctacgtgggcagaagaggcggcggcccccaggccatcagcatcggcaagaactgcgacaagttcggcatcgtggtgcacgagctgggccacgtggtgggcttctggcacgagcacaccagacccgacagagacagacacgtgagcatcgtgagagagaacatccagcccggccaggagtacaacttcctgaagatggagccccaggaggtggagagcctgggcgagacctacgacttcgacagcatcatgcactacgccagaaacaccttcagcagaggcatcttcctggacaccatcgtgcccaagtacgaggtgaacggcgtgaagccccccatcggccagagaaccagactgagcaagggcgacatcgcccaggccagaaagctgtacaagtgccccgcctgcggcgagaccctgcaggacagcaccggcaacttcagcagccccgagtaccccaacggctacagcgcccacatgcactgcgtgtggagaatcagcgtgacccccggcgagaagatcatcctgaacttcaccagcctggacctgtacagaagcagactgtgctggtacgactacgtggaggtgagagacggcttctggagaaaggcccccctgagaggcagattctgcggcagcaagctgcccgagcccatcgtgagcaccgacagcagactgtgggtggagttcagaagcagcagcaactgggtgggcaagggcttcttcgccgtgtacgaggccatctgcggcggcgacgtgaagaaggactacggccacatccagagccccaactaccccgacgactacagacccagcaaggtgtgcatctggagaatccaggtgagcgagggcttccacgtgggcctgaccttccagagcttcgagatcgagagacacgacagctgcgcctacgactacctggaggtgagagacggccacagcgagagcagcaccctgatcggcagatactgcggctacgagaagcccgacgacatcaagagcaccagcagcagactgtggctgaagttcgtgagcgacggcagcatcaacaaggccggcttcgccgtgaacttcttcaaggaggtggacgagtgcagcagacccaacagaggcggctgcgagcagagatgcctgaacaccctgggcagctacaagtgcagctgcgaccccggctacgagctggcccccgacaagagaagatgcgagggctgctacgacctgcaggtgggcaagcccctgctgtgggacagacactgcttcagactgagcacccacggccccgagatgctgggcaccgccctgagaggctag

SEQ ID NO: 341532 - protein, 525 aa, Artificial Sequence
  derived and/or modified sequence
MLRTILDAPQRLLKEGRASRQLVLVVVFVALLLDNMLFTVVVPIVPTFLYDMEFKEVNSSLHLGHAGSSPHALASPAFSTIFSFFNNNTVAVEESVPSGIAWMNDTASTIPPPATEAISAHKNNCLQGTGFLEEEITRVGVLFASKAVMQLLVNPFVGPLTNRIGYHIPMFAGFVIMFLSTVMFAFSGTYTLLFVARTLQGIGSSFSSVAGLGMLASVYTDDHERGRAMGTALGGLALGLLVGAPFGSVMYEFVGKSAPFLILAFLALLDGALQLCILQPSKVSPESAKGTPLFMLLKDPYILVAAGSICFANMGVAILEPTLPIWMMQTMCSPKWQLGLAFLPASVSYLIGTNLFGVLANKMGRWLCSLIGMLVVGTSLLCVPLAHNIFGLIGPNAGLGLAIGMVDSSMMPIMGHLVDLRHTSVYGSVYAIADVAFCMGFAIGPSTGGAIVKAIGFPWLMVITGVINIVYAPLCYYLRSPPAKEEKLAILSQDCPMETRMYATQKPTKEFPLGEDSDEEPDHEE

SEQ ID NO: 341533 - protein, 385 aa, Artificial Sequence
  derived and/or modified sequence
MLRTILDAPQRLLKEGRASRQLVLVVVFVALLLDNMLFTVVVPIVPTFLYDMEFKEVNSSLHLGHAGSSPHALASPAFSTIFSFFNNNTVAVEESVPSGIAWMNDTASTIPPPATEAISAHKNNCLQGTGFLEEEITRVGVLFASKAVMQLLVNPFVGPLTNRIGYHIPMFAGFVIMFLSTVMFAFSGTYTLLFVARTLQGIGSSFSSVAGLGMLASVYTDDHERGRAMGTALGGLALGLLVGAPFGSVMYEFVGKSAPFLILAFLALLDGALQLCILQPSKVSPESAKGTPLFMLLKDPYILVAAGSICFANMGVAILEPTLPIWMMQTMCSPKWQLGLAFLPASVSYLIGTNLFGVLANKMGRWLCSLIGMLVVGTSLLCLPS

SEQ ID NO: 341534 - DNA, 1578 bp, Artificial Sequence
  derived and/or modified sequence
atgcttcgcacgatcctcgacgctccacagagacttctcaaagagggtcgtgcatcacgccaacttgttctcgtcgtcgtcttcgtcgccttgttactggataacatgctctttacagttgtcgtgccgatcgttcccaccttcctgtacgatatggaattcaaagaggtgaacagttctctgcatctggggcacgcaggctcctccccccatgccctggcgagccctgccttttcgaccattttttccttctttaataataacaccgtggccgtggaggaatcagttcctagcggcatcgcctggatgaatgataccgcttctaccatccctccaccagccacagaggccatctctgctcataaaaataactgcctgcagggaacaggatttctcgaagaggaaattactagggtaggcgtactgttcgctagcaaagctgtcatgcagctgctggttaaccctttcgttgggcccctaacgaatcggatcgggtaccacattccgatgtttgccggttttgtgatcatgttcctgagcactgttatgttcgctttttctgggacctatacccttctgttcgtggctcgtacactgcagggaatcggtagctcattttcttctgtggccggcctggggatgttggcaagcgtgtatacagatgatcacgagcggggccgcgccatgggtacagcccttgggggtttagccctgggcctcttagtgggcgcgcccttcgggagtgtcatgtacgaatttgtcggcaagagtgcccctttcctcatactggccttcctcgcgctcttggacggcgccctgcaattatgcatattgcaaccctccaaggtgtcaccagaatccgcgaaggggacccctctgttcatgctcctgaaagatccttatattctggtggccgcaggcagcatatgctttgccaatatgggcgtcgcaatccttgagcctacattgcctatttggatgatgcagacaatgtgttctcccaagtggcaactgggtttggcctttttgccagcgtctgtgagctacctcatcgggaccaacctcttcggcgttctggcaaacaaaatgggacgttggctgtgttcccttatcggaatgcttgtggttgggacctctctcctgtgcgttccactggcacacaatatctttggactgattggacctaatgctggcctgggattagctattggcatggttgatagctccatgatgcctatcatggggcatctggtggacctcaggcacactagtgtttatggtagcgtttacgccattgccgacgtagccttttgcatggggtttgccattggcccaagcactggtggcgcaattgtcaaggcgattggatttccatggctgatggtgataaccggtgttattaacatcgtatatgcccccctatgctattacctccggtcacctcccgccaaggaggaaaaattggccattctctcacaggattgcccaatggagacaaggatgtatgcaacacaaaagcctacaaaagagttcccgctgggagaggattctgatgaagagcctgatcacgaggagtag

SEQ ID NO: 341535 - DNA, 1578 bp, Artificial Sequence
  derived and/or modified sequence
atgttacgtaccattctggacgcgccccagcggcttctcaaggaagggcgtgccagtagacagctagttctcgtggtggtgtttgtggcactgctcctcgataatatgttattcaccgttgtggtcccgattgtacctacgtttctctacgacatggagttcaaagaggttaacagctccctgcatttgggccacgcgggatcatcaccccatgcccttgccagcccggccttctctaccattttcagtttctttaacaacaatacagtcgcagtggaggaatccgtgccttcgggcatcgcctggatgaacgacaccgcctccacgataccccctccagcaacagaagccatttccgctcacaaaaacaattgcttgcagggtaccggattcctggaagaggaaattacaagagtgggagtgctgtttgcttccaaagcagtgatgcagctgctggttaatcccttcgtaggacccctgacgaatcgaatcggctaccatataccaatgttcgccgggtttgtgattatgttcttaagtactgtcatgtttgcttttagcgggacttacaccctgttgtttgtggccaggactctgcagggaattggaagttccttcagctccgtggcaggtttgggcatgttggccagtgtctacactgatgaccacgaacggggtagagccatgggaaccgctctcggcggtctcgcgctgggccttctggttggcgccccgtttggttcagtcatgtatgaattcgttggaaaatcagccccctttctgattctggcattcctggctctgctggatggggccttgcagttgtgtattctgcagccttcgaaagtgtcgcccgaatcggccaaagggactccgctctttatgcttttaaaggacccctacattctggtcgctgccggaagcatctgttttgctaacatgggcgtcgcaatcttagagccaaccttgcccatctggatgatgcagaccatgtgctcaccgaagtggcaactgggattggccttcctgcccgcaagcgttagttacctaattggaacgaatctgtttggggtcctggccaacaagatgggacgctggctttgcagcttgatagggatgctcgtagtcggcacttcgctgctgtgcgtgcccttggcccacaatattttcggattaatcggaccaaacgccggtttgggtctggccatcggaatggtagactcctccatgatgcccattatgggtcatcttgtcgatctcaggcatacctccgtatacggatctgtgtatgcaatcgcagacgttgccttctgtatgggatttgcaattggccctagcaccggtggcgccattgttaaagccatcggctttccttggctcatggttatcacgggcgtgatcaatattgtatatgctccgttgtgctattatctaaggtctcctccggccaaagaagaaaagctcgctattctcagccaggattgccccatggaaacccgcatgtatgccacccagaagccaactaaggagttccctcttggcgaggatagtgacgaggaacccgatcacgaggaatag

SEQ ID NO: 341536 - DNA, 1578 bp, Artificial Sequence
  derived and/or modified sequence
atgctgcggaccatcctggatgccccccagaggctgctgaaggagggccgggccagccggcagctggtgctggtggtggtgtttgtggccctgctgctggacaacatgctgttcaccgtggtggtgcccatcgtgcccaccttcctgtatgacatggagttcaaggaggtgaacagcagcctgcacctgggccacgccggcagcagcccccacgccctggccagccctgccttcagcaccatcttctccttcttcaacaacaacacagtggccgtggaggagagcgtgcccagcggcatcgcctggatgaatgacacagccagcaccatccccccaccagccacagaggccatcagcgcccacaagaacaactgcctgcagggcaccggcttcctggaggaggagatcaccagggtgggcgtgctgtttgccagcaaggctgtgatgcagctgctggtgaacccctttgtgggccccctgaccaaccgcatcggctaccacatccccatgtttgctggcttcgtcatcatgttcctgagcacagtgatgtttgccttcagcggcacctacaccctgctgtttgtggcccggaccctgcagggcatcggcagcagcttcagctctgtggccggcctgggcatgctggcctctgtgtacacagatgaccacgagcggggccgggccatgggcacagccctgggcggcctggccctgggcctgctggtgggcgcccccttcggctctgtgatgtatgaatttgtgggcaagagcgcccccttcctgatcctggccttcctggccctgctggatggagccctgcagctgtgcatcctgcagcccagcaaggtgtccccagagagcgccaagggcacccccctcttcatgctgctgaaggacccctacatcctggtggccgccggcagcatctgctttgccaacatgggcgtggccatcctggagcccaccctgcccatctggatgatgcagaccatgtgcagccccaagtggcagctgggcctggccttcctgcctgcctctgtgtcctacctgattggcaccaacctgtttggagtgctggccaacaagatgggccgctggctgtgcagcctgattggcatgctggtggtgggcaccagcctgctgtgtgtgcccctggcccacaacatcttcggcctgattggccccaatgccggcctgggcctggccatcggcatggtggacagctccatgatgcccatcatgggccacctggtggacctgcggcacacctctgtgtatggctctgtgtatgccatcgcagatgtggccttctgcatgggctttgccatcggccccagcactggaggagccatcgtgaaggccatcggcttcccctggctgatggtgatcaccggggtcatcaacatcgtgtatgcccccctgtgctactacctgcggagccccccagccaaggaggagaagctggccatcctgagccaggactgccccatggagaccaggatgtatgccacccagaagcccaccaaggagttccccctgggagaagattctgatgaggagccagaccacgaggagtag

SEQ ID NO: 341537 - DNA, 1578 bp, Artificial Sequence
  derived and/or modified sequence
atgctgcggaccatcctggacgccccccagcggctgctgaaggaggggagggcctccagacagctggtactggtggtggtcttcgtagctctgctgttggataatatgctgttcaccgttgttgtgcccatcgtgcccaccttcctgtatgatatggaatttaaagaggtcaattctagtctccacttgggacatgcaggtagttctccacacgcgctcgcatcccctgctttttcaaccatcttcagcttctttaataataatactgttgctgtggaagaatctgtgccatccgggattgcctggatgaatgacaccgcgagcaccatacccccacctgcgaccgaggcaatctccgcacataaaaataattgtctacaggggacaggattcttagaggaagagataacacgagtcggggttctgttcgcttccaaagccgtcatgcagttgctggtcaacccctttgtaggccccctgactaatcgcattggataccacattccgatgttcgctggttttgtcattatgttcctcagtacagtgatgtttgctttctccgggacatataccttactgttcgtcgctagaacactccagggaattggcagctccttctcaagcgtcgcaggcctaggcatgctcgcttctgtctataccgacgaccacgagcggggccgggctatgggcacagcactggggggcctggccttgggtctcctggtgggtgctcccttcggctctgtgatgtatgagttcgtgggcaaaagtgcccctttcttgatcctggccttcctggccctgcttgatggggccctccagttgtgtatcctccagccttctaaggtatcgcctgaatcagccaaagggactccactattcatgctcctgaaagacccgtatatcttggtggctgctggcagtatctgtttcgccaatatgggcgtcgctatcctggagccaactttaccgatctggatgatgcagacgatgtgttctcccaagtggcaactggggctcgcctttttgccggcgtcggtgtcatatctcattggtaccaatttgtttggcgttctggccaacaaaatgggccggtggctgtgctcccttatcgggatgctggttgtgggaaccagtttgctgtgcgtgccactggcccacaatatttttggcctgattggccccaatgcggggctggggctggccatcgggatggtggattccagcatgatgcccatcatgggacatcttgttgaccttaggcacacttctgtgtatggctccgtgtacgcaatcgctgacgtcgctttctgcatggggtttgcaatcgggcccagtacagggggcgccatcgtcaaagcaattggtttcccatggctaatggtgatcacgggagtcatcaatatcgtctacgcgcctctatgctactacttgcgctcgccccctgcaaaagaagagaagcttgcaatcctgagtcaggactgccctatggagacaagaatgtatgcaactcagaaacccacaaaggaatttccactcggggaggatagcgatgaggaacccgaccacgaggagtag

SEQ ID NO: 341538 - DNA, 1578 bp, Artificial Sequence
  derived and/or modified sequence
atgctgcggaccatcctggacgccccccagcggctgctgaaggagggacgggcgtcaagacagcttgttctggtggtggtttttgtcgctctgctcttagataatatgctcttcactgtcgtcgtcccaattgtgcctactttcctttatgatatggagttcaaggaggtgaattcatcactccatctgggtcatgccggatccagccctcacgcgctggcatcacctgctttcagcacaatcttctccttttttaataataataccgttgcagtagaggagtccgtcccatcaggaatcgcatggatgaatgatacggcaagtaccatcccccctcccgctaccgaggcgatctcagcccacaagaataactgtctccaaggaaccggctttctcgaggaggaaatcacacgggtgggggtgctgtttgcaagcaaagccgtcatgcagttgctagtgaatccttttgtgggtccactgaccaacaggattggataccacattccaatgtttgccggtttcgtaattatgttcttgagcactgttatgttcgctttcagcgggacttataccctgctcttcgttgctcggacattgcaagggatcggtagctcattttcctcagtggctggcctcggtatgttggcctccgtgtacacggatgatcacgaaaggggcagagcaatgggcacagctctggggggactggcactgggactgctcgtgggagctccgttcggctccgtgatgtacgaattcgtggggaaatccgctccattcctgattctggccttccttgccctgctagatggcgcattgcaattatgcatcctgcagcccagtaaagtgtcgcccgagagtgcaaagggcacaccactgtttatgcttctaaaagatccttatattctggtggccgccggttctatttgtttcgccaacatgggagtagctatcctcgaacccactttacccatttggatgatgcagacaatgtgctcccccaagtggcaactggggcttgcctttctccccgcttccgtctcgtatctgattggcactaaccttttcggcgtgctcgctaataaaatgggacgctggctgtgcagcctcatcggaatgctcgtggttggcacctctctcttgtgcgtgcccctcgcccataacatctttgggctaattggcccaaacgccggcctgggattggctatcggaatggtggattctagcatgatgcctatcatgggtcatcttgtagacctacggcacacctcagtatatggatctgtgtatgcgatagccgatgtcgctttttgtatgggtttcgccatcggcccttcgacgggcggcgcgatcgttaaagcgatcggatttccttggcttatggtgattaccggggttatcaacatcgtctacgctccactgtgttactaccttaggagcccgcctgccaaagaggaaaagctcgccattctgtcgcaggattgccccatggagacacgcatgtatgccacccaaaagccaacaaaggaatttcccttgggcgaggattccgatgaagagccggatcacgaagagtag

SEQ ID NO: 341539 - DNA, 1578 bp, Artificial Sequence
  derived and/or modified sequence
atgctgaggaccattctggacgcaccacagcgcctgctgaaggagggacgggcatcaaggcaacttgtgctcgtcgtagtgttcgtcgcccttctccttgacaacatgctctttacagttgtggtgcctatcgttccaactttcctgtatgacatggagtttaaggaggttaactctagtcttcatcttggacacgccggatcctcccctcacgccctcgcttccccggcattttccactatttttagctttttcaataataataccgtcgcagtggaagaaagcgtgccttcaggcatcgcctggatgaatgacacggcctccaccataccccctcctgcgaccgaggctatatcagcccataagaacaattgcttgcagggaacagggttcctggaggaggagatcacccgcgtcggcgtcctgttcgccagcaaagccgtgatgcagctgttggtgaacccctttgtagggcctctgaccaaccggataggttaccacatcccaatgtttgcaggttttgtcataatgttcctgtctacggtgatgtttgcatttagcgggacatacacgctgctctttgttgccagaaccctccagggaatcggctccagcttctctagtgtagctggacttggcatgctcgcttccgtatacaccgacgaccatgaaagggggcgtgctatgggaaccgcgctcggtgggctggctttaggccttttggtgggcgctccatttgggtctgtaatgtatgaattcgtgggaaaatcagccccttttctgatcctggccttcctggccctgctggacggcgcactgcagctctgcatcttgcagcccagcaaagtctctcccgaaagcgcgaaaggaacaccgctctttatgcttctgaaagatccctatattttggtcgctgctgggtccatatgttttgcaaacatgggcgtcgcgatcttggagcccactcttcccatctggatgatgcagacaatgtgcagtcccaagtggcagctgggcctcgcatttttaccggcaagtgtcagttacttgatcggcaccaacctgtttggggtacttgccaataaaatggggcgatggctctgttctcttatcggtatgctggtggtagggacctctttattatgcgtgcctctggcccacaatatttttgggctgatcggacccaatgctggtctaggcctggcaattgggatggtggattcttccatgatgccaataatgggtcatctggtagacctgcgccatacgtcagtttatgggtccgtttatgcgatcgccgacgtggcattttgcatgggttttgctattgggccaagcactggaggcgctattgtcaaagcaattggattcccttggttaatggtgataacaggggttataaatatcgtgtacgcgcctctctgctactacttgagaagcccccctgcgaaagaagaaaagttggctatcttgtctcaggattgccccatggagacaaggatgtacgctactcagaagccaaccaaagaattcccgctcggagaagacagcgacgaagaacccgaccatgaggaatag

SEQ ID NO: 341540 - DNA, 1578 bp, Artificial Sequence
  derived and/or modified sequence
atgctgaggactatactggacgctccacagcgcttgctgaaggagggaagagccagtagacaattggtgctggtggtagtgttcgttgcactcctgctagacaatatgcttttcacagtggtcgtcccaatcgtgcctacatttctttacgatatggagttcaaggaggtgaatagctcattacaccttgggcacgccggtagctcgcctcacgccctcgcaagcccagcattcagcacgatcttctcattttttaacaacaatactgttgcagtcgaagagagcgtcccatccggcatcgcctggatgaatgacaccgccagcactatcccccctccggctacggaagctatctcggctcacaaaaacaattgtcttcagggcactgggttcctcgaggaagaaatcaccagagttggagtgctatttgcctcgaaggccgtgatgcaattgttggtgaacccattcgttggccctcttacaaatcgaatcggttatcacatccctatgttcgctggctttgtgatcatgttcctctcgaccgttatgttcgcgttcagcggaacctacactctgttgtttgtggccaggactctccagggcatcggcagtagctttagttccgtcgccggattgggtatgttggcgtccgtgtacacagacgaccacgagagagggagagccatgggaaccgctctaggcggactggccctgggcctgttggtgggagcacccttcggatcagtgatgtacgaattcgtgggtaagtctgctcccttccttatattggccttcctggcgctccttgatggagcactccaactctgcatacttcagccaagtaaggtaagtcctgaatccgccaagggaactcctctgtttatgctgttaaaagatccttatatcctcgtcgctgctggaagtatttgctttgccaatatgggcgttgctattttggagcccaccctgccaatctggatgatgcagaccatgtgttcccctaaatggcaactgggtctggcgttcttacctgctagcgtctcttatttaatcgggacaaatctgtttggtgttctcgccaataaaatgggacgatggctctgctcactaattggaatgctcgttgtggggacttcgttgctctgcgtacccctggcccacaacattttcggactgataggtcccaacgccggtctcgggttagcaattggtatggtggattcgtctatgatgcctataatggggcacttggtggacttgaggcatacctcagtgtacggcagcgtgtatgcgattgccgatgtggcattctgtatgggctttgcaatcggaccctcaaccggaggcgcaattgtcaaggctatcggttttccctggctcatggtgattaccggggtgataaatatcgtttacgcgccactctgttattacctgcgaagtcctccagcaaaggaggagaagctggccattttgtcccaggattgcccaatggagactaggatgtacgccactcagaagcccaccaaggaatttcccctgggcgaagactcagacgaagagccagatcacgaggaatag

SEQ ID NO: 341541 - DNA, 2753 bp, Artificial Sequence
  derived and/or modified sequence
cacacacacacatacacagaatcctcagataacaggaggcaataaatccaacagcacatccacgttcagagaacagtgtccctgctgtcttgctaacagctgccaatacctcactgagtgcctcacaccaacatgggctccaagtgagtttccttcgtctgggcagactccctcccctcttccataaaggctgcaggagacctgtagctgtcacaggaccttccctaagagcccgcaggggaagactgccccagtccggccatcaccatgctccggaccattctggatgctccccagcggttgctgaaggaggggagagcgtcccggcagctggtgctggtggtggtattcgtcgctttgctcctggacaacatgctgtttactgtggtggtgccaattgtgcccaccttcctatatgacatggagttcaaagaagtcaactcttctctgcacctcggccatgccggaagttccccacatgccctcgcctctcctgccttttccaccatcttctccttcttcaacaacaacaccgtggctgttgaagaaagcgtacctagtggaatagcatggatgaatgacactgccagcaccatcccacctccagccactgaagccatctcagctcataaaaacaactgcttgcaaggcacaggtttcttggaggaagagattacccgggtcggggttctgtttgcttcaaaggctgtgatgcaacttctggtcaacccattcgtgggccctctcaccaacaggattggatatcatatccccatgtttgctggctttgttatcatgtttctctccacagttatgtttgctttttctgggacctatactctactctttgtggcccgaacccttcaaggcattggatcttcattttcatctgttgcaggtcttggaatgctggccagtgtctacactgatgaccatgagagaggacgagccatgggaactgctctggggggcctggccttggggttgctggtgggagctccctttggaagtgtaatgtacgagtttgttgggaagtctgcacccttcctcatcctggccttcctggcactactggatggagcactccagctttgcatcctacagccttccaaagtctctcctgagagtgccaaggggactcccctctttatgcttctcaaagacccttacatcctggtggctgcagggtccatctgctttgccaacatgggggtggccatcctggagcccacactgcccatctggatgatgcagaccatgtgctcccccaagtggcagctgggtctagctttcttgcctgccagtgtgtcctacctcattggcaccaacctctttggtgtgttggccaacaagatgggtcggtggctgtgttccctaatcgggatgctggtagtaggtaccagcttgctctgtgttcctctggctcacaatatttttggtctcattggccccaatgcagggcttggccttgccataggcatggtggattcttctatgatgcccatcatggggcacctggtggatctacgccacacctcggtgtatgggagtgtctacgccatcgctgatgtggctttttgcatgggctttgctataggtccatccaccggtggtgccattgtaaaggccatcggttttccctggctcatggtcatcactggggtcatcaacatcgtctatgctccactctgctactacctgcggagccccccggcaaaggaagagaagcttgctattctgagtcaggactgccccatggagacccggatgtatgcaacccagaagcccacgaaggaatttcctctgggggaggacagtgatgaggagcctgaccatgaggagtagcagcagaaggtgctccttgaattcatgatgcctcagtgaccacctctttccctgggaccagatcaccatggctgagcccacggctcagtgggcttcacatacctctgcctgggaatcttctttcctcccctcccatggacactgtccctgatactcttctcacctgtgtaacttgtagctcttcctctatgccttggtgccgcagtggcccatcttttatgggaagacagagtgatgcaccttcccgctgctgtgaggttgattaaacttgagctgtgacgggttctgcaaggggtgactcattgcatagaggtggtagtgagtaatgtgcccctgaaaccagtggggtgactgacaagcctctttaatctgttgcctgattttctctggcatagtcccaacagatcggaagagtgttaccctcttttcctcaacgtgttctttcccgggttttcccagccgagttgagaaaatgttctcagcattgtcttgctgccaaatgccagcttgaagagttttgttttgttttttttcatttatttttttttttaataaagtgagtgatttttctgtggctaaatctagagctgctaaaagggctttaccctcagtgaaaagtgtcttctattttcattatctttcagaaacaggagcccatttctcttctgctggagttattgacattctcctgacctcccctgtgtgttcctaccttttctgaacctcttagactcttagaaataaaagtagaagaaagacagaaaaaataactgattagacccaagatttcatgggaagaagttaaaagaaactgccttgaaatccctcctgattgtagatttcctaacaggaggggtgtaatgtgacattgttcatacttgctaataaatacattattgcctaattca

SEQ ID NO: 341542 - DNA, 2956 bp, Artificial Sequence
  derived and/or modified sequence
cacacacacacatacacagaatcctcagataacaggaggcaataaatccaacagcacatccacgttcagagaacagtgtccctgctgtcttgctaacagctgccaatacctcactgagtgcctcacaccaacatgggctccaagatgaaggcatctttctgatcaggggtttgtagctcaaacaaaagaatgagcgtgcttctagaaccacagagcaagggaacatggtagaggataagctggcaagttgaaaagcgtgggatttcatcccagtttgacactaactgtgcaaccccaaacaaatctcctaaccttcagaggctcggatttcttgtctatgagatgaagtgagtttccttcgtctgggcagactccctcccctcttccataaaggctgcaggagacctgtagctgtcacaggaccttccctaagagcccgcaggggaagactgccccagtccggccatcaccatgctccggaccattctggatgctccccagcggttgctgaaggaggggagagcgtcccggcagctggtgctggtggtggtattcgtcgctttgctcctggacaacatgctgtttactgtggtggtgccaattgtgcccaccttcctatatgacatggagttcaaagaagtcaactcttctctgcacctcggccatgccggaagttccccacatgccctcgcctctcctgccttttccaccatcttctccttcttcaacaacaacaccgtggctgttgaagaaagcgtacctagtggaatagcatggatgaatgacactgccagcaccatcccacctccagccactgaagccatctcagctcataaaaacaactgcttgcaaggcacaggtttcttggaggaagagattacccgggtcggggttctgtttgcttcaaaggctgtgatgcaacttctggtcaacccattcgtgggccctctcaccaacaggattggatatcatatccccatgtttgctggctttgttatcatgtttctctccacagttatgtttgctttttctgggacctatactctactctttgtggcccgaacccttcaaggcattggatcttcattttcatctgttgcaggtcttggaatgctggccagtgtctacactgatgaccatgagagaggacgagccatgggaactgctctggggggcctggccttggggttgctggtgggagctccctttggaagtgtaatgtacgagtttgttgggaagtctgcacccttcctcatcctggccttcctggcactactggatggagcactccagctttgcatcctacagccttccaaagtctctcctgagagtgccaaggggactcccctctttatgcttctcaaagacccttacatcctggtggctgcagggtccatctgctttgccaacatgggggtggccatcctggagcccacactgcccatctggatgatgcagaccatgtgctcccccaagtggcagctgggtctagctttcttgcctgccagtgtgtcctacctcattggcaccaacctctttggtgtgttggccaacaagatgggtcggtggctgtgttccctaatcgggatgctggtagtaggtaccagcttgctctgtgttcctctggctcacaatatttttggtctcattggccccaatgcagggcttggccttgccataggcatggtggattcttctatgatgcccatcatggggcacctggtggatctacgccacacctcggtgtatgggagtgtctacgccatcgctgatgtggctttttgcatgggctttgctataggtccatccaccggtggtgccattgtaaaggccatcggttttccctggctcatggtcatcactggggtcatcaacatcgtctatgctccactctgctactacctgcggagccccccggcaaaggaagagaagcttgctattctgagtcaggactgccccatggagacccggatgtatgcaacccagaagcccacgaaggaatttcctctgggggaggacagtgatgaggagcctgaccatgaggagtagcagcagaaggtgctccttgaattcatgatgcctcagtgaccacctctttccctgggaccagatcaccatggctgagcccacggctcagtgggcttcacatacctctgcctgggaatcttctttcctcccctcccatggacactgtccctgatactcttctcacctgtgtaacttgtagctcttcctctatgccttggtgccgcagtggcccatcttttatgggaagacagagtgatgcaccttcccgctgctgtgaggttgattaaacttgagctgtgacgggttctgcaaggggtgactcattgcatagaggtggtagtgagtaatgtgcccctgaaaccagtggggtgactgacaagcctctttaatctgttgcctgattttctctggcatagtcccaacagatcggaagagtgttaccctcttttcctcaacgtgttctttcccgggttttcccagccgagttgagaaaatgttctcagcattgtcttgctgccaaatgccagcttgaagagttttgttttgttttttttcatttatttttttttttaataaagtgagtgatttttctgtggctaaatctagagctgctaaaagggctttaccctcagtgaaaagtgtcttctattttcattatctttcagaaacaggagcccatttctcttctgctggagttattgacattctcctgacctcccctgtgtgttcctaccttttctgaacctcttagactcttagaaataaaagtagaagaaagacagaaaaaataactgattagacccaagatttcatgggaagaagttaaaagaaactgccttgaaatccctcctgattgtagatttcctaacaggaggggtgtaatgtgacattgttcatacttgctaataaatacattattgcctaattc

SEQ ID NO: 341543 - DNA, 2770 bp, Artificial Sequence
  derived and/or modified sequence
ctgctgtcttgctaacagctgccaatacctcactgagtgcctcacaccaacatgggctccaagtgagtttccttcgtctgggcagactccctcccctcttccataaaggctgcaggagacctgtagctgtcacaggaccttccctaagagcccgcaggggaagactgccccagtccggccatcaccatgctccggaccattctggatgctccccagcggttgctgaaggaggggagagcgtcccggcagctggtgctggtggtggtattcgtcgctttgctcctggacaacatgctgtttactgtggtggtgccaattgtgcccaccttcctatatgacatggagttcaaagaagtcaactcttctctgcacctcggccatgccggaagttccccacatgccctcgcctctcctgccttttccaccatcttctccttcttcaacaacaacaccgtggctgttgaagaaagcgtacctagtggaatagcatggatgaatgacactgccagcaccatcccacctccagccactgaagccatctcagctcataaaaacaactgcttgcaaggcacaggtttcttggaggaagagattacccgggtcggggttctgtttgcttcaaaggctgtgatgcaacttctggtcaacccattcgtgggccctctcaccaacaggattggatatcatatccccatgtttgctggctttgttatcatgtttctctccacagttatgtttgctttttctgggacctatactctactctttgtggcccgaacccttcaaggcattggatcttcattttcatctgttgcaggtcttggaatgctggccagtgtctacactgatgaccatgagagaggacgagccatgggaactgctctggggggcctggccttggggttgctggtgggagctccctttggaagtgtaatgtacgagtttgttgggaagtctgcacccttcctcatcctggccttcctggcactactggatggagcactccagctttgcatcctacagccttccaaagtctctcctgagagtgccaaggggactcccctctttatgcttctcaaagacccttacatcctggtggctgcagggtccatctgctttgccaacatgggggtggccatcctggagcccacactgcccatctggatgatgcagaccatgtgctcccccaagtggcagctgggtctagctttcttgcctgccagtgtgtcctacctcattggcaccaacctctttggtgtgttggccaacaagatgggtcggtggctgtgttccctaatcgggatgctggtagtaggtaccagcttgctctgtctaccaagttagaagtctaaatgaaacctttcagtgatgtccataatggaaaacagaggcaactttattccatgaagaatgagaccaggagtgtatgtttaggttcctctggctcacaatatttttggtctcattggccccaatgcagggcttggccttgccataggcatggtggattcttctatgatgcccatcatggggcacctggtggatctacgccacacctcggtgtatgggagtgtctacgccatcgctgatgtggctttttgcatgggctttgctataggtccatccaccggtggtgccattgtaaaggccatcggttttccctggctcatggtcatcactggggtcatcaacatcgtctatgctccactctgctactacctgcggagccccccggcaaaggaagagaagcttgctattctgagtcaggactgccccatggagacccggatgtatgcaacccagaagcccacgaaggaatttcctctgggggaggacagtgatgaggagcctgaccatgaggagtagcagcagaaggtgctccttgaattcatgatgcctcagtgaccacctctttccctgggaccagatcaccatggctgagcccacggctcagtgggcttcacatacctctgcctgggaatcttctttcctcccctcccatggacactgtccctgatactcttctcacctgtgtaacttgtagctcttcctctatgccttggtgccgcagtggcccatcttttatgggaagacagagtgatgcaccttcccgctgctgtgaggttgattaaacttgagctgtgacgggttctgcaaggggtgactcattgcatagaggtggtagtgagtaatgtgcccctgaaaccagtggggtgactgacaagcctctttaatctgttgcctgattttctctggcatagtcccaacagatcggaagagtgttaccctcttttcctcaacgtgttctttcccgggttttcccagccgagttgagaaaatgttctcagcattgtcttgctgccaaatgccagcttgaagagttttgttttgttttttttcatttatttttttttttaataaagtgagtgatttttctgtggctaaatctagagctgctaaaagggctttaccctcagtgaaaagtgtcttctattttcattatctttcagaaacaggagcccatttctcttctgctggagttattgacattctcctgacctcccctgtgtgttcctaccttttctgaacctcttagactcttagaaataaaagtagaagaaagacagaaaaaataactgattagacccaagatttcatgggaagaagttaaaagaaactgccttgaaatccctcctgattgtagatttcctaacaggaggggtgtaatgtgacattgttcatacttgctaataaatacattattgcctaa

SEQ ID NO: 341544 - DNA, 1578 bp, Artificial Sequence
  derived and/or modified sequence
atgctgagaaccatcctggacgccccccagagactgctgaaggagggcagagccagcagacagctggtgctggtggtggtgttcgtggccctgctgctggacaacatgctgttcaccgtggtggtgcccatcgtgcccaccttcctgtacgacatggagttcaaggaggtgaacagcagcctgcacctgggccacgccggcagcagcccccacgccctggccagccccgccttcagcaccatcttcagcttcttcaacaacaacaccgtggccgtggaggagagcgtgcccagcggcatcgcctggatgaacgacaccgccagcaccatccccccccccgccaccgaggccatcagcgcccacaagaacaactgcctgcagggcaccggcttcctggaggaggagatcaccagagtgggcgtgctgttcgccagcaaggccgtgatgcagctgctggtgaaccccttcgtgggccccctgaccaacagaatcggctaccacatccccatgttcgccggcttcgtgatcatgttcctgagcaccgtgatgttcgccttcagcggcacctacaccctgctgttcgtggccagaaccctgcagggcatcggcagcagcttcagcagcgtggccggcctgggcatgctggccagcgtgtacaccgacgaccacgagagaggcagagccatgggcaccgccctgggcggcctggccctgggcctgctggtgggcgcccccttcggcagcgtgatgtacgagttcgtgggcaagagcgcccccttcctgatcctggccttcctggccctgctggacggcgccctgcagctgtgcatcctgcagcccagcaaggtgagccccgagagcgccaagggcacccccctgttcatgctgctgaaggacccctacatcctggtggccgccggcagcatctgcttcgccaacatgggcgtggccatcctggagcccaccctgcccatctggatgatgcagaccatgtgcagccccaagtggcagctgggcctggccttcctgcccgccagcgtgagctacctgatcggcaccaacctgttcggcgtgctggccaacaagatgggcagatggctgtgcagcctgatcggcatgctggtggtgggcaccagcctgctgtgcgtgcccctggcccacaacatcttcggcctgatcggccccaacgccggcctgggcctggccatcggcatggtggacagcagcatgatgcccatcatgggccacctggtggacctgagacacaccagcgtgtacggcagcgtgtacgccatcgccgacgtggccttctgcatgggcttcgccatcggccccagcaccggcggcgccatcgtgaaggccatcggcttcccctggctgatggtgatcaccggcgtgatcaacatcgtgtacgcccccctgtgctactacctgagaagcccccccgccaaggaggagaagctggccatcctgagccaggactgccccatggagaccagaatgtacgccacccagaagcccaccaaggagttccccctgggcgaggacagcgacgaggagcccgaccacgaggagtag

SEQ ID NO: 341545 - protein, 493 aa, Artificial Sequence
  derived and/or modified sequence
MLRTILDAPQRLLKEGRASRQLVLVVVFVALLLDNMLFTVVVPIVPTFLYDMEFKEVNSSLHLGHAGSSPHALASPAFSTIFSFFNNNTVAVEESVPSGIAWMNDTASTIPPPATEAISAHKNNCLQGTGFLEEEITRVGVLFASKAVMQLLVNPFVGPLTNRIGYHIPMFAGFVIMFLSTVMFAFSGTYTLLFVARTLQGIGSSFSSVAGLGMLASVYTDDHERGRAMGTALGGLALGLLVGAPFGSVMYEFVGKSAPFLILAFLALLDGALQLCILQPSKVSPESAKGTPLFMLLKDPYILVAAGLAFLPASVSYLIGTNLFGVLANKMGRWLCSLIGMLVVGTSLLCVPLAHNIFGLIGPNAGLGLAIGMVDSSMMPIMGHLVDLRHTSVYGSVYAIADVAFCMGFAIGPSTGGAIVKAIGFPWLMVITGVINIVYAPLCYYLRSPPAKEEKLAILSQDCPMETRMYATQKPTKEFPLGEDSDEEPDHEE

SEQ ID NO: 341546 - DNA, 1482 bp, Artificial Sequence
  derived and/or modified sequence
atgcttagaaccatccttgatgccccccagaggcttctgaaggaaggcagggcctctagacagttggtgttggtggtagtgtttgtggcactgctcctggataacatgctgttcaccgtggtcgtgcccatcgtgcccacatttctgtatgatatggagtttaaggaagtgaattcttccctccaccttggtcacgcgggatcctctccgcatgcactcgcatctccagcattttctacaatattctctttctttaataataatactgttgcagtggaggagtcggtgcctagcggaatcgcttggatgaatgacacagcttctaccatcccaccacctgccaccgaggcaatttctgcccataagaataactgtctgcagggcacaggcttcttggaggaagaaattacccgggttggagtcctcttcgcaagtaaggctgtcatgcagctcctcgtcaatccatttgtcggccccttaacaaataggattggctaccatattcctatgttcgctgggttcgtgattatgtttctgtccactgtaatgtttgccttcagcgggacctacactctgctctttgtcgctcgaacccttcaaggaattggttcctccttttcgtcagtggctgggctggggatgctcgcatctgtgtatacagacgaccacgaacggggtcgggcgatgggaactgcacttggaggacttgcccttggccttctcgtgggagcgccattcggaagtgttatgtacgaatttgtgggcaagagcgctccattccttattctagcattccttgccctgctcgatggtgcgttgcagttatgcatcttgcagcccagtaaagtgtcccccgagtctgccaagggtactccactgtttatgttattgaaagatccttatatactggtggcggccggactggcatttcttccagccagcgtgtcctatctcatcgggacaaacttgttcggggttctggccaacaagatgggccgctggctttgtagtttaatcggcatgttggtggtaggtactagtctgctctgtgtgcccctcgcccacaacatcttcggcttaattgggccgaacgctgggctcggtctagccatcggcatggttgacagctccatgatgccaatcatgggccacctagtggacctccggcacacatccgtgtatggctccgtttacgctatcgcggacgtagccttttgcatgggattcgccatcggcccgtcaactggcggggccatcgtgaaggcaattggctttccttggctcatggtaataacgggcgttataaatatcgtctatgccccactgtgctactacctcaggagcccaccagccaaagaagagaagttagccatcttgtctcaggattgcccgatggagacacggatgtacgcaactcagaagccgaccaaagaatttcccctcggggaagacagtgatgaggagcccgaccatgaggaatag

SEQ ID NO: 341547 - DNA, 1482 bp, Artificial Sequence
  derived and/or modified sequence
atgttgagaacaattctcgatgcccctcagcggctcctgaaagagggcagggccagcaggcaactggtgctcgtcgtggtatttgttgcattactgttagacaatatgttgtttacagttgtcgtgcccatcgttccaactttcctatatgacatggagtttaaggaagtaaattcctcccttcacctgggtcacgccgggtcatctcctcacgcgttggctagccccgcgttcagcacgatctttagcttttttaacaataatacagtggctgtggaagagagcgtgcccagtggtatcgcatggatgaacgacactgccagcacgatccctccacccgccactgaggccatctctgcccacaagaacaactgcctgcagggcaccgggttcctggaagaggaaatcactcgcgttggagtacttttcgcctccaaggccgtcatgcagttactggtgaatccatttgttggccctctgacgaatagaattgggtaccacattccaatgttcgcagggtttgtgatcatgttcctgtccacagtcatgttcgccttcagtggcacctataccctgctttttgtggccagaacactacaggggataggatcatccttcagctccgtggccggtctggggatgctggcctccgtgtacaccgacgaccacgagcgtgggagggccatggggaccgctcttggtgggctagcactgggtctgctcgtaggcgctccattcgggtcagtcatgtatgagtttgtgggaaagagtgctccattcttaatattagcctttttggcactgctggacggtgcgctgcagctatgtatattacagccatctaaagtctctcccgagagcgccaagggaacccccctcttcatgctgcttaaggatccctacatcctggttgccgcggggctcgcgttcttgcctgccagcgtctcctacctgattggcactaatctttttggcgttctggctaataagatgggcagatggctgtgctctcttattggcatgctggtcgtgggcacttccctgttgtgtgtacccctggcacacaacatattcggcctgatcggacctaatgcgggactcggacttgctattggcatggttgacagcagtatgatgcccattatgggacacctggtggatctgcgtcataccagcgtctatggatcggtgtatgccattgcagatgtggccttttgtatgggctttgctatcggacccagcaccggtggagctattgtgaaggccattgggttcccatggctcatggttataacgggagtgatcaacattgtgtatgcccctctctgttattacctgcgtagcccaccggcgaaagaagagaagctcgctattctctcccaggattgcccaatggagacaaggatgtacgcaacccagaaacccacaaaagagttccctcttggcgaggactccgacgaggaacccgatcatgaggagtag

SEQ ID NO: 341548 - DNA, 1482 bp, Artificial Sequence
  derived and/or modified sequence
atgctgcggaccatcctggatgccccccagaggctgctgaaggagggccgggccagccggcagctggtgctggtggtggtgtttgtggccctgctgctggacaacatgctgttcaccgtggtggtgcccatcgtgcccaccttcctgtatgacatggagttcaaggaggtgaacagcagcctgcacctgggccacgccggcagcagcccccacgccctggccagccctgccttcagcaccatcttctccttcttcaacaacaacacagtggccgtggaggagagcgtgcccagcggcatcgcctggatgaatgacacagccagcaccatccccccaccagccacagaggccatcagcgcccacaagaacaactgcctgcagggcaccggcttcctggaggaggagatcaccagggtgggcgtgctgtttgccagcaaggctgtgatgcagctgctggtgaacccctttgtgggccccctgaccaaccgcatcggctaccacatccccatgtttgctggcttcgtcatcatgttcctgagcacagtgatgtttgccttcagcggcacctacaccctgctgtttgtggcccggaccctgcagggcatcggcagcagcttcagctctgtggccggcctgggcatgctggcctctgtgtacacagatgaccacgagcggggccgggccatgggcacagccctgggcggcctggccctgggcctgctggtgggcgcccccttcggctctgtgatgtatgaatttgtgggcaagagcgcccccttcctgatcctggccttcctggccctgctggatggagccctgcagctgtgcatcctgcagcccagcaaggtgtccccagagagcgccaagggcacccccctcttcatgctgctgaaggacccctacatcctggtggccgccggcctggccttcctgcctgcctctgtgtcctacctgattggcaccaacctgtttggagtgctggccaacaagatgggccgctggctgtgcagcctgattggcatgctggtggtgggcaccagcctgctgtgtgtgcccctggcccacaacatcttcggcctgattggccccaatgccggcctgggcctggccatcggcatggtggacagctccatgatgcccatcatgggccacctggtggacctgcggcacacctctgtgtatggctctgtgtatgccatcgcagatgtggccttctgcatgggctttgccatcggccccagcactggaggagccatcgtgaaggccatcggcttcccctggctgatggtgatcaccggggtcatcaacatcgtgtatgcccccctgtgctactacctgcggagccccccagccaaggaggagaagctggccatcctgagccaggactgccccatggagaccaggatgtatgccacccagaagcccaccaaggagttccccctgggagaagattctgatgaggagccagaccacgaggagtag

SEQ ID NO: 341549 - DNA, 1482 bp, Artificial Sequence
  derived and/or modified sequence
atgctgcggaccatcctggacgccccccagcggctgctgaaggaggggcgagcgtctaggcagttggtacttgtggtggtcttcgtcgcgctgctcctagacaatatgttgttcactgtggtggtgcctattgtgcccaccttcttatacgatatggaatttaaggaggttaacagttccttgcatctgggacatgctgggagttctccccacgctcttgcaagccccgcttttagtacaatattcagcttcttcaacaacaacaccgtagccgtggaggagtccgtgccttccggcatcgcttggatgaatgacaccgcctccacgattcctcctccggccaccgaggccataagcgctcacaaaaataactgtttacagggaacgggcttccttgaggaagaaattacccgtgtcggagtgctttttgcctctaaagcagtcatgcagttgttagttaaccccttcgtgggtccactgacaaacagaattggttaccacataccaatgttcgccgggttcgtaattatgttcctaagtaccgtaatgttcgcattctctgggacatacaccttactgttcgtggccagaacgctgcagggaatcggcagttctttttccagcgtcgccggcttaggtatgctggcctcagtctatactgacgatcacgaaagagggcgagcaatgggaaccgcccttggcggcctagcactggggctcctggtgggagcccctttcggctctgtgatgtatgagttcgtgggcaaatccgcgccgttcctgatcctcgcgtttctagcactcctcgacggcgctctgcaactttgcatcctgcaaccatccaaggtgtcccccgagtcggctaaggggacacccctcttcatgctgctgaaggacccctacatcttagtggcagctggattggctttcctaccagcctctgtttcctatctcatcggcactaacctgtttggcgttctggctaataagatgggcaggtggttatgctctctcattgggatgctggtagtgggcacatcccttctttgcgttccattggcgcataacattttcggactgatcggacctaacgcaggactcggactagctatcggaatggtggactctagtatgatgcccatcatggggcacctcgttgacctcaggcacacatccgtgtatggctcggtctacgccattgcagacgtggcgttctgtatgggctttgccattggtcctagcacaggaggagctatcgtgaaggctatcggttttccttggctcatggtgatcaccggcgtgatcaacatcgtctatgcccctctgtgttactacttgaggtcaccaccagccaaggaggaaaaattggccattttgagccaggactgtcctatggagacccgtatgtatgcgacccagaaacccactaaagaattccctcttggggaggacagtgacgaagagcccgaccacgaggagtag

SEQ ID NO: 341550 - DNA, 1482 bp, Artificial Sequence
  derived and/or modified sequence
atgctgcggaccatcctggacgccccccagcggctgctgaaggagggccgggcaagtaggcagctggtgctggtcgtggtctttgtggctcttttacttgacaacatgctgttcactgtggttgtgccaattgtgccaacattcctatacgacatggaatttaaagaagttaacagttcacttcacttgggccatgctgggagttctccacatgcattggcatcccccgcgttttctacgatcttctctttttttaacaataataccgtcgccgtcgaggaatcggttccttctggcatcgcatggatgaatgataccgcttcgaccattccccctcccgcgacagaagccatctcggcccataaaaataattgtctccagggcactggtttcttggaagaggaaattacaagagtgggcgtgttattcgctagcaaagcggtgatgcagttgttagtgaatcccttcgtgggtccactgacaaacagaataggctatcatattcccatgttcgccggttttgtgataatgttcctctcaacagttatgtttgctttctccggcacgtataccctgctgtttgttgcaaggactctgcaggggattggcagctcctttagctcggtggcgggccttggcatgttggcctcagtctacactgacgatcatgagcggggtcgagcaatgggaacagcgctgggaggcctggcattaggcctgctggttggagcgcctttcggctccgtcatgtatgagtttgtgggcaagtctgctccatttctcattcttgcgttcctggccctgctggatggtgccctccagttgtgcatcctgcagccaagtaaggtatctcccgagagtgcaaagggcactcccctgttcatgcttcttaaggatccatatatcctggtggcagctggccttgcgttcctgccagcaagtgtgtcatatctgatcggaaccaatctttttggagttctcgccaataagatggggcggtggctgtgctctttgataggaatgcttgtggttggcacatcgctcttgtgcgtacccctggcacacaacatattcggcctgatagggcctaacgcgggattaggattagcgatagggatggtggactcctccatgatgccgattatgggtcatttggtggatctcagacatacgtcagtgtacggatcagtttacgccatcgccgatgtcgctttctgcatgggcttcgctatcggccccagcacaggaggagctatcgtgaaggcaattggtttcccttggcttatggtcatcactggagtgattaacattgtttacgcgcccctgtgctattatcttaggtcacccccggccaaagaagaaaaactcgctattctgtcccaggactgccctatggagaccagaatgtacgccacccagaagccaacgaaagagttcccgctgggcgaggattcagatgaagagcccgatcacgaagagtag

SEQ ID NO: 341551 - DNA, 1482 bp, Artificial Sequence
  derived and/or modified sequence
atgctcaggaccatccttgacgctccccagcgcctgctaaaggaagggagagcctctagacaactggtcctggtcgtcgtatttgtggccctgctgctggataatatgttatttactgtcgttgtcccgatcgtcccgaccttcctgtacgacatggaattcaaggaggtcaacagttctctgcacctgggacatgctgggtctagtccccacgcactagcctcacccgcattctccactattttctcttttttcaacaacaacaccgttgccgtggaagaaagtgtgccctctggaatcgcttggatgaacgatacagcgtccactatcccccctcctgctactgaggctatctctgcccataagaacaattgcttacaaggcacgggtttcttggaggaggagataacgagggtgggcgtgctgtttgcttcaaaagccgtcatgcaactgctggtaaacccctttgtgggccctctcaccaaccgcattggataccatatcccaatgtttgccggtttcgtgatcatgtttctctctacagtgatgttcgccttttccggaacttatacgttgctgtttgttgcgaggactctgcagggaataggctcttctttttcgtcggtagctggtcttggaatgctcgcttcggtgtacaccgatgaccacgagcgtggaagggccatggggaccgctctggggggactagcgctgggactcctggttggcgcaccattcgggtctgtcatgtatgagtttgttgggaagagcgcaccttttttgatactcgccttcctcgcccttctggacggtgctctgcagctgtgcattttacagccatccaaggtgagccccgagagtgctaaaggcacccccctcttcatgctgctcaaagatccctatatattggtcgctgctggcctggccttcctccctgctagtgtgtcctatttgattgggacgaacctcttcggtgtgctggctaacaaaatgggcagatggttgtgcagccttatcggaatgcttgtggtggggacgtcattactgtgcgtgccacttgctcataacatattcggtctgattggtccgaacgctggactcggactggcaatcggcatggtggatagtagtatgatgcccattatgggccatcttgtagacctgagacacacgtctgtctacggaagcgtttatgccattgccgatgttgccttctgtatggggttcgctatcgggcctagtacaggcggagctatcgtaaaagctataggattcccatggcttatggtgatcactggagtgatcaatatagtgtacgccccactctgctactaccttcgatccccaccagctaaagaggagaagctagctatcctttcgcaggattgcccaatggagacaagaatgtatgcgacacagaaacccacaaaagagtttcccctgggggaggatagcgacgaagaaccagatcacgaggaatag

SEQ ID NO: 341552 - DNA, 1482 bp, Artificial Sequence
  derived and/or modified sequence
atgctccgcaccattctggacgctcctcagagactcctgaaggagggaagagcgtcgagacagctggtactcgtagttgtgtttgtagctcttctgctggacaacatgctgtttacagtagtggtgcctatcgtcccaaccttcttatatgacatggaatttaaggaggtcaacagtagcctgcaccttggtcatgccggatcctcccctcacgccctggctagcccagccttctcaacaatcttctctttctttaataataataccgttgccgtcgaggagagcgtgccctcagggattgcatggatgaatgacactgcttcgactatacccccacccgcaacagaagcgatttctgcacataaaaataactgcctccagggcacaggattcctagaggaagagatcacccgagtgggagtgctgttcgcttccaaggcagtcatgcagctacttgtcaaccctttcgtggggcctcttaccaaccgcatagggtatcacatacccatgtttgccggttttgtaatcatgttcctatccacagtaatgtttgcgttttccggtacctacaccctgttgtttgtggccagaacccttcagggcatcggcagttcattcagtagtgtcgcaggactcggaatgcttgccagcgtttacacggatgatcatgagcggggtagggctatgggcacagcgctagggggtctggcccttggactcttagtaggggctcctttcggatccgtgatgtacgagtttgtcgggaaatccgcgccatttctcattctggcatttctagctttacttgacggagctctgcaactctgcatcctacaaccttcgaaggtgtcccctgagtcggccaaaggcacacccctcttcatgctcctgaaggatccctacatcctggttgcggcagggctggcctttttgcctgccagcgtgagctacctgattggcaccaacctgttcggtgtgctggcgaataagatggggagatggctctgtagtctcattggaatgctggttgtggggacctccttgctctgtgttcctctggcccacaacatcttcggattgatcggaccgaacgccggactgggcttggcaatcggtatggtggattcatccatgatgcctatcatgggccacctcgtcgatctgaggcacacttctgtgtacggttccgtgtacgccatcgcggatgtggcattttgcatgggattcgcaattggcccttcaaccggcggagctattgtcaaggctatagggttcccctggcttatggtcataacaggagtcataaatatagtgtatgcaccgctgtgctactatctacggtcccccccagctaaggaagaaaagctggcaatactatcacaagattgcccgatggagaccaggatgtatgccacccaaaagcccaccaaggaatttcctcttggggaggactcagacgaggaacccgaccatgaggagtag

SEQ ID NO: 341553 - DNA, 2770 bp, Artificial Sequence
  derived and/or modified sequence
gctaacagctgccaatacctcactgagtgcctcacaccaacatgggctccaagatgaaggcatctttctgatcaggggtttgtagctcaaacaaaagaatgagcgtgcttctagaaccacagagcaagggaacatggtagaggataagctggcaagttgaaaagcgtgggatttcatcccagtttgacactaactgtgcaaccccaaacaaatctcctaaccttcagaggctcggatttcttgtctatgagatgaagtgagtttccttcgtctgggcagactccctcccctcttccataaaggctgcaggagacctgtagctgtcacaggaccttccctaagagcccgcaggggaagactgccccagtccggccatcaccatgctccggaccattctggatgctccccagcggttgctgaaggaggggagagcgtcccggcagctggtgctggtggtggtattcgtcgctttgctcctggacaacatgctgtttactgtggtggtgccaattgtgcccaccttcctatatgacatggagttcaaagaagtcaactcttctctgcacctcggccatgccggaagttccccacatgccctcgcctctcctgccttttccaccatcttctccttcttcaacaacaacaccgtggctgttgaagaaagcgtacctagtggaatagcatggatgaatgacactgccagcaccatcccacctccagccactgaagccatctcagctcataaaaacaactgcttgcaaggcacaggtttcttggaggaagagattacccgggtcggggttctgtttgcttcaaaggctgtgatgcaacttctggtcaacccattcgtgggccctctcaccaacaggattggatatcatatccccatgtttgctggctttgttatcatgtttctctccacagttatgtttgctttttctgggacctatactctactctttgtggcccgaacccttcaaggcattggatcttcattttcatctgttgcaggtcttggaatgctggccagtgtctacactgatgaccatgagagaggacgagccatgggaactgctctggggggcctggccttggggttgctggtgggagctccctttggaagtgtaatgtacgagtttgttgggaagtctgcacccttcctcatcctggccttcctggcactactggatggagcactccagctttgcatcctacagccttccaaagtctctcctgagagtgccaaggggactcccctctttatgcttctcaaagacccttacatcctggtggctgcaggtctagctttcttgcctgccagtgtgtcctacctcattggcaccaacctctttggtgtgttggccaacaagatgggtcggtggctgtgttccctaatcgggatgctggtagtaggtaccagcttgctctgtgttcctctggctcacaatatttttggtctcattggccccaatgcagggcttggccttgccataggcatggtggattcttctatgatgcccatcatggggcacctggtggatctacgccacacctcggtgtatgggagtgtctacgccatcgctgatgtggctttttgcatgggctttgctataggtccatccaccggtggtgccattgtaaaggccatcggttttccctggctcatggtcatcactggggtcatcaacatcgtctatgctccactctgctactacctgcggagccccccggcaaaggaagagaagcttgctattctgagtcaggactgccccatggagacccggatgtatgcaacccagaagcccacgaaggaatttcctctgggggaggacagtgatgaggagcctgaccatgaggagtagcagcagaaggtgctccttgaattcatgatgcctcagtgaccacctctttccctgggaccagatcaccatggctgagcccacggctcagtgggcttcacatacctctgcctgggaatcttctttcctcccctcccatggacactgtccctgatactcttctcacctgtgtaacttgtagctcttcctctatgccttggtgccgcagtggcccatcttttatgggaagacagagtgatgcaccttcccgctgctgtgaggttgattaaacttgagctgtgacgggttctgcaaggggtgactcattgcatagaggtggtagtgagtaatgtgcccctgaaaccagtggggtgactgacaagcctctttaatctgttgcctgattttctctggcatagtcccaacagatcggaagagtgttaccctcttttcctcaacgtgttctttcccgggttttcccagccgagttgagaaaatgttctcagcattgtcttgctgccaaatgccagcttgaagagttttgttttgttttttttcatttatttttttttttaataaagtgagtgatttttctgtggctaaatctagagctgctaaaagggctttaccctcagtgaaaagtgtcttctattttcattatctttcagaaacaggagcccatttctcttctgctggagttattgacattctcctgacctcccctgtgtgttcctaccttttctgaacctcttagactcttagaaataaaagtagaagaaagacagaaaaaataactgattagacccaagatttcatgggaagaagttaaaagaaactgccttgaaatccctcctgattgtagatttcctaacaggaggggtgtaatgtgacattgttcatacttgctaataaatacattattgcctaattca

SEQ ID NO: 341554 - DNA, 1980 bp, Artificial Sequence
  derived and/or modified sequence
ggaggcaataaatccaacagcacatccacgttcagagaacagtgtccctgctgtcttgctaacagctgccaatacctcactgagtgcctcacaccaacatgggctccaagtgagtttccttcgtctgggcagactccctcccctcttccataaaggctgcaggagacctgtagctgtcacaggaccttccctaagagcccgcaggggaagactgccccagtccggccatcaccatgctccggaccattctggatgctccccagcggttgctgaaggaggggagagcgtcccggcagctggtgctggtggtggtattcgtcgctttgctcctggacaacatgctgtttactgtggtggtgccaattgtgcccaccttcctatatgacatggagttcaaagaagtcaactcttctctgcacctcggccatgccggaagttccccacatgccctcgcctctcctgccttttccaccatcttctccttcttcaacaacaacaccgtggctgttgaagaaagcgtacctagtggaatagcatggatgaatgacactgccagcaccatcccacctccagccactgaagccatctcagctcataaaaacaactgcttgcaaggcacaggtttcttggaggaagagattacccgggtcggggttctgtttgcttcaaaggctgtgatgcaacttctggtcaacccattcgtgggccctctcaccaacaggattggatatcatatccccatgtttgctggctttgttatcatgtttctctccacagttatgtttgctttttctgggacctatactctactctttgtggcccgaacccttcaaggcattggatcttcattttcatctgttgcaggtcttggaatgctggccagtgtctacactgatgaccatgagagaggacgagccatgggaactgctctggggggcctggccttggggttgctggtgggagctccctttggaagtgtaatgtacgagtttgttgggaagtctgcacccttcctcatcctggccttcctggcactactggatggagcactccagctttgcatcctacagccttccaaagtctctcctgagagtgccaaggggactcccctctttatgcttctcaaagacccttacatcctggtggctgcaggtctagctttcttgcctgccagtgtgtcctacctcattggcaccaacctctttggtgtgttggccaacaagatgggtcggtggctgtgttccctaatcgggatgctggtagtaggtaccagcttgctctgtgttcctctggctcacaatatttttggtctcattggccccaatgcagggcttggccttgccataggcatggtggattcttctatgatgcccatcatggggcacctggtggatctacgccacacctcggtgtatgggagtgtctacgccatcgctgatgtggctttttgcatgggctttgctataggtccatccaccggtggtgccattgtaaaggccatcggttttccctggctcatggtcatcactggggtcatcaacatcgtctatgctccactctgctactacctgcggagccccccggcaaaggaagagaagcttgctattctgagtcaggactgccccatggagacccggatgtatgcaacccagaagcccacgaaggaatttcctctgggggaggacagtgatgaggagcctgaccatgaggagtagcagcagaaggtgctccttgaattcatgatgcctcagtgaccacctctttccctgggaccagatcaccatggctgagcccacggctcagtgggcttcacatacctctgcctgggaatcttctttcctcccctcccatggacactgtccctgatactcttctcacctgtgtaacttgtagctcttcctctatgccttggtgccgcagtggcccatcttttatgggaagacagagtgatgcaccttcccgctgctgtgaggttgatta

SEQ ID NO: 341555 - DNA, 1482 bp, Artificial Sequence
  derived and/or modified sequence
atgctgagaaccatcctggacgccccccagagactgctgaaggagggcagagccagcagacagctggtgctggtggtggtgttcgtggccctgctgctggacaacatgctgttcaccgtggtggtgcccatcgtgcccaccttcctgtacgacatggagttcaaggaggtgaacagcagcctgcacctgggccacgccggcagcagcccccacgccctggccagccccgccttcagcaccatcttcagcttcttcaacaacaacaccgtggccgtggaggagagcgtgcccagcggcatcgcctggatgaacgacaccgccagcaccatccccccccccgccaccgaggccatcagcgcccacaagaacaactgcctgcagggcaccggcttcctggaggaggagatcaccagagtgggcgtgctgttcgccagcaaggccgtgatgcagctgctggtgaaccccttcgtgggccccctgaccaacagaatcggctaccacatccccatgttcgccggcttcgtgatcatgttcctgagcaccgtgatgttcgccttcagcggcacctacaccctgctgttcgtggccagaaccctgcagggcatcggcagcagcttcagcagcgtggccggcctgggcatgctggccagcgtgtacaccgacgaccacgagagaggcagagccatgggcaccgccctgggcggcctggccctgggcctgctggtgggcgcccccttcggcagcgtgatgtacgagttcgtgggcaagagcgcccccttcctgatcctggccttcctggccctgctggacggcgccctgcagctgtgcatcctgcagcccagcaaggtgagccccgagagcgccaagggcacccccctgttcatgctgctgaaggacccctacatcctggtggccgccggcctggccttcctgcccgccagcgtgagctacctgatcggcaccaacctgttcggcgtgctggccaacaagatgggcagatggctgtgcagcctgatcggcatgctggtggtgggcaccagcctgctgtgcgtgcccctggcccacaacatcttcggcctgatcggccccaacgccggcctgggcctggccatcggcatggtggacagcagcatgatgcccatcatgggccacctggtggacctgagacacaccagcgtgtacggcagcgtgtacgccatcgccgacgtggccttctgcatgggcttcgccatcggccccagcaccggcggcgccatcgtgaaggccatcggcttcccctggctgatggtgatcaccggcgtgatcaacatcgtgtacgcccccctgtgctactacctgagaagcccccccgccaaggaggagaagctggccatcctgagccaggactgccccatggagaccagaatgtacgccacccagaagcccaccaaggagttccccctgggcgaggacagcgacgaggagcccgaccacgaggagtag

SEQ ID NO: 341556 - protein, 472 aa, Artificial Sequence
  derived and/or modified sequence
MLRTILDAPQRLLKEGRASRQLVLVVVFVALLLDNMLFTVVVPIVPTFLYDMEFKEVNSSLHLGHAGSSPHALASPAFSTIFSFFNNNTVAVEESVPSGIAWMNDTASTIPPPATEAISAHKNNCLQGTGFLEEEITRVGVLFASKAVMQLLVNPFVGPLTNRIGYHIPMFAGFVIMFLSTVMFAFSGTYTLLFVARTLQGIGSSFSSVAGLGMLASVYTDDHERGRAMGTALGGLALGLLVGAPFGSVMYEFVGKSAPFLILAFLALLDGALQLCILQPSKVSPESAKGTPLFMLLKDPYILVAAGSICFANMGVAILEPTLPIWMMQTMCSPKWQLGLAFLPASVSYLIGTNLFGVLANKMGRWLCSLIGMLVVGTSLLCVPLAHNIFGLIGPNAGLGLAIGMVDSSMMPIMGHLVDLRHTSVYGSVYAIADVAFCMGFAIGYSESGLPHGDPDVCNPEAHEGISSGGGQ

SEQ ID NO: 341557 - DNA, 1419 bp, Artificial Sequence
  derived and/or modified sequence
atgttacgaacaatcttagatgctccccagaggttgctaaaagagggcagggcctctcggcagctggttcttgtggtggtcttcgtggcccttctacttgacaacatgttgttcaccgttgtggtgccaattgtgcccacctttctctacgacatggaatttaaggaggttaactcctcactgcatttgggacacgccggctccagcccccacgccttggctagtccagctttctccaccatcttttctttcttcaataacaacaccgtcgccgtcgaagagagtgtcccttcggggatcgcctggatgaacgacacagcctccactattccccctccagcaaccgaagccattagtgcacataaaaataattgtttgcaaggaacagggtttttagaagaggagattactcgagtgggagtgctgttcgccagcaaagctgtcatgcaattactggtcaacccatttgttggccctctgacgaatcgcatcggctatcacatccctatgtttgccggcttcgtgatcatgttcttgagcactgtgatgtttgctttcagtggtacctacaccctcctattcgtggcgcgaacacttcagggaattggctcctccttctcttccgttgcaggactagggatgctggcatccgtctatacagatgaccacgaacgggggagagctatgggtactgcactggggggactggcattggggcttctcgtcggcgcgcccttcggctctgtcatgtacgagtttgttggcaagtccgcaccatttttgatcctagccttcctggcgctgctggacggcgcacttcaattatgcattctacagcccagcaaagtgtcccctgaatctgcaaagggaacccccctgttcatgttgctgaaagatccttacatccttgtggctgccggaagcatttgtttcgccaatatgggggtcgctattctcgaaccaaccctgcccatctggatgatgcagaccatgtgttcaccaaagtggcagctgggcctcgccttcctacctgcatctgtgtcctacctgatcggcacaaacctttttggtgtcctggcgaataagatgggcaggtggttatgttcactaattggcatgctggttgtggggacctcactcctctgcgtgccactcgctcacaatattttcggcctaatcgggcctaacgccggcctcggacttgctatagggatggtggattcatcaatgatgcctataatgggccacctggtcgacctgcgacacactagcgtctacggctccgtgtatgcaatcgccgatgtcgcattttgcatgggttttgcaatcgggtactcagagagcggtctgccccatggggatcccgatgtatgtaatcccgaagctcacgaagggatttccagtgggggaggacagtag

SEQ ID NO: 341558 - DNA, 1158 bp, Artificial Sequence
  derived and/or modified sequence
atgcttagaacgatactcgatgcaccacaaagactgctgaaggaaggacgagccagccgacagctggtgttagtggtggtcttcgtagcccttcttcttgataacatgctgttcacggtagtggtgcctatcgtcccaactttcttgtatgatatggagttcaaggaggtaaactcatcactccacctgggccacgccggttcttcccctcacgcccttgcttcaccagcattctcaactattttttccttcttcaataataacaccgtggctgttgaagagagcgtgccgtctgggattgcctggatgaatgataccgcttcaaccattcctccccctgcaacagaggccatctctgcacacaaaaacaattgtctgcagggtaccggctttttagaagaggaaatcactagggtcggggttctttttgcttcgaaagctgtaatgcaattacttgtcaaccccttcgtaggacccctcactaatcggattgggtatcatattccaatgtttgcaggattcgtcatcatgttcctgtcaactgttatgttcgcattctccgggacatacactctgctgtttgtggcccgtactcttcagggaatcggaagcagctttagtagtgtagccgggttaggcatgcttgcaagcgtttacactgacgatcacgagcgcggccgcgccatgggcaccgcgcttggaggcttggcgctgggactgctcgtaggtgcgccttttgggtcagtcatgtacgagtttgtgggaaaaagtgcccccttcctgattttggcattccttgctctgcttgacggcgctcttcaactatgcatccttcaaccttctaaagtttctcccgagagtgcaaaggggactccactctttatgttgttaaaggatccttacatcctcgtggctgcggggagcatctgtttcgccaacatgggcgtggccattcttgagcccactcttccaatatggatgatgcagacaatgtgtagcccgaaatggcaactcggtttggcttttctacccgcatcagtaagttaccttattgggaccaatctcttcggcgtcctggctaataagatggggcgttggctttgttcccttatcggaatgctggttgttgggaccagcctgctctgtctgccatcctag

SEQ ID NO: 341559 - DNA, 1419 bp, Artificial Sequence
  derived and/or modified sequence
atgctgcggaccatcctggatgccccccagaggctgctgaaggagggccgggccagccggcagctggtgctggtggtggtgtttgtggccctgctgctggacaacatgctgttcaccgtggtggtgcccatcgtgcccaccttcctgtatgacatggagttcaaggaggtgaacagcagcctgcacctgggccacgccggcagcagcccccacgccctggccagccctgccttcagcaccatcttctccttcttcaacaacaacacagtggccgtggaggagagcgtgcccagcggcatcgcctggatgaatgacacagccagcaccatccccccaccagccacagaggccatcagcgcccacaagaacaactgcctgcagggcaccggcttcctggaggaggagatcaccagggtgggcgtgctgtttgccagcaaggctgtgatgcagctgctggtgaacccctttgtgggccccctgaccaaccgcatcggctaccacatccccatgtttgctggcttcgtcatcatgttcctgagcacagtgatgtttgccttcagcggcacctacaccctgctgtttgtggcccggaccctgcagggcatcggcagcagcttcagctctgtggccggcctgggcatgctggcctctgtgtacacagatgaccacgagcggggccgggccatgggcacagccctgggcggcctggccctgggcctgctggtgggcgcccccttcggctctgtgatgtatgaatttgtgggcaagagcgcccccttcctgatcctggccttcctggccctgctggatggagccctgcagctgtgcatcctgcagcccagcaaggtgtccccagagagcgccaagggcacccccctcttcatgctgctgaaggacccctacatcctggtggccgccggcagcatctgctttgccaacatgggcgtggccatcctggagcccaccctgcccatctggatgatgcagaccatgtgcagccccaagtggcagctgggcctggccttcctgcctgcctctgtgtcctacctgattggcaccaacctgtttggagtgctggccaacaagatgggccgctggctgtgcagcctgattggcatgctggtggtgggcaccagcctgctgtgtgtgcccctggcccacaacatcttcggcctgattggccccaatgccggcctgggcctggccatcggcatggtggacagctccatgatgcccatcatgggccacctggtggacctgcggcacacctctgtgtatggctctgtgtatgccatcgcagatgtggccttctgcatgggctttgccatcggctacagcgagagcggcctgccccacggggaccctgatgtgtgcaaccctgaggcccacgagggcatcagcagcggcggcggccagtag

SEQ ID NO: 341560 - DNA, 1158 bp, Artificial Sequence
  derived and/or modified sequence
atgctgcggaccatcctggatgccccccagaggctgctgaaggagggccgggccagccggcagctggtgctggtggtggtgtttgtggccctgctgctggacaacatgctgttcaccgtggtggtgcccatcgtgcccaccttcctgtatgacatggagttcaaggaggtgaacagcagcctgcacctgggccacgccggcagcagcccccacgccctggccagccctgccttcagcaccatcttctccttcttcaacaacaacacagtggccgtggaggagagcgtgcccagcggcatcgcctggatgaatgacacagccagcaccatccccccaccagccacagaggccatcagcgcccacaagaacaactgcctgcagggcaccggcttcctggaggaggagatcaccagggtgggcgtgctgtttgccagcaaggctgtgatgcagctgctggtgaacccctttgtgggccccctgaccaaccgcatcggctaccacatccccatgtttgctggcttcgtcatcatgttcctgagcacagtgatgtttgccttcagcggcacctacaccctgctgtttgtggcccggaccctgcagggcatcggcagcagcttcagctctgtggccggcctgggcatgctggcctctgtgtacacagatgaccacgagcggggccgggccatgggcacagccctgggcggcctggccctgggcctgctggtgggcgcccccttcggctctgtgatgtatgaatttgtgggcaagagcgcccccttcctgatcctggccttcctggccctgctggatggagccctgcagctgtgcatcctgcagcccagcaaggtgtccccagagagcgccaagggcacccccctcttcatgctgctgaaggacccctacatcctggtggccgccggcagcatctgctttgccaacatgggcgtggccatcctggagcccaccctgcccatctggatgatgcagaccatgtgcagccccaagtggcagctgggcctggccttcctgcctgcctctgtgtcctacctgattggcaccaacctgtttggagtgctggccaacaagatgggccgctggctgtgcagcctgattggcatgctggtggtgggcaccagcctgctgtgcctgcccagctag

SEQ ID NO: 341561 - DNA, 1419 bp, Artificial Sequence
  derived and/or modified sequence
atgctgcggaccatcctggacgccccccagcggctgctgaaggagggacgggcctctcgacagctcgttttggtggtcgtgtttgttgcgctcctacttgataacatgctcttcactgtcgtcgtgccaatcgtgcccacctttctgtacgacatggagtttaaagaggtcaattctagtctgcacctaggccacgctggtagtagcccccacgcattggctagccccgcattctcgactatcttttccttttttaataacaacaccgtcgcggtggaggagtcggtgccaagtggtatcgcctggatgaatgacacagcttctaccatcccccctccagccaccgaggctattagcgcacataaaaacaactgtctgcagggtacggggtttctggaggaggaaataacaagagttggcgtgctattcgcctccaaggccgtgatgcagcttttggtcaatccttttgtgggacctctgacgaatcgcattggatatcacattcccatgttcgcagggtttgtcattatgttcctctctacggttatgttcgcattttcagggacctacacactgctgtttgtggcccgcactctgcagggcataggtagtagtttttcatctgttgccggcctgggcatgctggccagcgtttacaccgatgatcacgagcggggtcgagccatggggacagctttgggggggctcgcacttggattgctggtgggtgcaccattcgggtctgtgatgtacgaatttgtgggcaagtccgccccctttctaatcctggcatttcttgcgcttttggacggtgctctgcagttatgcattctgcaaccaagtaaagtttctcccgaatccgctaaagggacccccctcttcatgctacttaaagacccttacattctggtagcggctggctctatctgcttcgccaatatgggggttgcaatactggaaccaacgctgcccatatggatgatgcagaccatgtgtagccctaaatggcagctgggcttagcatttctaccggcaagcgttagctacctgataggtacaaacctgtttggcgtacttgctaacaagatggggcggtggctctgctccttaatcgggatgcttgttgttggtacatcccttctatgtgtgcctctggcgcataacatttttggtctcataggtcccaacgccgggctgggactcgctattggaatggtggattcgagtatgatgccaattatgggccacctggtggatctgcggcacacgtccgtgtacggctccgtgtacgctatcgccgatgtcgcgttctgcatgggtttcgctatcggttatagcgaaagcggcctgcctcatggcgaccctgatgtgtgcaatccagaggcccatgagggcatatcaagcggtggcggtcaatag

SEQ ID NO: 341562 - DNA, 1158 bp, Artificial Sequence
  derived and/or modified sequence
atgctgcggaccatcctggacgccccccagcggctgctgaaggagggacgcgcttccagacaattagtgctggttgttgtattcgtcgccctcctgctggacaacatgctcttcactgtggtggtgccgatagtgccgacgtttctttacgatatggagttcaaagaggtaaattcatctctgcacctgggccacgcaggctcctctcctcacgcactcgcctcacccgccttttccactatctttagtttctttaacaataacaccgttgcagtggaggaaagcgtaccttcgggaatcgcatggatgaacgatacagcatctaccatcccccctccagcgacagaagctattagcgcacacaagaataattgcctgcagggcaccggctttctggaggaggagattactcgggtcggggtactgtttgcatctaaagccgtgatgcagctactcgttaatcccttcgttgggcccttgaccaacagaatcggatatcatataccgatgtttgccggatttgtgatcatgtttctctctacggttatgttcgcatttagtggaacttacacactgctcttcgtggcgagaaccctccagggaataggctccagctttagttctgtggctggactggggatgcttgcttccgtgtatactgatgaccatgaacgcggccgagcaatgggaaccgcactgggggggctcgcgcttggcctgctcgtcggggccccgttcggcagtgtaatgtatgaattcgttgggaaaagtgctccattcctgattctggcattcctggccctgcttgacggcgccctgcagctgtgcatcctgcagccctctaaagtcagccctgagtcagctaagggcactcctctctttatgctgctgaaggacccctacatcctcgtggcagccggtagcatatgcttcgcgaacatgggggtggcaattctggagcccaccctccctatatggatgatgcagacaatgtgtagcccgaagtggcagctgggactggccttcctccctgccagtgtcagctacttgatagggacaaatctgtttggagtgctggccaataaaatggggaggtggctgtgtagtcttattggaatgttggtcgtcgggacttccctgctgtgcctcccttcttag

SEQ ID NO: 341563 - DNA, 1419 bp, Artificial Sequence
  derived and/or modified sequence
atgttaagaacaatcttggacgcgcctcagaggcttctgaaggaaggacgagcttctcgccagctggtcctagtggtggtgttcgttgcacttctgctcgacaacatgttgttcacggttgtcgttccgatagtgcctacattcctttacgacatggagttcaaagaagtcaattcgagcttgcacttgggccacgccggaagctctccacacgccctcgccagccctgcattctcgaccatcttttcttttttcaataataacacagtcgcagtggaagaatcagtgccctctggcatcgcgtggatgaacgatacagcatctactatacccccacccgctaccgaagccatctccgctcataagaataactgtctccagggaacaggctttcttgaagaagaaattacccgcgtcggagttctctttgcctcaaaggcggtgatgcagttgcttgtgaacccatttgttggtccccttaccaatcgcattggctatcacatcccaatgtttgccggttttgtaattatgtttctgtctactgtcatgtttgccttctccggaacttacacccttctgttcgtggcacgcacactccagggaattggaagctcattttctagtgtcgctggactgggaatgctggcaagcgtgtacacagatgaccatgaacgcggaagagcaatgggaactgcacttggtgggctggccttgggcttactggtcggggcaccctttggaagcgtcatgtacgaatttgtcggcaagtcagctccattcctgattttggcctttctggcgctgctcgatggcgctctgcagctttgtatcctgcagccttcaaaggtgtcccccgagtctgccaagggtacgccgctgttcatgctgcttaaggatccctacatccttgtggccgcaggatccatctgcttcgcaaacatgggcgtggcgatactggaaccaacacttcccatttggatgatgcagaccatgtgctcacctaagtggcagctgggcttagctttcctgcccgcttccgttagctatctgatagggacgaaccttttcggcgttttagctaataaaatgggccgatggctgtgctctctgatcggcatgctggttgtgggcacctcactgctctgcgtccctctcgctcacaacatctttgggttaattggccctaatgctgggctgggcctggccataggcatggtggactcaagcatgatgcccattatgggtcaccttgtggacctacgacacactagtgtgtatggcagcgtctatgccatcgccgatgtcgctttttgtatgggcttcgctattggctacagcgagagcggtctgcctcacggagaccccgacgtctgtaatcccgaggcccacgaggggatcagcagcgggggaggccagtag

SEQ ID NO: 341564 - DNA, 1158 bp, Artificial Sequence
  derived and/or modified sequence
atgctaaggaccattcttgatgccccacagaggctgctgaaggaggggagagccagccggcaattggtgctagtggtggtcttcgttgcactgctgcttgataatatgctcttcacggtcgtggttcctatcgtgcctacgttcctttatgatatggaattcaaggaggtgaactcctcattgcatctggggcatgctggctcatcaccccatgctttggcttccccagccttctctaccatttttagtttcttcaataacaataccgttgccgtggaagagagtgtcccatcggggattgcctggatgaatgatacagcatccactataccaccacccgctaccgaggccatctcagcccataagaacaattgtctgcaggggactggattcctggaggaggaaatcactcgagtcggcgtcttatttgcttctaaggccgtgatgcagctccttgttaacccctttgtaggccctctgaccaaccgcataggctaccacattcctatgtttgccggattcgttatcatgtttctgtcaaccgtcatgtttgctttttcaggcacatacaccctgctcttcgttgcgagaacactccaaggaattggtagttccttctccagtgtggccggtctgggcatgcttgcctccgtatatacggatgaccacgagcggggacgcgctatgggcacagcgctcggaggactcgccttgggattgctggtgggggctccattcggtagcgtgatgtatgagttcgttggaaaatctgccccttttttgatcctcgcctttctggccctgctggacggtgcacttcagctctgcattttacagccatccaaggtgtcccctgaatcagcgaaaggtacaccactgtttatgctgctgaaggatccatatattctggtggccgcagggagtatttgcttcgctaacatgggagtggcaatactggagcctaccctccccatttggatgatgcagacaatgtgcagccccaagtggcagttgggcttagcatttctccccgctagcgtgagctacttaatagggacaaacttattcggcgtgctcgctaataaaatgggccgatggctgtgctctctcatagggatgctcgtcgtgggcaccagcctattgtgtctgcccagctag

SEQ ID NO: 341565 - DNA, 2822 bp, Artificial Sequence
  derived and/or modified sequence
cacacacacacatacacagaatcctcagataacaggaggcaataaatccaacagcacatccacgttcagagaacagtgtccctgctgtcttgctaacagctgccaatacctcactgagtgcctcacaccaacatgggctccaagatgaaggcatctttctgatcaggggtttgtagctcaaacaaaagaatgagcgtgcttctagaaccacagagcaagggaacatggtagaggataagctggcaagttgaaaagcgtgggatttcatcccagtttgacactaactgtgcaaccccaaacaaatctcctaaccttcagaggctcggatttcttgtctatgagatgaagtgagtttccttcgtctgggcagactccctcccctcttccataaaggctgcaggagacctgtagctgtcacaggaccttccctaagagcccgcaggggaagactgccccagtccggccatcaccatgctccggaccattctggatgctccccagcggttgctgaaggaggggagagcgtcccggcagctggtgctggtggtggtattcgtcgctttgctcctggacaacatgctgtttactgtggtggtgccaattgtgcccaccttcctatatgacatggagttcaaagaagtcaactcttctctgcacctcggccatgccggaagttccccacatgccctcgcctctcctgccttttccaccatcttctccttcttcaacaacaacaccgtggctgttgaagaaagcgtacctagtggaatagcatggatgaatgacactgccagcaccatcccacctccagccactgaagccatctcagctcataaaaacaactgcttgcaaggcacaggtttcttggaggaagagattacccgggtcggggttctgtttgcttcaaaggctgtgatgcaacttctggtcaacccattcgtgggccctctcaccaacaggattggatatcatatccccatgtttgctggctttgttatcatgtttctctccacagttatgtttgctttttctgggacctatactctactctttgtggcccgaacccttcaaggcattggatcttcattttcatctgttgcaggtcttggaatgctggccagtgtctacactgatgaccatgagagaggacgagccatgggaactgctctggggggcctggccttggggttgctggtgggagctccctttggaagtgtaatgtacgagtttgttgggaagtctgcacccttcctcatcctggccttcctggcactactggatggagcactccagctttgcatcctacagccttccaaagtctctcctgagagtgccaaggggactcccctctttatgcttctcaaagacccttacatcctggtggctgcagggtccatctgctttgccaacatgggggtggccatcctggagcccacactgcccatctggatgatgcagaccatgtgctcccccaagtggcagctgggtctagctttcttgcctgccagtgtgtcctacctcattggcaccaacctctttggtgtgttggccaacaagatgggtcggtggctgtgttccctaatcgggatgctggtagtaggtaccagcttgctctgtgttcctctggctcacaatatttttggtctcattggccccaatgcagggcttggccttgccataggcatggtggattcttctatgatgcccatcatggggcacctggtggatctacgccacacctcggtgtatgggagtgtctacgccatcgctgatgtggctttttgcatgggctttgctataggctattctgagtcaggactgccccatggagacccggatgtatgcaacccagaagcccacgaaggaatttcctctgggggaggacagtgatgaggagcctgaccatgaggagtagcagcagaaggtgctccttgaattcatgatgcctcagtgaccacctctttccctgggaccagatcaccatggctgagcccacggctcagtgggcttcacatacctctgcctgggaatcttctttcctcccctcccatggacactgtccctgatactcttctcacctgtgtaacttgtagctcttcctctatgccttggtgccgcagtggcccatcttttatgggaagacagagtgatgcaccttcccgctgctgtgaggttgattaaacttgagctgtgacgggttctgcaaggggtgactcattgcatagaggtggtagtgagtaatgtgcccctgaaaccagtggggtgactgacaagcctctttaatctgttgcctgattttctctggcatagtcccaacagatcggaagagtgttaccctcttttcctcaacgtgttctttcccgggttttcccagccgagttgagaaaatgttctcagcattgtcttgctgccaaatgccagcttgaagagttttgttttgttttttttcatttatttttttttttaataaagtgagtgatttttctgtggctaaatctagagctgctaaaagggctttaccctcagtgaaaagtgtcttctattttcattatctttcagaaacaggagcccatttctcttctgctggagttattgacattctcctgacctcccctgtgtgttcctaccttttctgaacctcttagactcttagaaataaaagtagaagaaagacagaaaaaataactgattagacccaagatttcatgggaagaagttaaaagaaactgccttgaaatccctcctgattgtagatttcctaacaggaggggtgtaatgtgacattgttcatacttgctaataaatacattattgcctaattc

SEQ ID NO: 341566 - DNA, 1419 bp, Artificial Sequence
  derived and/or modified sequence
atgctgagaaccatcctggacgccccccagagactgctgaaggagggcagagccagcagacagctggtgctggtggtggtgttcgtggccctgctgctggacaacatgctgttcaccgtggtggtgcccatcgtgcccaccttcctgtacgacatggagttcaaggaggtgaacagcagcctgcacctgggccacgccggcagcagcccccacgccctggccagccccgccttcagcaccatcttcagcttcttcaacaacaacaccgtggccgtggaggagagcgtgcccagcggcatcgcctggatgaacgacaccgccagcaccatccccccccccgccaccgaggccatcagcgcccacaagaacaactgcctgcagggcaccggcttcctggaggaggagatcaccagagtgggcgtgctgttcgccagcaaggccgtgatgcagctgctggtgaaccccttcgtgggccccctgaccaacagaatcggctaccacatccccatgttcgccggcttcgtgatcatgttcctgagcaccgtgatgttcgccttcagcggcacctacaccctgctgttcgtggccagaaccctgcagggcatcggcagcagcttcagcagcgtggccggcctgggcatgctggccagcgtgtacaccgacgaccacgagagaggcagagccatgggcaccgccctgggcggcctggccctgggcctgctggtgggcgcccccttcggcagcgtgatgtacgagttcgtgggcaagagcgcccccttcctgatcctggccttcctggccctgctggacggcgccctgcagctgtgcatcctgcagcccagcaaggtgagccccgagagcgccaagggcacccccctgttcatgctgctgaaggacccctacatcctggtggccgccggcagcatctgcttcgccaacatgggcgtggccatcctggagcccaccctgcccatctggatgatgcagaccatgtgcagccccaagtggcagctgggcctggccttcctgcccgccagcgtgagctacctgatcggcaccaacctgttcggcgtgctggccaacaagatgggcagatggctgtgcagcctgatcggcatgctggtggtgggcaccagcctgctgtgcgtgcccctggcccacaacatcttcggcctgatcggccccaacgccggcctgggcctggccatcggcatggtggacagcagcatgatgcccatcatgggccacctggtggacctgagacacaccagcgtgtacggcagcgtgtacgccatcgccgacgtggccttctgcatgggcttcgccatcggctacagcgagagcggcctgccccacggcgaccccgacgtgtgcaaccccgaggcccacgagggcatcagcagcggcggcggccagtag

SEQ ID NO: 341567 - DNA, 1158 bp, Artificial Sequence
  derived and/or modified sequence
atgctgagaaccatcctggacgccccccagagactgctgaaggagggcagagccagcagacagctggtgctggtggtggtgttcgtggccctgctgctggacaacatgctgttcaccgtggtggtgcccatcgtgcccaccttcctgtacgacatggagttcaaggaggtgaacagcagcctgcacctgggccacgccggcagcagcccccacgccctggccagccccgccttcagcaccatcttcagcttcttcaacaacaacaccgtggccgtggaggagagcgtgcccagcggcatcgcctggatgaacgacaccgccagcaccatccccccccccgccaccgaggccatcagcgcccacaagaacaactgcctgcagggcaccggcttcctggaggaggagatcaccagagtgggcgtgctgttcgccagcaaggccgtgatgcagctgctggtgaaccccttcgtgggccccctgaccaacagaatcggctaccacatccccatgttcgccggcttcgtgatcatgttcctgagcaccgtgatgttcgccttcagcggcacctacaccctgctgttcgtggccagaaccctgcagggcatcggcagcagcttcagcagcgtggccggcctgggcatgctggccagcgtgtacaccgacgaccacgagagaggcagagccatgggcaccgccctgggcggcctggccctgggcctgctggtgggcgcccccttcggcagcgtgatgtacgagttcgtgggcaagagcgcccccttcctgatcctggccttcctggccctgctggacggcgccctgcagctgtgcatcctgcagcccagcaaggtgagccccgagagcgccaagggcacccccctgttcatgctgctgaaggacccctacatcctggtggccgccggcagcatctgcttcgccaacatgggcgtggccatcctggagcccaccctgcccatctggatgatgcagaccatgtgcagccccaagtggcagctgggcctggccttcctgcccgccagcgtgagctacctgatcggcaccaacctgttcggcgtgctggccaacaagatgggcagatggctgtgcagcctgatcggcatgctggtggtgggcaccagcctgctgtgcctgcccagctag

SEQ ID NO: 341568 - protein, 179 aa, Artificial Sequence
  derived and/or modified sequence
MNSSNGNDNGNGKNGGLEHVPSSSSIHNGDMEKILLDAQHESGQSSSRGSSHCDSPSPQEDGQIMFDVEMHTSRDHSSQSEEEVVEGEKEVEALKKSADWVSDWSSRPENIPPKEFHFRHPKRSVSLSMRKSGAMKKGGIFSAEFLKVFIPSLFLSHVLALGLGIYIGKRLSTPSASTY

SEQ ID NO: 341569 - DNA, 540 bp, Artificial Sequence
  derived and/or modified sequence
atgaattccagtaacggcaatgacaatggaaacggcaaaaatggcgggctagagcatgtgccctcctcttcctccatacacaacggagacatggagaaaatactgctggacgcacagcacgagagtgggcagagctccagccgaggctccagtcactgtgattctccctcccctcaagaggacggccagataatgttcgatgtggagatgcacaccagccgggatcactccagtcagtctgaagaggaggttgtggagggtgaaaaagaagtggaggcgttgaaaaagagcgccgactgggtgagcgactggtcttccaggcccgagaatataccgccgaaggagttccatttcaggcacccaaagcgctccgttagcctctcgatgcgcaagtccggggctatgaagaagggaggcatattttccgcagagtttttaaaggtttttattccgagtctgtttctgtcacatgtcctggctctcggcttaggcatttacatcggtaagcgattatccactccaagcgcctctacatactag

SEQ ID NO: 341570 - DNA, 540 bp, Artificial Sequence
  derived and/or modified sequence
atgaattcttcgaacggtaatgacaacggcaacggtaagaacggtggactggaacatgtgccctctagtagttctattcataacggcgacatggagaagatcctgctcgatgcccaacatgagagcggccagtcttcgagtaggggatccagtcactgcgattcccccagtcctcaggaggacggccagatcatgttcgatgtggagatgcataccagtcgcgaccattcctcccagtccgaggaggaagtagttgaaggagagaaagaggtggaagcgttgaaaaagagcgccgactgggtttccgattggtcttccagacccgagaatatccctcctaaggagttccactttcggcatcctaagagatctgtaagtctcagtatgcgcaaatctggcgcaatgaaaaaggggggtatcttttccgccgaatttttaaaagtgtttattccatcacttttcctgtcccatgtgctggctttgggactgggcatttacatcggcaaaaggctgagcactccatctgccagcacctattag

SEQ ID NO: 341571 - DNA, 540 bp, Artificial Sequence
  derived and/or modified sequence
atgaacagttctaacggaaatgacaatgggaacggaaagaacggcggccttgaacacgtaccatcctcatctagtattcataatggggacatggaaaaaatcctactagatgcacaacacgagtcgggacagagcagctctagaggcagttctcattgtgactcacctagccctcaggaggacggtcagatcatgttcgatgtcgaaatgcataccagcagggatcactcttcccagagtgaggaggaggtcgtagagggcgaaaaggaggttgaagccctgaagaaatctgcagactgggtctcagattggtccagtcgcccagaaaacatcccccctaaggaattccactttcggcatccgaagcgcagcgttagtctgtctatgaggaagtctggcgccatgaaaaagggaggcatcttctcggctgagttcctgaaagttttcatcccctcgctgttcctgtcccatgtgctggctctcggcctgggcatctatattggaaaaagactctcaaccccgtccgcttcaacgtactag

SEQ ID NO: 341572 - DNA, 540 bp, Artificial Sequence
  derived and/or modified sequence
atgaacagcagcaatggaaatgacaatggaaatggcaagaatggaggcctggagcacgtgcccagcagcagcagcatccacaacggggacatggagaagatcctgctggatgcccagcacgagagcggccagagcagcagccggggcagcagccactgtgacagccccagcccccaggaggatggccagatcatgtttgatgtggagatgcacaccagccgggaccacagcagccagagcgaggaggaggtggtggagggggagaaggaggtggaggccctgaagaagtctgctgactgggtgtctgactggagcagcaggcctgagaacatcccccccaaggagttccacttccgccaccccaagaggtctgtgtccctgtccatgaggaagagcggggccatgaagaagggcggcatcttctctgctgagttcctgaaggtgttcatccccagcctcttcctgagccacgtgctggccctgggcctgggcatctacatcggcaagaggctgagcaccccatctgccagcacctactag

SEQ ID NO: 341573 - DNA, 540 bp, Artificial Sequence
  derived and/or modified sequence
atgaacagcagcaacggcaacgacaacggcaacggcaagaacggcggtctagagcatgtgccctccagctcctccattcacaatggcgacatggagaaaatactgcttgacgcgcagcacgaatctggtcaatcttcctctcgcggcagtagccattgcgactccccatctccacaagaagacggtcagatcatgtttgacgtggaaatgcacactagccgcgaccattccagtcagagcgaggaggaggtggtcgagggagaaaaggaagtagaggccttgaagaaatcagccgactgggtctctgactggtctagtcgccctgaaaacatcccccctaaggaattccatttccggcaccccaagcgtagcgtgtcgcttagcatgagaaagtccggtgccatgaagaagggcggcatttttagcgccgaatttcttaaggtcttcatccccagccttttcttgagccacgtgctggccctggggctcgggatttatattggcaaaagacttagtacaccctcagctagtacttactag

SEQ ID NO: 341574 - DNA, 540 bp, Artificial Sequence
  derived and/or modified sequence
atgaacagcagcaacggcaacgacaacggcaacggcaagaacggcggcctggagcacgtcccgtccagttcctctattcacaatggtgatatggaaaaaatccttctggatgcccagcatgaaagcgggcagtctagttctaggggatctagtcattgtgatagtccttcgccccaggaagacgggcaaatcatgtttgacgtggagatgcacacctcccgggaccactcctcacaatctgaagaagaagttgtagaaggagaaaaggaagtggaagccctgaaaaagagtgccgattgggtttcagactggagctctcgcccagagaacatcccccctaaggaattccatttccgccacccaaaaagaagcgtgagcttatccatgagaaaaagcggagcgatgaaaaaggggggcatattcagcgctgagttccttaaggttttcattccgtcactttttctttcacatgttctggctctaggactggggatatatattggcaaaaggttgagcacgcctagtgcttctacctattag

SEQ ID NO: 341575 - DNA, 540 bp, Artificial Sequence
  derived and/or modified sequence
atgaacagcagcaacggcaacgacaacggcaacggcaagaacggcggcctggagcatgtcccaagcagtagctctatccacaacggagatatggaaaagattctcttggatgcgcagcatgaaagtggtcagtcctcctcccgagggtcgtcccattgcgattctccctcgccccaagaagacggacagatcatgttcgacgtggagatgcacacatctcgcgatcactccagccagagtgaggaggaagttgtcgaaggcgagaaggaggtggaggccttgaagaagagcgctgactgggtgtcagattggtcgtcaaggcctgaaaatattccaccaaaagagttccacttcaggcaccccaagaggagtgtatccctcagcatgcggaaaagtggcgctatgaagaaaggcggaatcttttccgcagaattcctcaaagttttcatacccagcctatttctctctcacgtgttggcactaggattaggaatctacatcgggaaaaggttatcaacgccatcagcctccacttattag

SEQ ID NO: 341576 - DNA, 540 bp, Artificial Sequence
  derived and/or modified sequence
atgaacagttcaaatggaaatgataatgggaatgggaagaatggcggtctcgagcatgtgccatcttcatcctctatccacaatggagacatggaaaaaatcttgctggacgcgcagcacgagagcggacagagttcctcccgaggctcaagccattgcgactctccaagcccccaggaggatggccagattatgttcgatgtggagatgcacacctctcgggaccactcttctcagtccgaggaggaggttgtggaaggcgagaaggaagtagaggctttaaaaaaatccgccgactgggtatccgattggagctctaggccagaaaatataccaccgaaagaatttcactttaggcatcccaagcggtctgtctcactgtccatgcgtaagtcgggggcaatgaaaaagggtggcattttcagtgcggagtttctcaaggtctttattccttccctctttctctcacacgtcttggccttgggtttggggatatacatcggtaagagattaagcacacctagcgctagcacctactag

SEQ ID NO: 341577 - DNA, 540 bp, Artificial Sequence
  derived and/or modified sequence
atgaactcgtcgaatggaaatgacaacggaaacggcaaaaacggcggtttggagcacgtgccttcatccagctctatccacaacggcgatatggagaaaatactgctggatgcccaacacgaatcaggccagagctcctccagggggtcatctcactgtgactcacccagtcctcaagaggacgggcaaattatgttcgacgtcgagatgcacacgtcacgcgatcacagtagtcagtccgaagaagaggtggtggagggcgagaaggaggtcgaggccctgaagaagtccgctgattgggtttcagactggagtagcagaccagagaatatccctccaaaggagttccactttcggcatcccaaaaggagcgtgagtctcagcatgaggaagtctggcgctatgaaaaaggggggaatcttctctgctgagttcctcaaggtattcattccatccttgttcttatctcacgtgctggccctgggactgggaatttacatcggaaagaggttatcgacccctagcgcctctacctattag

SEQ ID NO: 341578 - DNA, 540 bp, Artificial Sequence
  derived and/or modified sequence
atgaacagctccaatggcaatgacaacggaaacgggaagaatggcggtctcgagcatgtgcccagcagctcgtctatccacaacggagacatggaaaagatcctcttggacgcccagcatgagagtggacagtcttcttctagaggcagcagccactgtgacagcccgagcccccaggaggatggccagatcatgtttgatgtcgagatgcacactagccgagatcattccagtcagtctgaggaagaggttgtagagggggaaaaagaagtggaggcgctgaaaaaaagtgcggactgggtctcagactggagttcaagacccgaaaacatccctcccaaagagttccatttccgccaccctaagagatctgtaagcctatccatgcgtaagtctggggctatgaagaaagggggtatcttctctgcggaattccttaaggtttttatcccttccctcttcttgtcccacgtattagccctgggtctgggaatctacatcggtaagagactgtcaaccccctctgcttcaacgtactag

SEQ ID NO: 341579 - DNA, 540 bp, Artificial Sequence
  derived and/or modified sequence
atgaacagcagcaacggcaacgacaacggcaacggcaagaacggcggcctggagcacgtgcccagcagcagcagcatccacaacggcgacatggagaagatcctgctggacgcccagcacgagagcggccagagcagcagcagaggcagcagccactgcgacagccccagcccccaggaggacggccagatcatgttcgacgtggagatgcacaccagcagagaccacagcagccagagcgaggaggaggtggtggagggcgagaaggaggtggaggccctgaagaagagcgccgactgggtgagcgactggagcagcagacccgagaacatcccccccaaggagttccacttcagacaccccaagagaagcgtgagcctgagcatgagaaagagcggcgccatgaagaagggcggcatcttcagcgccgagttcctgaaggtgttcatccccagcctgttcctgagccacgtgctggccctgggcctgggcatctacatcggcaagagactgagcacccccagcgccagcacctactag

SEQ ID NO: 341580 - protein, 817 aa, Artificial Sequence
  derived and/or modified sequence
MAFSPWQILSPVQWAKWTWSAVRGGAAGEDEAGGPEGDPEEEDSQAETKSLSFSSDSEGNFETPEAETPIRSPFKESCDPSLGLAGPGAKSQESQEADEQLVAEVVEKCSSKTCSKPSENEVPQQAIDSHSVKNFREEPEHDFSKISIVRPFSIETKDSTDISAVLGTKAAHGCVTAVSGKALPSSPPDALQDEAMTEGSMGVTLEASAEADLKAGNSCPELVPSRRSKLRKPKPVPLRKKAIGGEFSDTNAAVEGTPLPKASYHFSPEELDENTSPLLGDARFQKSPPDLKETPGTLSSDTNDSGVELGEESRSSPLKLEFDFTEDTGNIEARKALPRKLGRKLGSTLTPKIQKDGISKSAGLEQPTDPVARDGPLSQTSSKPDPSQWESPSFNPFGSHSVLQNSPPLSSEGSYHFDPDNFDESMDPFKPTTTLTSSDFCSPTGNHVNEILESPKKAKSRLITTTEQVKFLCFLLSGCKVKKHETQSLALDACSRDEGAVISQISDISNRDGHATDEEKLASTSCGQKSAGAEVKGEPEEDLEYFECSNVPVSTINHAFSSSEAGIEKETCQKMEEDGSTVLGLLESSAEKAPVSVSCGGESPLDGICLSESDKTAVLTLIREEIITKEIEANEWKKKYEETRQEVLEMRKIVAEYEKTIAQMIEDEQRTSMTSQKSFQQLTMEKEQALADLNSVERSLSDLFRRYENLKGVLEGFKKNEEALKKCAQDYLARVKQEEQRYQALKIHAEEKLDKANEEIAQVRTKAKAESAALHAGLRKEQMKVESLERALQQKNQEIEELTKICDELIAKLGKTD

SEQ ID NO: 341581 - DNA, 2454 bp, Artificial Sequence
  derived and/or modified sequence
atggccttcagcccctggcagatcctgagccccgtgcagtgggccaagtggacctggagcgccgtgagaggcggcgccgccggcgaggacgaggccggcggccccgagggcgaccccgaggaggaggacagccaggccgagaccaagagcctgagcttcagcagcgacagcgagggcaacttcgagacccccgaggccgagacccccatcagaagccccttcaaggagagctgcgaccccagcctgggcctggccggccccggcgccaagagccaggagagccaggaggccgacgagcagctggtggccgaggtggtggagaagtgcagcagcaagacctgcagcaagcccagcgagaacgaggtgccccagcaggccatcgacagccacagcgtgaagaacttcagagaggagcccgagcacgacttcagcaagatcagcatcgtgagacccttcagcatcgagaccaaggacagcaccgacatcagcgccgtgctgggcaccaaggccgcccacggctgcgtgaccgccgtgagcggcaaggccctgcccagcagcccccccgacgccctgcaggacgaggccatgaccgagggcagcatgggcgtgaccctggaggccagcgccgaggccgacctgaaggccggcaacagctgccccgagctggtgcccagcagaagaagcaagctgagaaagcccaagcccgtgcccctgagaaagaaggccatcggcggcgagttcagcgacaccaacgccgccgtggagggcacccccctgcccaaggccagctaccacttcagccccgaggagctggacgagaacaccagccccctgctgggcgacgccagattccagaagagcccccccgacctgaaggagacccccggcaccctgagcagcgacaccaacgacagcggcgtggagctgggcgaggagagcagaagcagccccctgaagctggagttcgacttcaccgaggacaccggcaacatcgaggccagaaaggccctgcccagaaagctgggcagaaagctgggcagcaccctgacccccaagatccagaaggacggcatcagcaagagcgccggcctggagcagcccaccgaccccgtggccagagacggccccctgagccagaccagcagcaagcccgaccccagccagtgggagagccccagcttcaaccccttcggcagccacagcgtgctgcagaacagcccccccctgagcagcgagggcagctaccacttcgaccccgacaacttcgacgagagcatggaccccttcaagcccaccaccaccctgaccagcagcgacttctgcagccccaccggcaaccacgtgaacgagatcctggagagccccaagaaggccaagagcagactgatcaccaccaccgagcaggtgaagttcctgtgcttcctgctgagcggctgcaaggtgaagaagcacgagacccagagcctggccctggacgcctgcagcagagacgagggcgccgtgatcagccagatcagcgacatcagcaacagagacggccacgccaccgacgaggagaagctggccagcaccagctgcggccagaagagcgccggcgccgaggtgaagggcgagcccgaggaggacctggagtacttcgagtgcagcaacgtgcccgtgagcaccatcaaccacgccttcagcagcagcgaggccggcatcgagaaggagacctgccagaagatggaggaggacggcagcaccgtgctgggcctgctggagagcagcgccgagaaggcccccgtgagcgtgagctgcggcggcgagagccccctggacggcatctgcctgagcgagagcgacaagaccgccgtgctgaccctgatcagagaggagatcatcaccaaggagatcgaggccaacgagtggaagaagaagtacgaggagaccagacaggaggtgctggagatgagaaagatcgtggccgagtacgagaagaccatcgcccagatgatcgaggacgagcagagaaccagcatgaccagccagaagagcttccagcagctgaccatggagaaggagcaggccctggccgacctgaacagcgtggagagaagcctgagcgacctgttcagaagatacgagaacctgaagggcgtgctggagggcttcaagaagaacgaggaggccctgaagaagtgcgcccaggactacctggccagagtgaagcaggaggagcagagataccaggccctgaagatccacgccgaggagaagctggacaaggccaacgaggagatcgcccaggtgagaaccaaggccaaggccgagagcgccgccctgcacgccggcctgagaaaggagcagatgaaggtggagagcctggagagagccctgcagcagaagaaccaggagatcgaggagctgaccaagatctgcgacgagctgatcgccaagctgggcaagaccgactag

SEQ ID NO: 341582 - DNA, 93 bp, Artificial Sequence
  derived and/or modified sequence
atgaccgagggcagcatgggcgtgaccctggaggccagcgccgaggccgacctgaaggccggcaacagctgccccgagctggtgcccagctag

SEQ ID NO: 341583 - DNA, 2454 bp, Artificial Sequence
  derived and/or modified sequence
atggccttctctccctggcagatactgtcccccgtgcagtgggctaaatggacttggtctgcggttaggggaggcgccgcaggggaagacgaggccggcggtccagagggcgaccctgaggaagaggatagccaggccgagaccaaatccctctcttttagtagtgacagcgaggggaactttgagacaccggaagccgagactccaattcggtcccccttcaaagaaagctgcgacccctcactcggtcttgcgggaccaggcgccaagagccaagaaagccaggaggcagatgaacagctggtggctgaggttgtggaaaaatgcagttctaaaacatgctccaagccctctgagaatgaggtgccccaacaagctattgactcccactccgtgaaaaacttccgtgaggaaccggagcacgatttcagcaaaatctctattgttcgccccttctccattgaaacaaaggatagcactgatatttcggccgttctcggtaccaaggcagcccacggctgtgttacggccgtgagtggcaaggctctccctagctccccgcctgatgccctgcaggacgaagccatgactgagggatctatgggtgtcaccctggaggcctccgccgaagcagacctcaaggctggcaacagctgcccagaattggtgccgtcccggcgctctaaactgcgaaaacccaagcctgtgccgctgcgtaagaaggccataggtggggagttcagtgatacaaacgccgcagtcgagggcacaccgctacccaaggcatcctatcacttctcaccagaggagctagacgaaaacacatcccccctgctgggagacgctagattccaaaaaagcccgcccgatctgaaagagaccccaggaaccctgagctccgataccaacgattctggtgtggaactcggcgaggaatcccgctcaagccccctgaagctggagttcgattttactgaagacacaggaaacatagaggcacggaaggccctgcccagaaaattgggtagaaaactcggtagcacacttactcctaagattcagaaagacggaattagtaagagcgcaggcttggaacaaccgacagaccccgtggctcgcgacggccctctgtctcaaacgagctccaagcctgatccctcccagtgggaaagcccgagctttaacccctttggatcccactcagtactccagaacagccctcccttaagttccgaaggctcctaccacttcgatccagacaactttgatgagtcaatggatccattcaagcccacaacaactcttacttcaagtgatttttgttcgccaacaggcaatcacgtaaacgagattctagagtcaccaaagaaggcaaagtcacggctaattactaccaccgagcaggtcaaattcctgtgcttcctgcttagcggctgcaaggttaaaaaacacgaaacccagagccttgcacttgacgcctgctcacgcgacgagggagccgtcatttctcagatatcagacatttctaaccgtgacggccatgctacagatgaagaaaaactcgcctctactagctgtggacagaagagcgccggagctgaagtgaaaggagagcccgaggaggatctcgagtattttgagtgcagtaacgtgccagttagtaccattaaccatgccttctcctcaagtgaagcaggcattgagaaagagacctgtcagaagatggaggaagacggctctacagtacttggcctgctggaatctagcgccgagaaagcccccgtctcagtgagctgcggcggagagagccccttagatgggatatgtctctcggaaagtgacaagactgccgttctgacactgattagggaagagataattacaaaggaaattgaagcgaacgagtggaagaaaaagtatgaggagacgagacaggaggtgctggaaatgcgaaaaatagtggctgaatatgagaagaccattgcccagatgatcgaggacgaacagagaacgagcatgaccagccagaaatcattccagcagctcacaatggaaaaggaacaggccttagcagatctgaacagcgtggagcggtccttatcagacctattccgccgttatgaaaatctgaagggggtcttggaaggattcaaaaagaacgaagaggccttgaagaagtgcgcgcaggactacctggccagggtgaaacaggaggagcagaggtaccaggcactgaaaatccacgccgaagagaagctcgataaagccaatgaggaaatcgcacaggtgagaaccaaggcaaaggccgagagcgcggcccttcacgccgggctgcgcaaggaacagatgaaagtcgagagcttagagcgggctctgcagcagaaaaaccaagagatcgaggagctgactaagatttgtgatgaattgatcgctaagctgggtaaaacagactag

SEQ ID NO: 341584 - DNA, 93 bp, Artificial Sequence
  derived and/or modified sequence
atgactgagggttccatgggagttactcttgaggcctcagccgaggccgacctgaaggccggcaattcatgtccagagttggttccgtcttag

SEQ ID NO: 341585 - DNA, 2454 bp, Artificial Sequence
  derived and/or modified sequence
atggccttcagcccctggcagatcctgagccctgtgcagtgggccaagtggacctggagcgctgtgcggggcggcgctgctggagaagatgaggccggcggccctgagggggaccctgaggaggaggacagccaggccgagaccaagagcctgtccttcagcagtgacagcgagggcaactttgagaccccagaggccgagacccccatccgcagccccttcaaggagagctgtgaccccagcctgggcctggccggccctggggccaagagccaggagagccaggaggctgatgagcagctggtggccgaggtggtggagaagtgcagcagcaagacctgcagcaagcccagtgaaaatgaggtgccccagcaggccatcgacagccacagcgtgaagaacttccgggaggagcctgagcatgacttcagcaagatcagcatcgtgcggcccttcagcattgagaccaaggacagcacagacatctctgctgtgctgggcaccaaggccgcccacggctgtgtgacagctgtgtctgggaaggccctgcccagcagccccccagatgccctgcaggatgaggccatgacagagggctccatgggcgtgaccctggaggccagcgctgaggccgacctgaaggccggcaacagctgcccagagctggtgcccagccgccgcagcaagctgaggaagcccaagcctgtgcccctgaggaagaaggccatcggcggggagttcagtgacaccaatgctgctgtggagggcacccccctgcccaaggccagctaccacttcagccctgaggagctggatgagaacaccagccccctgctgggagatgcccgcttccagaagagccccccagacctgaaggagaccccaggcaccctgagcagtgacaccaatgattctggagtggagctgggggaggagagccgcagcagccccctgaagctggagtttgacttcacagaggacaccggcaacatcgaggccaggaaggccctgcccaggaagctgggcaggaagctgggcagcaccctgacccccaagatccagaaggatggcatcagcaagtctgctggcctggagcagcccacagatcctgtggccagagatggccccctgagccagaccagcagcaagccagaccccagccagtgggagagccccagcttcaaccccttcggcagccacagcgtgctgcagaacagcccccccctgagcagcgagggcagctaccactttgatcctgacaactttgatgagagcatggaccccttcaagcccaccaccaccctgaccagcagtgacttctgcagccccaccggcaaccacgtgaatgagatcctggagagccccaagaaggccaagagccgcctcatcaccaccacagagcaggtgaagttcctgtgcttcctgctgagcggctgcaaggtgaagaagcatgagacccagagcctggccctggatgcctgcagcagagatgaaggagctgtgatcagccagatcagtgacatcagcaacagagatggccacgccacagatgaggagaagctggccagcaccagctgtggccagaagtctgctggagctgaggtgaagggggagcctgaggaggacctggagtactttgaatgtagcaatgtgcctgtgtccaccatcaaccacgccttcagcagcagcgaggccggcatcgagaaggagacctgccagaagatggaggaggatggcagcacagtgctgggcctgctggagagcagcgctgagaaggcccctgtgtctgtgtcctgtggcggggagagccccctggatggcatctgcctgtctgagagtgacaagacagctgtgctgaccctcatccgggaggagatcatcaccaaggagattgaggccaatgagtggaagaagaagtatgaggagacccggcaggaggtgctggagatgaggaagatcgtggccgagtatgagaagaccatcgcccagatgattgaagatgagcagaggacctccatgaccagccagaagagcttccagcagctgaccatggagaaggagcaggccctggccgacctgaacagcgtggagaggagcctgagtgacctcttcagaagatatgagaacctgaagggcgtgctggagggcttcaagaagaatgaggaggccctgaagaagtgtgcccaggactacctggcccgggtgaagcaggaggagcagcgctaccaggccctgaagatccatgctgaggagaagctggacaaggccaatgaggagatcgcccaggtgaggaccaaggccaaggccgagagcgctgccctgcacgccggcctgaggaaggagcagatgaaggtggagagcctggagcgggccctgcagcagaagaaccaggagattgaggagctgaccaagatctgtgatgagctgattgccaagctgggcaagacagactag

SEQ ID NO: 341586 - DNA, 93 bp, Artificial Sequence
  derived and/or modified sequence
atgacagagggctccatgggcgtgaccctggaggccagcgctgaggccgacctgaaggccggcaacagctgcccagagctggtgcccagctag

SEQ ID NO: 341587 - DNA, 2454 bp, Artificial Sequence
  derived and/or modified sequence
atggccttcagcccctggcagatcctgagccccgtgcagtgggccaaatggacttggagtgccgtcagaggcggcgccgccggcgaggatgaggccggcggtcccgaaggtgatcctgaggaagaagattcccaggccgagacgaagagcctgagtttctcctccgactcggaaggcaattttgagactccagaagccgagaccccaatcagatcaccatttaaggaatcttgcgatccctcattggggttggccggccctggggctaaaagtcaggagtcacaggaagcggatgagcagctggttgccgaggtcgtcgaaaagtgctccagcaaaacatgctcaaagcccagcgagaacgaagtgcctcagcaggccattgatagtcattccgtgaaaaacttccgggaagagcctgaacacgacttcagcaaaatcagcatcgtgcgccccttctcgatcgaaactaaggattcaaccgatatctctgccgttttaggcactaaagctgcgcatggctgtgttaccgctgtgtccggcaaggcccttcctagcagtccccccgatgcgctacaggatgaggccatgactgaggggtcaatgggtgtgaccctggaggcgagtgcagaagccgacctaaaagctggaaacagctgcccggaactggtaccaagtcgaaggtccaaactgaggaagccaaagccagtaccccttaggaaaaaagctattggaggagagttttccgataccaacgccgctgtggagggcacccccctgccaaaggcttcataccacttttcacccgaagaacttgacgaaaacacttcacctctgctgggtgatgctcggttccagaaaagtccccctgatctcaaggagacacccggaaccctgagcagcgatactaacgacagcggcgttgagctgggagaagagagtaggtctagccccttgaagctagaatttgacttcacagaggatactggtaacattgaggcaagaaaagcactgccaaggaagcttggacgtaaattgggaagcactttaactcctaaaatccagaaggatgggatctcaaagtccgctggactggagcagccaacggatcccgttgctagagatggtcccttgagtcagacatcctccaagcctgatccctcccaatgggagtccccttctttcaatccgtttggatctcactctgtcctacagaactcaccccccctgagctcagagggatcctaccactttgaccctgacaacttcgacgagagtatggaccctttcaaacctaccaccactctgaccagtagcgacttctgtagtcccacagggaaccatgttaacgagatactcgaatctcccaaaaaggctaagtctaggctcatcaccacaaccgaacaagtaaaattcctctgttttctcctctccggatgcaaagtcaagaaacacgaaacacaatcactggccctcgacgcctgcagccgagatgaaggcgccgtgatttcacaaatctcagacatctccaatcgcgatggccatgccaccgacgaggagaagctggcgagcacatcctgtgggcagaagtcggctggcgcagaggtgaaaggcgaaccagaggaagatcttgagtactttgaatgcagcaacgtgcctgtgtctacaatcaaccacgcattcagttcttccgaagccggaatcgaaaaggaaacttgtcagaagatggaagaagatggctcaactgtgctaggtctcctcgaatcgagtgcagagaaagcccccgtatcagtatcatgcgggggggagagcccactggacgggatatgtctatcagagagcgataaaaccgccgttctcactctgattcgggaagaaatcattaccaaagaaatcgaagcaaacgaatggaagaagaagtatgaggaaacacgacaggaggtgctggaaatgcgcaaaatagtggctgaatatgagaagaccatcgctcagatgattgaagacgagcagaggactagtatgacttctcagaagtcctttcagcagctaacaatggagaaagagcaagcgctggctgacttaaactccgtggagcgatccctttccgatctttttaggagatatgagaatttgaagggtgtgctagaggggttcaagaaaaacgaggaggcgttgaagaaatgcgctcaggattatctcgcgagggttaaacaggaggaacagaggtaccaggctctgaagatccacgctgaggaaaagcttgacaaggccaatgaagagattgcccaggttagaacaaaagccaaggcagagagcgcggcacttcatgccgggctccggaaagaacagatgaaggtggagagcctcgaacgcgctctgcagcagaagaaccaggagatcgaagaactcacaaagatctgcgatgaacttattgccaagttagggaagactgattag

SEQ ID NO: 341588 - DNA, 93 bp, Artificial Sequence
  derived and/or modified sequence
atgaccgagggcagcatgggcgtgaccctggaggccagcgccgaggccgatctgaaggccgggaatagctgccccgagctggtgcctagttag

SEQ ID NO: 341589 - DNA, 2454 bp, Artificial Sequence
  derived and/or modified sequence
atggcattttctccatggcagattttgtcccccgtgcagtgggccaagtggacatggtcagctgtgagaggcggagccgctggagaagacgaggccggtgggccagagggtgaccccgaagaagaggacagccaggcagagactaagagcctgtctttctcctccgactccgagggcaatttcgagacaccagaggcggaaacccctatccggagcccctttaaggaatcatgcgatccaagtctgggcctggccggaccaggagcaaagtctcaggagagccaggaggcggatgagcaattggtggcagaggtagtggaaaaatgttcatccaagacatgttctaagccttccgaaaatgaggtaccccaacaggcgatcgattcccacagcgttaagaattttagggaagagccagagcacgacttttccaaaatttctatcgtgaggccattcagcatcgaaaccaaagacagcaccgacatctctgccgtcctcggaactaaggctgcccatggctgcgttactgccgtgtcaggaaaggctctcccctcctctccccctgatgccctacaggatgaggccatgacggagggctctatgggtgtgacactcgaggcctccgccgaagcagacctgaaagccggaaattcatgtcctgaactggtgcccagtcggaggtccaagctgcgtaagcccaagcccgtacctctgcggaaaaaggcgattggaggcgaattttctgatactaacgcagctgttgaggggactcctctgcctaaggcctcatatcactttagcccagaggaactagacgagaatacatcaccactgttgggggatgcaagatttcagaagagtcctcccgatctgaaagaaaccccgggaaccctgagctccgacaccaacgatagcggtgttgagctgggggaagagtctaggtcaagtccgctgaaacttgagttcgactttaccgaagatacaggaaatatagaggctaggaaggccctgccacggaaacttgggagaaagctcggtagtacccttacgccgaaaattcagaaagacggtatctcgaagtcggccggtctggagcagccaacggatcctgtagcacgggatggccctctgtcgcaaaccagcagcaagcctgatccaagccagtgggagtccccctcttttaacccattcggttcccattcagtgttgcagaactctccacctctatcctcagaagggtcctatcattttgacccagataactttgatgaatccatggatccatttaagcctactacaacactcacatcttccgacttctgttcccccacaggcaatcacgttaacgagattctggaaagtcccaaaaaggctaaatcgcgcttgattaccactaccgagcaggtcaagtttttatgcttccttctctcaggatgcaaggttaagaagcacgagacgcaaagcctggcactcgatgcctgtagtcgggatgaaggagcagttatctctcagatttctgatatatcgaatagggatggtcatgctacagacgaagaaaaattggcttcaacgagttgtggccagaaaagtgccggagctgaggtaaagggggaaccagaagaagacctggagtacttcgagtgttccaacgtgcccgtgtcaaccatcaaccacgcattttccagctcggaagccggaatcgagaaagagacctgtcagaagatggaggaggacggatcaacagtattgggcctactggagagcagcgccgagaaagctccagtgtcggtgtcttgcggcggagagtctccgctagacgggatatgtctttccgagtcggacaagacagctgttctcacactgatccgagaagagatcattaccaaggagatcgaggccaatgagtggaaaaaaaaatatgaggagaccaggcaggaggtgctcgaaatgaggaagatagtggccgagtacgagaagactatcgcccagatgatcgaggatgaacagagaacttcaatgaccagccagaagtccttccagcaactcactatggagaaagaacaggccctggcagacctcaattcagtggagcggtctctgagtgacctcttcaggaggtatgagaatttgaagggggtgctcgagggttttaagaagaatgaggaggctctcaagaagtgcgcgcaggactacctggccagagttaagcaggaggaacaacgctatcaagcccttaaaattcacgctgaggaaaaacttgacaaagcaaacgaggaaatcgcacaggtcaggaccaaagcaaaggcagaatccgctgctttgcacgcagggctgcgcaaggagcaaatgaaagttgagtccctcgagagggctcttcagcagaagaaccaggaaatcgaggagctgacaaaaatttgcgatgagcttatcgccaagcttggtaagaccgactag

SEQ ID NO: 341590 - DNA, 93 bp, Artificial Sequence
  derived and/or modified sequence
atgacggagggaagcatgggggtcacgctggaagcttctgccgaggccgatcttaaagcaggcaattcatgcccagagttagttccgtcctag

SEQ ID NO: 341591 - DNA, 7838 bp, Artificial Sequence
  derived and/or modified sequence
agctgatgcgcgccccgccggccgggaggcgggagtccgcgagccgggagcgggagcagcagaggtctagcagccgggcgccgcgggccgggggcctgaggaggccacaggacgggcgtcttcccggctagtggagcccggcgcggggcccgctgcggccgcaccgtgaggggaggaggccgaggaggacgcagcgccggctgccggcgggaggaagcgctccaccagggcccccgacggcactcgtttaaccacatccgcgcctctgctggaaacgcttgctggcgcctgtcaccggttccctccattttgaaagggaaaaaggctctccccacccattcccctgcccctaggagctggagccggaggagccgcgctcatggcgttcagcccgtggcagatcctgtcccccgtgcagtgggcgaaatggacgtggtctgcggtacgcggcggggccgccggcgaggacgaggctggcgggcccgagggcgaccccgaggaggaggattcgcaagccgagaccaaatccttgagtttcagctcggattctgaaggtaattttgagactcctgaagctgaaaccccgatccgatcacctttcaaggagtcctgtgatccatcactcggattggcaggacctggggccaaaagccaagaatcacaagaagctgatgaacagcttgtagcagaagtggttgaaaaatgttcatctaagacttgttctaaaccttcagaaaatgaagtgccacagcaggccattgactctcactcagtcaagaatttcagagaagaacctgaacatgattttagcaaaatttccatcgtgaggccattttcaatagaaacgaaggattccacggatatctcggcagtcctcggaacaaaagcagctcatggctgtgtaactgcagtctcaggcaaggctctgccttccagcccgccagacgccctccaggacgaggcgatgacagaaggcagcatgggggtcaccctcgaggcctccgcagaagctgatctaaaagctggcaactcctgtccagagcttgtgcccagcagaagaagcaagctgagaaagcccaagcctgtccccctgaggaagaaagcaattggaggagagttctcagacaccaacgctgctgtggagggcacacctctccccaaggcatcctatcacttcagtcctgaagagttggatgagaacacaagtcctttgctaggagatgccaggttccagaagtctccccctgaccttaaagaaactcccggcactctcagtagtgacaccaacgactcaggggttgagctgggggaggagtcgaggagctcacctctcaagcttgagtttgatttcacagaagatacaggaaacatagaggccaggaaagcccttccaaggaagcttggcaggaaactgggtagcacactgactcccaagatacaaaaagatggcatcagtaagtcagcaggtttagaacagcctacagacccagtggcacgagacgggcctctctcccaaacatcttccaagccagatcctagtcagtgggaaagccccagcttcaacccctttgggagccactctgttctgcagaactccccacccctctcttctgagggctcctaccactttgacccagataactttgacgaatccatggatccctttaaaccaactacgaccttaacaagcagtgacttttgttctcccactggtaatcacgttaatgaaatcttagaatcacccaagaaggcaaagtcgcgtttaataacgactactgaacaagtgaaatttctctgttttctgttgagtggctgtaaggtgaagaagcatgaaactcagtctctcgccctggatgcatgttctcgggatgaaggggcagtgatctcccagatttcagacatttctaatagggatggccatgctactgatgaggagaaactggcatccacgtcatgtggtcagaaatcagctggtgccgaggtgaaaggtgagccagaggaagacctggagtactttgaatgttccaatgttcctgtgtctaccataaatcatgcgttttcatcctcagaagcaggcatagagaaggagacgtgccagaagatggaagaagacgggtccactgtgcttgggctgctggagtcctctgcagagaaggcccctgtgtcggtgtcctgtggaggtgagagccccctggatgggatctgcctcagcgaatcagacaagacagccgtgctcaccttaataagagaagagataattactaaagagattgaagcaaatgaatggaagaagaaatacgaagagacccggcaagaagttttggagatgaggaaaattgtagctgaatatgaaaagactattgctcaaatgattgaagatgaacaaaggacaagtatgacctctcagaagagcttccagcaactgaccatggagaaggaacaggccctggctgaccttaactctgtggaaaggtccctttctgatctcttcaggagatatgagaacctgaaaggtgttctggaagggttcaagaagaatgaagaagccttgaagaaatgtgctcaggattacttagccagagttaaacaagaggagcagcgataccaggccctgaaaatccacgcagaagagaaactggacaaagccaatgaagagattgctcaggttcgaacaaaagcaaaggctgagagtgcagctctccatgctggactccgcaaagagcagatgaaggtggagtccctggaaagggccctgcagcagaagaaccaagaaattgaagaactgacaaaaatctgtgatgagctgattgcaaagctgggaaagactgactgagacactccccctgttagctcaacagatctgcatttggctgcttctcttgtgaccacaattatcttgccttatccaggaataattgcccctttgcagagaaaaaaaaaaacttaaaaaaagcacatgcctactgctgcctgtcccgctttgctgccaatgcaacagccctggaagaaaccctagagggttgcatagtctagaaaggagtgtgacctgacagtgctggagcctcctagtttccccctatgaaggttcccttaggctgctgagtttgggtttgtgatttatctttagtttgttttaaagtcatctttactttcccaaatgtgttaaatttgtaactcctctttggggtcttctccaccacctgtctgatttttttgtgatctgtttaatcttttaattttttagtatcagtggttttatttaaggagacagtttggcctattgttacttccaatttataatcaagaaggggctctggatccccttttaaattacacacactctcacacacatacatgtatgtttatagatgctgctgctcttttccctgaagcatagtcaagtaagaactgctctacagaaggacatatttccttggatgtgagaccctattttgaaatagagtcctgactcagaacaccaacttaagaatttgggggattaaagatgtgaagaccacagtcttgggttttcatatctggagaagactatttgccatgacgttttgttgccctggtatttggacactcctcagctttaatgggtgtggcccctttagggttagtcctcagactaatgatagtgtctgctttctgcatgaacggcaatatgggactccctccaagctagggtttggcaagtctgccctagagtcatttactctcctctgcctccatttgttaatacagaatcaacatttagtcttcattatctttttttttttttttgagacagagtttcgatctattttaagtatgtgaagaaaatctacttgtaaaaggctcagatcttaattaaaaggtaattgtagcacattaccaattataaggtgaagaaatgtttttttcccaagtgtgatgcattgttcttcagatgttgaaaagaaagcaaaaaataccttctaacttaagacagaatttttaacaaaatgagcagtaaaagtcacatgaaccactccaaaaatcagtgcattttgcatatttttaaacaaagacagcttgttgaatactgagaagaggagtgcaaggagaaggtctgtactaacaaagccaaattcctcaagctcttactggactcagttcagagtggtgggccattaaccccaacatggaatttttccatataaatctcaatgaattccctttcatttgaataggcaaacccaaatccatgcaagtgttttaaagcactgtcctgtcttaatcttacatgctgaaagtcttcatggtgatatgcactatattcagtatacgtatgttttcctacttctcttgtaaaactgttgcatgatccaacttcagcaatgaattgtgcctagtggagaacctctatagatcttaaaaaatgaattattctttagcagtgtattactcacatgggtgcaatctttagccccagggaggtcaataatgtcttttaaagccagaagtcacattttaccaatatgcatttatcataattggtgcttaggctgtatattcaagcctgttgtcttaacattttgtataaaaaagaacaacagaaattatctgtcatttgagaagtggcttgacaatcatttgagctttgaaagcagtcactgtggtgtaatatgaatgctgtcctagtggtcatagtaccaagggcacgtgtctccccttggtataactgatttcctttttagtcctctactgctaaataagttaattttgcattttgcagaaagaaacattgattgctaaatctttttgctgctgtgttttggtgttttcatgtttacttgttttatattgatctgttttaagtatgagaggcttatagtgccctccattgtaaatccatagtcatctttttaagcttattgtgtttaagaaagtagctatgtgttaaacagaggtgatggcagcccttccctagcacactggtggaagagaccccttaagaacctgaccccagtgaatgaagctgatgcacagggagcaccaaaggaccttcgttaagtgataattgtcctggcctctcagccatgaccgttatgaggaaatatcccccattcgaacttaacagatgcctcctctccaaagagaattaaaatcgtagcttgtacagatcaagagaatatactgggcagaatgaagtatgtttgtttatttttctttaaaaataaaggattttggaactctggagagtaagaatatagtatagagtttgcctcaacacatgtgagggccaaataacctgctagctaggcagtaataaactctgttacagaagagaaaaagggccgggcacagtggcttattcctgtaatcccaacactgtggaaggccgaggcaggaggatcacttgagtccaggagtttgaaacctacctaggcaacatggtgaaaccttgtctctaccaaaataaaaattagctgggcatggtggcacgtgcctgtggtcccagctacttgggaggctgaggtgggagcctgggaggtcaaggctgcagtgagccatgatcatgccactgcactccatcctgggtgacagcaagatcttgtctcaaaaaaaaaaaaaaaaaaaaaaaaaccaggagtgaaaaaggaaagtagaaggcagctgctggcctagatgttggtttgggaatattaggtgatcctgttgagattctggatccagagcaatttctttagcttttgactttgccaaagtgtagatagcctttatccagcagtattttaagtggggaatgcaacgtgaggccaactgaacaattccccccgtggctgcccagatagtcacagtcaaggttggagagtctccttccagccagtgacctacccaaaccttttgttctgtaaaactgctctggaaataccgggaagcccagttttctcacgtggtttctagcttcttcagactcagcccaaattaggaagtgcagaagcacatgatggtgaaaaacctaggatttggcagccttccagaatggtatggaatctgagggaagatttatgtttcgttttggaggatagctcaagttgaattttctttccagccagttaccctttcaacctacccatactttgtacaactcttacacaaatacttagatatttattagatagccctgaattcactctaattataaacagggagtgtaaactgcccccagatgttcctgggctgggtaaaagcagctggagtgaagcactcattttccataaaggtaacaaagggcagctcagtggttactcaagctcaaaagggtttttttaagagcaagcattggttaagtctgtgtatactgagttggaagtgatttcagcacattcttttttagtggagtgaaagttctgaagcccccttttaacttcctcttggtttttcattataattggtagccatctcatgaactgtctctgactgttgtctctttgtggtcatgtgattgtgagcttgctttctgacttgcatttctgactttatcctgttgttaggaagatagaaactaggttttgaaagattacatgattcaagcgagggattttaaagtaaagatgtatttattctgaagaatctaaaagataacagattatttgcttatgaaagaacaatatagtctgggaatcccagaatgtcaagccaaaggtctaagaagtcatctccttcaaatactttaataaagaagtatttcgaggagatatctgtccaaaaaggtttgactggcctccagattccagttatttttaaaaagcaacttaccactaaatccttgagtctccatagagtaacagtaaagaaactgatgtaacagactctcctctcaaaggatctcctctggaagagactatcagcggcagcattctccagggaagacccatcccctagtgccagagcttgcatcctggagactaaagattgcacttttttgtagttttttgtccaaatgcaatcccatttctgtgcctcttagcatgcagttagatttggacaaacaagattcctaaggaatgactttattaactataatatggttacagctattatataaatatatattctggttatagttctaatatggagatgttgtgtgcaatgctggcctgtggtggtctgtgtaatgctttaacttgtatggaggaggccaggctcagagctgagatgtggcctgaaccttccctgtatcgatcctttaatttagaactgtcaagatgtcactttctccccctctgccttttagtggtatctgacatatactcaaaacagtaatttcctggtcacatcattaactgctaattctgtatttataaagaattttcagatggacatgtacaaatttgaactcaaaccatccccagtccagatacagggcagcgtgtaggtgaccacaccagagcctcagcctcggtccttctcagccgtcgggataggatccaggcatttcttttaaatctcagaggtagcagtaaacttttcagtattgctgttagcaagtgtgtgtttgccaatagatacccattatactaatgtgccaagtaaatgttcattgcacatctgcttccactgtgttcccacgggtgccatgaagtgtgtgaggagcccctcatctggagggatgagtgctgcgttgactactgctatcaggattgtgttgtgtggaatattcatctacataaattttatatgcacagtaatttccctttttatatgtcaagtaactatttgtaaaagttatactcacaaattattataatgattactaatatattttttccatgtttcattgcctgaataaaaactgtttaccactgtta

SEQ ID NO: 341592 - protein, 792 aa, Artificial Sequence
  derived and/or modified sequence
MQRQTIKGAGAGGAALMAFSPWQILSPVQWAKWTWSAVRGGAAGEDEAGGPEGDPEEEDSQAETKSLSFSSDSEGNFETPEAETPIRSPFKESCDPSLGLAGPGAKSQESQEADEQLVAEVVEKCSSKTCSKPSENEVPQQAIDSHSVKNFREEPEHDFSKISIVRPFSIETKDSTDISAVLGTKAAHGCVTAVSGKALPSSPPDALQDEAMTEGSMGVTLEASAEADLKAGNSCPELVPSRRSKLRKPKPVPLRKKAIGGEFSDTNAAVEGTPLPKASYHFSPEELDENTSPLLGDARFQKSPPDLKETPGTLSSDTNDSGVELGEESRSSPLKLEFDFTEDTGNIEARKALPRKLGRKLGSTLTPKIQKDGISKSAGLEQPTDPVARDGPLSQTSSKPDPSQWESPSFNPFGSHSVLQNSPPLSSEGSYHFDPDNFDESMDPFKPTTTLTSSDFCSPTGNHVNEILESPKKAKSRLITSGCKVKKHETQSLALDACSRDEGAVISQISDISNRDGHATDEEKLASTSCGQKSAGAEVKGIEKETCQKMEEDGSTVLGLLESSAEKAPVSVSCGGESPLDGICLSESDKTAVLTLIREEIITKEIEANEWKKKYEETRQEVLEMRKIVAEYEKTIAQMIEDEQRTSMTSQKSFQQLTMEKEQALADLNSVERSLSDLFRRYENLKGVLEGFKKNEEALKKCAQDYLARVKQEEQRYQALKIHAEEKLDKANEEIAQVRTKAKAESAALHAGLRKEQMKVESLERALQQKNQEIEELTKICDELIAKLGKTD

SEQ ID NO: 341593 - protein, 731 aa, Artificial Sequence
  derived and/or modified sequence
MNNILKLKSSDSEGNFETPEAETPIRSPFKESCDPSLGLAGPGAKSQESQEADEQLVAEVVEKCSSKTCSKPSENEVPQQAIDSHSVKNFREEPEHDFSKISIVRPFSIETKDSTDISAVLGTKAAHGCVTAVSGKALPSSPPDALQDEAMTEGSMGVTLEASAEADLKAGNSCPELVPSRRSKLRKPKPVPLRKKAIGGEFSDTNAAVEGTPLPKASYHFSPEELDENTSPLLGDARFQKSPPDLKETPGTLSSDTNDSGVELGEESRSSPLKLEFDFTEDTGNIEARKALPRKLGRKLGSTLTPKIQKDGISKSAGLEQPTDPVARDGPLSQTSSKPDPSQWESPSFNPFGSHSVLQNSPPLSSEGSYHFDPDNFDESMDPFKPTTTLTSSDFCSPTGNHVNEILESPKKAKSRLITSGCKVKKHETQSLALDACSRDEGAVISQISDISNRDGHATDEEKLASTSCGQKSAGAEVKGIEKETCQKMEEDGSTVLGLLESSAEKAPVSVSCGGESPLDGICLSESDKTAVLTLIREEIITKEIEANEWKKKYEETRQEVLEMRKIVAEYEKTIAQMIEDEQRTSMTSQKSFQQLTMEKEQALADLNSVERSLSDLFRRYENLKGVLEGFKKNEEALKKCAQDYLARVKQEEQRYQALKIHAEEKLDKANEEIAQVRTKAKAESAALHAGLRKEQMKVESLERALQQKNQEIEELTKICDELIAKLGKTD

SEQ ID NO: 341594 - protein, 581 aa, Artificial Sequence
  derived and/or modified sequence
MTEGSMGVTLEASAEADLKAGNSCPELVPSRRSKLRKPKPVPLRKKAIGGEFSDTNAAVEGTPLPKASYHFSPEELDENTSPLLGDARFQKSPPDLKETPGTLSSDTNDSGVELGEESRSSPLKLEFDFTEDTGNIEARKALPRKLGRKLGSTLTPKIQKDGISKSAGLEQPTDPVARDGPLSQTSSKPDPSQWESPSFNPFGSHSVLQNSPPLSSEGSYHFDPDNFDESMDPFKPTTTLTSSDFCSPTGNHVNEILESPKKAKSRLITSGCKVKKHETQSLALDACSRDEGAVISQISDISNRDGHATDEEKLASTSCGQKSAGAEVKGIEKETCQKMEEDGSTVLGLLESSAEKAPVSVSCGGESPLDGICLSESDKTAVLTLIREEIITKEIEANEWKKKYEETRQEVLEMRKIVAEYEKTIAQMIEDEQRTSMTSQKSFQQLTMEKEQALADLNSVERSLSDLFRRYENLKGVLEGFKKNEEALKKCAQDYLARVKQEEQRYQALKIHAEEKLDKANEEIAQVRTKAKAESAALHAGLRKEQMKVESLERALQQKNQEIEELTKICDELIAKLGKTD

SEQ ID NO: 341595 - protein, 129 aa, Artificial Sequence
  derived and/or modified sequence
MAFSPWQILSPVQWAKWTWSAVRGGAAGEDEAGGPEGDPEEEDSQAETKSLSFSSDSEGNFETPEAETPIRSPFKESCDPSLGLAGPGAKSQESQEADEQLVAEVVEKCSSKTCSKPSENEVPQQAIDS

SEQ ID NO: 341596 - DNA, 2379 bp, Artificial Sequence
  derived and/or modified sequence
atgcagagacagaccatcaagggcgccggcgccggcggcgccgccctgatggccttcagcccctggcagatcctgagccccgtgcagtgggccaagtggacctggagcgccgtgagaggcggcgccgccggcgaggacgaggccggcggccccgagggcgaccccgaggaggaggacagccaggccgagaccaagagcctgagcttcagcagcgacagcgagggcaacttcgagacccccgaggccgagacccccatcagaagccccttcaaggagagctgcgaccccagcctgggcctggccggccccggcgccaagagccaggagagccaggaggccgacgagcagctggtggccgaggtggtggagaagtgcagcagcaagacctgcagcaagcccagcgagaacgaggtgccccagcaggccatcgacagccacagcgtgaagaacttcagagaggagcccgagcacgacttcagcaagatcagcatcgtgagacccttcagcatcgagaccaaggacagcaccgacatcagcgccgtgctgggcaccaaggccgcccacggctgcgtgaccgccgtgagcggcaaggccctgcccagcagcccccccgacgccctgcaggacgaggccatgaccgagggcagcatgggcgtgaccctggaggccagcgccgaggccgacctgaaggccggcaacagctgccccgagctggtgcccagcagaagaagcaagctgagaaagcccaagcccgtgcccctgagaaagaaggccatcggcggcgagttcagcgacaccaacgccgccgtggagggcacccccctgcccaaggccagctaccacttcagccccgaggagctggacgagaacaccagccccctgctgggcgacgccagattccagaagagcccccccgacctgaaggagacccccggcaccctgagcagcgacaccaacgacagcggcgtggagctgggcgaggagagcagaagcagccccctgaagctggagttcgacttcaccgaggacaccggcaacatcgaggccagaaaggccctgcccagaaagctgggcagaaagctgggcagcaccctgacccccaagatccagaaggacggcatcagcaagagcgccggcctggagcagcccaccgaccccgtggccagagacggccccctgagccagaccagcagcaagcccgaccccagccagtgggagagccccagcttcaaccccttcggcagccacagcgtgctgcagaacagcccccccctgagcagcgagggcagctaccacttcgaccccgacaacttcgacgagagcatggaccccttcaagcccaccaccaccctgaccagcagcgacttctgcagccccaccggcaaccacgtgaacgagatcctggagagccccaagaaggccaagagcagactgatcaccagcggctgcaaggtgaagaagcacgagacccagagcctggccctggacgcctgcagcagagacgagggcgccgtgatcagccagatcagcgacatcagcaacagagacggccacgccaccgacgaggagaagctggccagcaccagctgcggccagaagagcgccggcgccgaggtgaagggcatcgagaaggagacctgccagaagatggaggaggacggcagcaccgtgctgggcctgctggagagcagcgccgagaaggcccccgtgagcgtgagctgcggcggcgagagccccctggacggcatctgcctgagcgagagcgacaagaccgccgtgctgaccctgatcagagaggagatcatcaccaaggagatcgaggccaacgagtggaagaagaagtacgaggagaccagacaggaggtgctggagatgagaaagatcgtggccgagtacgagaagaccatcgcccagatgatcgaggacgagcagagaaccagcatgaccagccagaagagcttccagcagctgaccatggagaaggagcaggccctggccgacctgaacagcgtggagagaagcctgagcgacctgttcagaagatacgagaacctgaagggcgtgctggagggcttcaagaagaacgaggaggccctgaagaagtgcgcccaggactacctggccagagtgaagcaggaggagcagagataccaggccctgaagatccacgccgaggagaagctggacaaggccaacgaggagatcgcccaggtgagaaccaaggccaaggccgagagcgccgccctgcacgccggcctgagaaaggagcagatgaaggtggagagcctggagagagccctgcagcagaagaaccaggagatcgaggagctgaccaagatctgcgacgagctgatcgccaagctgggcaagaccgactag

SEQ ID NO: 341597 - DNA, 2196 bp, Artificial Sequence
  derived and/or modified sequence
atgaacaacatcctgaagctgaagagcagcgacagcgagggcaacttcgagacccccgaggccgagacccccatcagaagccccttcaaggagagctgcgaccccagcctgggcctggccggccccggcgccaagagccaggagagccaggaggccgacgagcagctggtggccgaggtggtggagaagtgcagcagcaagacctgcagcaagcccagcgagaacgaggtgccccagcaggccatcgacagccacagcgtgaagaacttcagagaggagcccgagcacgacttcagcaagatcagcatcgtgagacccttcagcatcgagaccaaggacagcaccgacatcagcgccgtgctgggcaccaaggccgcccacggctgcgtgaccgccgtgagcggcaaggccctgcccagcagcccccccgacgccctgcaggacgaggccatgaccgagggcagcatgggcgtgaccctggaggccagcgccgaggccgacctgaaggccggcaacagctgccccgagctggtgcccagcagaagaagcaagctgagaaagcccaagcccgtgcccctgagaaagaaggccatcggcggcgagttcagcgacaccaacgccgccgtggagggcacccccctgcccaaggccagctaccacttcagccccgaggagctggacgagaacaccagccccctgctgggcgacgccagattccagaagagcccccccgacctgaaggagacccccggcaccctgagcagcgacaccaacgacagcggcgtggagctgggcgaggagagcagaagcagccccctgaagctggagttcgacttcaccgaggacaccggcaacatcgaggccagaaaggccctgcccagaaagctgggcagaaagctgggcagcaccctgacccccaagatccagaaggacggcatcagcaagagcgccggcctggagcagcccaccgaccccgtggccagagacggccccctgagccagaccagcagcaagcccgaccccagccagtgggagagccccagcttcaaccccttcggcagccacagcgtgctgcagaacagcccccccctgagcagcgagggcagctaccacttcgaccccgacaacttcgacgagagcatggaccccttcaagcccaccaccaccctgaccagcagcgacttctgcagccccaccggcaaccacgtgaacgagatcctggagagccccaagaaggccaagagcagactgatcaccagcggctgcaaggtgaagaagcacgagacccagagcctggccctggacgcctgcagcagagacgagggcgccgtgatcagccagatcagcgacatcagcaacagagacggccacgccaccgacgaggagaagctggccagcaccagctgcggccagaagagcgccggcgccgaggtgaagggcatcgagaaggagacctgccagaagatggaggaggacggcagcaccgtgctgggcctgctggagagcagcgccgagaaggcccccgtgagcgtgagctgcggcggcgagagccccctggacggcatctgcctgagcgagagcgacaagaccgccgtgctgaccctgatcagagaggagatcatcaccaaggagatcgaggccaacgagtggaagaagaagtacgaggagaccagacaggaggtgctggagatgagaaagatcgtggccgagtacgagaagaccatcgcccagatgatcgaggacgagcagagaaccagcatgaccagccagaagagcttccagcagctgaccatggagaaggagcaggccctggccgacctgaacagcgtggagagaagcctgagcgacctgttcagaagatacgagaacctgaagggcgtgctggagggcttcaagaagaacgaggaggccctgaagaagtgcgcccaggactacctggccagagtgaagcaggaggagcagagataccaggccctgaagatccacgccgaggagaagctggacaaggccaacgaggagatcgcccaggtgagaaccaaggccaaggccgagagcgccgccctgcacgccggcctgagaaaggagcagatgaaggtggagagcctggagagagccctgcagcagaagaaccaggagatcgaggagctgaccaagatctgcgacgagctgatcgccaagctgggcaagaccgactag

SEQ ID NO: 341598 - DNA, 1746 bp, Artificial Sequence
  derived and/or modified sequence
atgaccgagggcagcatgggcgtgaccctggaggccagcgccgaggccgacctgaaggccggcaacagctgccccgagctggtgcccagcagaagaagcaagctgagaaagcccaagcccgtgcccctgagaaagaaggccatcggcggcgagttcagcgacaccaacgccgccgtggagggcacccccctgcccaaggccagctaccacttcagccccgaggagctggacgagaacaccagccccctgctgggcgacgccagattccagaagagcccccccgacctgaaggagacccccggcaccctgagcagcgacaccaacgacagcggcgtggagctgggcgaggagagcagaagcagccccctgaagctggagttcgacttcaccgaggacaccggcaacatcgaggccagaaaggccctgcccagaaagctgggcagaaagctgggcagcaccctgacccccaagatccagaaggacggcatcagcaagagcgccggcctggagcagcccaccgaccccgtggccagagacggccccctgagccagaccagcagcaagcccgaccccagccagtgggagagccccagcttcaaccccttcggcagccacagcgtgctgcagaacagcccccccctgagcagcgagggcagctaccacttcgaccccgacaacttcgacgagagcatggaccccttcaagcccaccaccaccctgaccagcagcgacttctgcagccccaccggcaaccacgtgaacgagatcctggagagccccaagaaggccaagagcagactgatcaccagcggctgcaaggtgaagaagcacgagacccagagcctggccctggacgcctgcagcagagacgagggcgccgtgatcagccagatcagcgacatcagcaacagagacggccacgccaccgacgaggagaagctggccagcaccagctgcggccagaagagcgccggcgccgaggtgaagggcatcgagaaggagacctgccagaagatggaggaggacggcagcaccgtgctgggcctgctggagagcagcgccgagaaggcccccgtgagcgtgagctgcggcggcgagagccccctggacggcatctgcctgagcgagagcgacaagaccgccgtgctgaccctgatcagagaggagatcatcaccaaggagatcgaggccaacgagtggaagaagaagtacgaggagaccagacaggaggtgctggagatgagaaagatcgtggccgagtacgagaagaccatcgcccagatgatcgaggacgagcagagaaccagcatgaccagccagaagagcttccagcagctgaccatggagaaggagcaggccctggccgacctgaacagcgtggagagaagcctgagcgacctgttcagaagatacgagaacctgaagggcgtgctggagggcttcaagaagaacgaggaggccctgaagaagtgcgcccaggactacctggccagagtgaagcaggaggagcagagataccaggccctgaagatccacgccgaggagaagctggacaaggccaacgaggagatcgcccaggtgagaaccaaggccaaggccgagagcgccgccctgcacgccggcctgagaaaggagcagatgaaggtggagagcctggagagagccctgcagcagaagaaccaggagatcgaggagctgaccaagatctgcgacgagctgatcgccaagctgggcaagaccgactag

SEQ ID NO: 341599 - DNA, 390 bp, Artificial Sequence
  derived and/or modified sequence
atggccttcagcccctggcagatcctgagccccgtgcagtgggccaagtggacctggagcgccgtgagaggcggcgccgccggcgaggacgaggccggcggccccgagggcgaccccgaggaggaggacagccaggccgagaccaagagcctgagcttcagcagcgacagcgagggcaacttcgagacccccgaggccgagacccccatcagaagccccttcaaggagagctgcgaccccagcctgggcctggccggccccggcgccaagagccaggagagccaggaggccgacgagcagctggtggccgaggtggtggagaagtgcagcagcaagacctgcagcaagcccagcgagaacgaggtgccccagcaggccatcgacagctag

SEQ ID NO: 341600 - DNA, 2379 bp, Artificial Sequence
  derived and/or modified sequence
atgcaaaggcagacaatcaagggagcaggtgcaggaggagccgcacttatggcgttctccccctggcaaattttatctccggtccaatgggcaaagtggacgtggtccgccgtgcgcgggggtgctgctggcgaggatgaagctggggggcctgaaggtgatccggaggaggaagattcgcaggccgaaacaaaaagcctgagttttagtagcgactcggagggcaatttcgaaacccccgaggccgagaccccaatccgcagcccctttaaggagtcatgtgaccctagcctgggactcgcgggccctggtgccaaatcgcaggaaagccaggaggctgatgagcagctggtggctgaggtggtagagaagtgctcatccaagacatgttcaaaacctagcgagaacgaggttcctcagcaagcaatcgacagccattccgtgaagaacttcagggaagaacccgagcacgatttctcaaagattagcatcgtgcgcccttttagtattgagacgaaagactccactgacatctccgcagtattggggaccaaggcagcccatggctgcgtgacagcagtcagtggcaaggccttgccatcttctcctccagatgccctccaagacgaggctatgacagaaggctccatgggcgtgactctcgaagcatccgccgaagccgaccttaaggctggcaactcatgccccgagctggtgccctcaaggagaagtaagctgaggaagcctaagccagtgcccctcagaaagaaagctattggcggcgagttctccgacacgaatgcagccgttgagggcacaccactgccgaaggcttcttatcactttagtcccgaggaactggacgagaatacctctcctctgctgggcgacgcgcgcttccaaaagagtcctcctgacctgaaggagaccccaggcaccttatcgagtgataccaacgatagcggggtggagctcggggaagagagccgttcaagccctctgaaactggagttcgatttcactgaagacactggaaatatagaggctcgtaaagctctcccacgaaagcttgggagaaagctaggctctacactgacccctaaaattcagaaagatggtatttctaagtccgcaggccttgaacagcccactgacccagtggctcgcgatggacccctgtcgcagacctctagcaagcccgatccttcgcaatgggaaagcccttcgtttaatccttttggatctcactccgtcctacaaaactcccccccattaagcagtgaaggtagctaccacttcgacccggataattttgacgagtcaatggatcccttcaaacccaccactacgctgacgagctccgatttctgttcccccaccgggaatcatgtgaacgaaattcttgagagcccgaaaaaggccaagagccgtctgatcacctctggctgcaaagtcaaaaagcatgaaacacaatccctagctctcgacgcctgctcaagggatgagggagccgtgataagccagatttctgatatcagcaacagggatgggcatgcgaccgacgaagaaaagcttgccagtaccagttgtgggcagaagtctgccggcgctgaagtgaagggcatagaaaaggagacctgtcagaagatggaggaggatggcagcacagtgctcggtctgctagaatcatccgccgaaaaggcaccggtgtccgtttcttgcggcggagagagtccattggatggcatatgtctgagcgagtctgataaaaccgctgtgctgacactcatccgggaggaaataattacaaaggaaatcgaggctaacgaatggaaaaagaaatatgaggagactcgccaagaggtattggagatgcgcaagatcgtggctgaatacgagaaaacgatagctcagatgatcgaggatgaacaaagaacatctatgacctctcagaaatcctttcagcagctgaccatggagaaggaacaggcattggcggatctgaatagcgtcgagcgatctctatccgaccttttcagaaggtatgagaatctgaaaggggtgcttgaaggattcaaaaagaatgaagaggcgctcaaaaaatgcgcccaggattacctggctcgggtgaaacaagaggagcagcgttaccaggcacttaagattcacgccgaggagaagctcgacaaagcaaatgaagaaatagcacaggtgaggactaaagctaaggccgaatcagccgccctgcatgccggtctgcgcaaggaacagatgaaagttgaaagcctggaaagggctctccagcaaaagaatcaagaaattgaggagctgaccaagatatgcgacgaactgattgcaaagctcggcaaaactgactag

SEQ ID NO: 341601 - DNA, 2196 bp, Artificial Sequence
  derived and/or modified sequence
atgaacaatatactaaagcttaaatctagtgacagtgaaggcaacttcgaaaccccagaagctgagaccccaatcagatccccatttaaagaaagttgtgatccatccctgggcctggccgggcccggtgctaagtcgcaggaaagtcaggaggctgatgagcagcttgtagccgaagtggtggagaaatgctcaagcaagacctgcagcaagccaagtgagaatgaagtaccacagcaggctatcgattctcatagcgtaaagaactttcgtgaagaaccagagcacgatttctccaagatcagcatcgtgcggcctttcagcatagagaccaaggattcgactgacatttccgccgtgcttggaaccaaagcagcacatggttgtgtgaccgctgtgagcggcaaagcactcccttctagtccccctgacgccctccaagacgaagccatgaccgaggggtccatgggcgtcaccttagaggcctccgctgaagccgacctgaaagcaggcaatagctgtcctgaactggtcccaagccgtcgctccaagctcagaaaacctaaacctgtgcccctccggaagaaagcgatcggcggagagttcagcgataccaacgccgctgtcgagggcactccccttcccaaggcgagctatcactttagccctgaggagctcgatgagaatacgtcccctctgttaggagatgcccggtttcaaaagtctcctcccgacttgaaggagacacctggcacactgtcctccgatacaaatgattcgggtgtggagttgggggaagagagtcgctccagtcccctcaaacttgagttcgacttcaccgaggacactggtaacatcgaagctcggaaggcgctccctcggaaactgggccgtaaactgggaagtactctgactcctaaaatccagaaggacgggataagcaaatctgcaggcctggagcagcccacggaccctgtggccagggatggtccgctcagccagacttcctctaaaccagatccaagccagtgggagtctccttctttcaaccctttcgggtcccactccgttctgcagaactcgccccctcttagctctgagggaagctaccatttcgaccctgacaatttcgatgagtcaatggatcctttcaaaccaacgactactcttacttcatctgacttctgctcccccacaggaaaccacgttaacgaaatactagaatcccctaagaaagccaagtcccgcctgatcacttcaggctgtaaggtcaagaagcatgagacccaatccttggcattagacgcgtgtagccgcgacgagggggcggtgataagccagatttccgacatttctaaccgggatgggcacgctactgacgaagaaaaactggccagtacatcgtgcggtcagaagtctgccggggcagaggtcaagggtattgaaaaggagacatgccagaaaatggaggaagacggttccactgtcttggggctcctggagtcctctgcagaaaaggctcccgttagcgtgtcctgcggcggagagtcccctctcgacggcatttgcctttccgagtcagacaagaccgccgtgctgacattaattcgagaggaaattatcactaaagaaatagaggctaacgagtggaagaaaaagtacgaggaaactcgccaggaggtcctcgagatgcgaaaaattgtggcagagtatgaaaagacaatcgctcagatgattgaggacgagcagcggacctcaatgacctcccagaagtcattccagcaactgaccatggagaaggaacaagcactggcagatctgaatagcgtggagcggtcacttagcgacctctttcgacgctacgaaaatctcaaaggagttctcgaagggttcaagaaaaatgaggaggcgctgaagaagtgcgcccaggattaccttgctagagtcaagcaagaggaacagcgataccaggctcttaagattcacgctgaagaaaagctggacaaagccaacgaggagatcgcccaggttcgaacgaaagcaaaggcagagagcgcagctttgcatgccgggcttaggaaagaacagatgaaggtcgaatcacttgagcgtgcactccagcaaaaaaatcaagaaatcgaggagctgactaagatctgtgatgaactgatagccaagctcggcaaaacggattag

SEQ ID NO: 341602 - DNA, 1746 bp, Artificial Sequence
  derived and/or modified sequence
atgacagaaggatctatgggtgtcaccttagaggcaagtgctgaagctgacctcaaggcagggaacagctgcccggaattggtcccatctcggagatccaagctacgcaaaccaaagcccgtccccctgcgcaagaaagctataggcggagagttctcagacacaaacgcagccgttgaggggaccccgcttcctaaggcctcctaccattttagtcccgaggagcttgacgagaacacttcccccttacttggagatgccagatttcagaagagtccaccagatctgaaggagacccccggaaccctatcatctgacaccaatgacagcggagtggaattgggggaggagtctaggtcctccccgctgaaactggaattcgacttcacagaggacacagggaatattgaagctcgcaaagcactacctcgcaagctggggagaaaactgggatctaccctgacacccaaaatccagaaggatggtatcagcaagtccgccggattggagcaaccgacagatcccgtggcacgcgacggccctctgagccagacatcatccaaaccggatccatctcaatgggagagcccgtcatttaatccatttggttcgcattcggtgttgcaaaattcaccacccctcagcagcgagggctcttatcactttgaccctgataattttgacgagagcatggaccccttcaaaccgaccactactctgacaagttcagacttctgtagccctactggcaaccacgttaacgagatcttggagtctcccaagaaagctaagagccggcttataacttctggatgcaaggtgaaaaagcatgagacacagtcccttgccctcgacgcttgcagccgggatgaaggggccgtgatctcccaaatttccgatatttcaaatagggatgggcacgcgactgacgaggagaagcttgcttctacctcctgtggtcagaaaagcgcaggagcagaggtaaagggaatagaaaaagaaacgtgccaaaagatggaagaggacggatctacggttctgggattgctagagagtagtgctgagaaggcaccagtcagcgtcagctgcggaggggagtcacctcttgatggtatctgcttgagtgagagcgacaagacagcggttctaacattgatcagagaagaaattattacaaaagagattgaagctaacgagtggaagaagaagtacgaagaaaccagacaggaggtgttggaaatgcgcaaaatcgtcgccgaatatgaaaagactatagctcagatgatagaagacgagcagaggacaagtatgaccagtcaaaaatccttccagcagcttaccatggagaaagagcaagctctggcagatctgaactctgtagagcgaagtctgagcgatctgttcagaaggtacgaaaacttgaaaggcgtactcgaagggttcaagaagaacgaggaggccttgaagaagtgtgctcaggactacctcgccagagtaaagcaagaagagcaaagataccaagcccttaagattcacgccgaagagaaactggataaagctaatgaggaaatcgcccaggtgagaacaaaggctaaggctgagtcagccgccctgcacgccggcctgaggaaggaacagatgaaggtggagtcacttgagagggctctgcaacagaaaaaccaagaaatcgaggaactcacgaagatatgcgacgagcttattgctaagctggggaagaccgactag

SEQ ID NO: 341603 - DNA, 390 bp, Artificial Sequence
  derived and/or modified sequence
atggctttctccccttggcagatcctctctcccgtccagtgggccaaatggacctggagtgctgtgcgagggggagccgcaggggaggacgaagccggcggtcctgagggggatcctgaggaggaggacagtcaggccgagactaaaagtctgagcttttcttctgatagtgaggggaacttcgagacccctgaagccgaaacacccatccgaagtccattcaaggagtcctgtgatccctctttagggcttgctggtcctggggcaaaatcccaggagagccaggaggctgacgagcagctggtcgcggaagtggtcgaaaagtgttcaagtaagacatgctcgaagccatcggagaatgaggtaccccagcaggccattgattcctag

SEQ ID NO: 341604 - DNA, 2379 bp, Artificial Sequence
  derived and/or modified sequence
atgcagaggcagaccatcaagggagctggagctggaggagctgccctgatggccttcagcccctggcagatcctgagccctgtgcagtgggccaagtggacctggagcgctgtgcggggcggcgctgctggagaagatgaggccggcggccctgagggggaccctgaggaggaggacagccaggccgagaccaagagcctgtccttcagcagtgacagcgagggcaactttgagaccccagaggccgagacccccatccgcagccccttcaaggagagctgtgaccccagcctgggcctggccggccctggggccaagagccaggagagccaggaggctgatgagcagctggtggccgaggtggtggagaagtgcagcagcaagacctgcagcaagcccagtgaaaatgaggtgccccagcaggccatcgacagccacagcgtgaagaacttccgggaggagcctgagcatgacttcagcaagatcagcatcgtgcggcccttcagcattgagaccaaggacagcacagacatctctgctgtgctgggcaccaaggccgcccacggctgtgtgacagctgtgtctgggaaggccctgcccagcagccccccagatgccctgcaggatgaggccatgacagagggctccatgggcgtgaccctggaggccagcgctgaggccgacctgaaggccggcaacagctgcccagagctggtgcccagccgccgcagcaagctgaggaagcccaagcctgtgcccctgaggaagaaggccatcggcggggagttcagtgacaccaatgctgctgtggagggcacccccctgcccaaggccagctaccacttcagccctgaggagctggatgagaacaccagccccctgctgggagatgcccgcttccagaagagccccccagacctgaaggagaccccaggcaccctgagcagtgacaccaatgattctggagtggagctgggggaggagagccgcagcagccccctgaagctggagtttgacttcacagaggacaccggcaacatcgaggccaggaaggccctgcccaggaagctgggcaggaagctgggcagcaccctgacccccaagatccagaaggatggcatcagcaagtctgctggcctggagcagcccacagatcctgtggccagagatggccccctgagccagaccagcagcaagccagaccccagccagtgggagagccccagcttcaaccccttcggcagccacagcgtgctgcagaacagcccccccctgagcagcgagggcagctaccactttgatcctgacaactttgatgagagcatggaccccttcaagcccaccaccaccctgaccagcagtgacttctgcagccccaccggcaaccacgtgaatgagatcctggagagccccaagaaggccaagagccgcctcatcaccagcggctgcaaggtgaagaagcatgagacccagagcctggccctggatgcctgcagcagagatgaaggagctgtgatcagccagatcagtgacatcagcaacagagatggccacgccacagatgaggagaagctggccagcaccagctgtggccagaagtctgctggagctgaggtgaagggcatcgagaaggagacctgccagaagatggaggaggatggcagcacagtgctgggcctgctggagagcagcgctgagaaggcccctgtgtctgtgtcctgtggcggggagagccccctggatggcatctgcctgtctgagagtgacaagacagctgtgctgaccctcatccgggaggagatcatcaccaaggagattgaggccaatgagtggaagaagaagtatgaggagacccggcaggaggtgctggagatgaggaagatcgtggccgagtatgagaagaccatcgcccagatgattgaagatgagcagaggacctccatgaccagccagaagagcttccagcagctgaccatggagaaggagcaggccctggccgacctgaacagcgtggagaggagcctgagtgacctcttccgccgctatgagaacctgaagggcgtgctggagggcttcaagaagaatgaggaggccctgaagaagtgtgcccaggactacctggcccgggtgaagcaggaggagcagcgctaccaggccctgaagatccacgccgaggagaagctggacaaggccaatgaggagatcgcccaggtgaggaccaaggccaaggccgagagcgctgccctgcatgctggcctgaggaaggagcagatgaaggtggagagcctggagcgggccctgcagcagaagaaccaggagattgaggagctgaccaagatctgtgatgagctgattgccaagctgggcaagacagactag

SEQ ID NO: 341605 - DNA, 2196 bp, Artificial Sequence
  derived and/or modified sequence
atgaacaacatcctgaagctgaagagcagtgacagcgagggcaactttgagaccccagaggccgagacccccatccgcagccccttcaaggagagctgtgaccccagcctgggcctggccggccctggggccaagagccaggagagccaggaggctgatgagcagctggtggccgaggtggtggagaagtgcagcagcaagacctgcagcaagcccagtgaaaatgaggtgccccagcaggccatcgacagccacagcgtgaagaacttccgggaggagcctgagcatgacttcagcaagatcagcatcgtgcggcccttcagcattgagaccaaggacagcacagacatctctgctgtgctgggcaccaaggccgcccacggctgtgtgacagctgtgtctgggaaggccctgcccagcagccccccagatgccctgcaggatgaggccatgacagagggctccatgggcgtgaccctggaggccagcgctgaggccgacctgaaggccggcaacagctgcccagagctggtgcccagcagaagaagcaagctgaggaagcccaagcctgtgcccctgaggaagaaggccatcggcggggagttcagtgacaccaatgctgctgtggagggcacccccctgcccaaggccagctaccacttcagccctgaggagctggatgagaacaccagccccctgctgggagatgcccgcttccagaagagccccccagacctgaaggagaccccaggcaccctgagcagtgacaccaatgacagcggcgtggagctgggggaggagagccgcagcagccccctgaagctggagtttgacttcacagaagatactggaaacatcgaggccaggaaggccctgcccaggaagctgggcaggaagctgggcagcaccctgacccccaagatccagaaggatggcatcagcaagtctgctggcctggagcagcccacagatcctgtggccagagatggccccctgagccagaccagcagcaagccagaccccagccagtgggagagccccagcttcaaccccttcggcagccacagcgtgctgcagaacagcccccccctgagcagcgagggcagctaccactttgatcctgacaactttgatgagagcatggaccccttcaagcccaccaccaccctgaccagcagtgacttctgcagccccactggaaaccacgtgaatgagatcctggagagccccaagaaggccaagagccgcctcatcaccagcggctgcaaggtgaagaagcatgagacccagagcctggccctggatgcctgcagcagagatgagggcgctgtgatcagccagatcagtgacatcagcaacagagatggccacgccacagatgaggagaagctggccagcaccagctgtggccagaagtctgctggagctgaggtgaagggcatcgagaaggagacctgccagaagatggaggaggatggcagcacagtgctgggcctgctggagagcagcgctgagaaggcccctgtgtctgtgtcctgtggcggggagagccccctggatggcatctgcctgtctgagagtgacaagacagctgtgctgaccctcatccgggaggagatcatcaccaaggagattgaggccaatgagtggaagaagaagtatgaggagacccggcaggaggtgctggagatgaggaagatcgtggccgagtatgagaagaccatcgcccagatgattgaagatgagcagaggacctccatgaccagccagaagagcttccagcagctgaccatggagaaggagcaggccctggccgacctgaacagcgtggagaggagcctgagtgacctcttcagaagatatgagaacctgaagggcgtgctggagggcttcaagaagaatgaggaggccctgaagaagtgtgcccaggactacctggcccgggtgaagcaggaggagcagcgctaccaggccctgaagatccatgctgaggagaagctggacaaggccaatgaggagatcgcccaggtgaggaccaaggccaaggccgagagcgctgccctgcacgccggcctgaggaaggagcagatgaaggtggagagcctggagcgggccctgcagcagaagaaccaggagattgaggagctgaccaagatctgtgatgagctgattgccaagctgggcaagacagactag

SEQ ID NO: 341606 - DNA, 1746 bp, Artificial Sequence
  derived and/or modified sequence
atgacagagggctccatgggcgtgaccctggaggccagcgctgaggccgacctgaaggccggcaacagctgcccagagctggtgcccagcagaagaagcaagctgaggaagcccaagcctgtgcccctgaggaagaaggccatcggcggggagttcagtgacaccaatgctgctgtggagggcacccccctgcccaaggccagctaccacttcagccctgaggagctggatgagaacaccagccccctgctgggagatgcccgcttccagaagagccccccagacctgaaggagaccccaggcaccctgagcagtgacaccaatgacagcggcgtggagctgggggaggagagccgcagcagccccctgaagctggagtttgacttcacagaagatactggaaacatcgaggccaggaaggccctgcccaggaagctgggcaggaagctgggcagcaccctgacccccaagatccagaaggatggcatcagcaagtctgctggcctggagcagcccacagatcctgtggccagagatggccccctgagccagaccagcagcaagccagaccccagccagtgggagagccccagcttcaaccccttcggcagccacagcgtgctgcagaacagcccccccctgagcagcgagggcagctaccactttgatcctgacaactttgatgagagcatggaccccttcaagcccaccaccaccctgaccagcagtgacttctgcagccccactggaaaccacgtgaatgagatcctggagagccccaagaaggccaagagccgcctcatcaccagcggctgcaaggtgaagaagcatgagacccagagcctggccctggatgcctgcagcagagatgagggcgctgtgatcagccagatcagtgacatcagcaacagagatggccacgccacagatgaggagaagctggccagcaccagctgtggccagaagtctgctggagctgaggtgaagggcatcgagaaggagacctgccagaagatggaggaggatggcagcacagtgctgggcctgctggagagcagcgctgagaaggcccctgtgtctgtgtcctgtggcggggagagccccctggatggcatctgcctgtctgagagtgacaagacagctgtgctgaccctcatccgggaggagatcatcaccaaggagattgaggccaatgagtggaagaagaagtatgaggagacccggcaggaggtgctggagatgaggaagatcgtggccgagtatgagaagaccatcgcccagatgattgaagatgagcagaggacctccatgaccagccagaagagcttccagcagctgaccatggagaaggagcaggccctggccgacctgaacagcgtggagaggagcctgagtgacctcttcagaagatatgagaacctgaagggcgtgctggagggcttcaagaagaatgaggaggccctgaagaagtgtgcccaggactacctggcccgggtgaagcaggaggagcagcgctaccaggccctgaagatccatgctgaggagaagctggacaaggccaatgaggagatcgcccaggtgaggaccaaggccaaggccgagagcgctgccctgcacgccggcctgaggaaggagcagatgaaggtggagagcctggagcgggccctgcagcagaagaaccaggagattgaggagctgaccaagatctgtgatgagctgattgccaagctgggcaagacagactag

SEQ ID NO: 341607 - DNA, 390 bp, Artificial Sequence
  derived and/or modified sequence
atggccttcagcccctggcagatcctgagccctgtgcagtgggccaagtggacctggagcgctgtgcggggcggcgctgctggagaagatgaggccggcggccctgagggggaccctgaggaggaggacagccaggccgagaccaagagcctgtccttcagcagtgacagcgagggcaactttgagaccccagaggccgagacccccatccgcagccccttcaaggagagctgtgaccccagcctgggcctggccggccctggggccaagagccaggagagccaggaggctgatgagcagctggtggccgaggtggtggagaagtgcagcagcaagacctgcagcaagcccagtgaaaatgaggtgccccagcaggccatcgacagctag

SEQ ID NO: 341608 - DNA, 2379 bp, Artificial Sequence
  derived and/or modified sequence
atgcagcggcagaccatcaagggcgccggcgccggcggcgccgccctaatggctttcagtccgtggcaaattctctcccccgtccaatgggctaagtggacgtggtcagctgttagaggcggtgctgcaggtgaggatgaggctgggggacctgaaggcgaccctgaggaggaggatagccaggcagagaccaagtccctctctttcagttcagattcagaaggcaatttcgagactcccgaggctgaaacgcctattcggtctccattcaaagaaagttgtgatccgtcattagggctcgctggtcccggcgctaagagccaggaaagccaggaagcggatgagcagctcgtggccgaagtcgttgaaaaatgttcctctaaaacctgctccaaaccttcagaaaacgaggtaccacagcaggccatcgactcccacagcgtcaaaaattttcgggaggagcctgagcacgacttcagcaaaatatcgatcgtaagaccatttagtatagaaaccaaagactctacagatatcagcgccgtccttggaaccaaggccgcgcacggatgtgttaccgcagtgtccggaaaagctctccctagctctcctccggacgccctacaagacgaggctatgaccgaggggtccatgggagtgaccctcgaggctagcgcagaggctgatttgaaggctggaaacagctgtccggaacttgtcccaagccggcgctccaagctccgcaagcccaagcccgtccccctgagaaaaaaagctataggcggcgaattcagcgacacaaatgctgctgttgaaggaaccccattacccaaggccagctaccactttagtccagaagagcttgacgagaacacatccccccttctcggcgatgctagatttcagaaatcaccgcccgacctgaaggaaactccagggacgctgtccagtgacactaatgacagcggtgttgaattaggagaggagtctcgttcgtccccactgaagctggaatttgatttcactgaggatacaggtaacatagaagctcgcaaggcactccctcgcaaactgggaaggaaattaggaagtacactgacgcccaagattcagaaggacgggatctccaaaagcgccgggttggagcagccaaccgatccagtcgctagagacgggccacttagtcaaacaagcagcaagccagaccctagtcagtgggagtcccccagctttaatcccttcggcagtcactccgtcctgcaaaacagccccccgctgtcatcagaaggctcctaccactttgatcccgacaactttgacgagagtatggatccgtttaagccgaccactacactcacctcttcagacttctgcagccccaccggaaatcatgtcaatgagattctggagtctcccaaaaaggctaagagccgactgatcactagcggctgtaaggtaaagaagcatgagacacagagcctggctctcgacgcctgctctagagacgagggagctgtgatcagtcagatcagtgatatctccaaccgggacggtcatgctactgacgaggagaagctggcttccacctcatgtggacagaagtccgccggagccgaggtcaaggggatagagaaggaaacttgccagaagatggaggaagatggttctacagtcctaggcttactcgaatcaagcgccgaaaaggcccctgtgtctgtgtcgtgcggtggtgaatcaccacttgatggcatctgcctgtctgaaagtgacaaaacagcggtcctgaccctgatccgggaagaaatcatcaccaaagagatcgaggccaatgaatggaagaaaaaatacgaagagacccgccaagaggtgctggaaatgcgcaagatcgtggccgaatatgagaagacaattgctcagatgatcgaggacgagcagagaacctctatgacctcacagaaatcctttcagcagcttaccatggaaaaggaacaggctttggctgacctgaattccgtggagcggagtctcagcgaccttttccgtcgttacgaaaacctcaagggtgtcctggagggattcaagaaaaacgaggaggcactgaagaagtgcgctcaggactacctagcgcgcgtgaagcaggaggaacagcggtaccaggctctaaaaatacacgctgaggagaagttagataaggccaatgaagaaattgcgcaggtgcggactaaggctaaggccgaaagcgcagcactccacgcagggctgaggaaagaacagatgaaagttgagtctctggaaagggcccttcagcagaaaaaccaggagattgaggaactgacaaaaatctgtgatgagttgatcgcaaagctgggcaaaaccgattag

SEQ ID NO: 341609 - DNA, 2196 bp, Artificial Sequence
  derived and/or modified sequence
atgaacaacatcctgaagctgaagagcagcgacagcgagggcaactttgagacgccagaggcggaaacacccattcgtagtccattcaaggaatcctgtgatccatctctcgggctggctggaccaggcgccaagagccaggagtcccaggaagctgacgagcagctcgtggcggaggtagtagaaaagtgcagctctaaaacatgttccaaacctagcgagaacgaggtgcctcagcaagccattgactctcactccgtcaaaaacttccgagaggagcccgagcatgatttttccaaaatctcgatagtgaggccctttagcattgagacaaaggattcgaccgacatctccgccgttttgggaaccaaagctgcccacggatgtgtgacagccgtctcaggaaaggccctgccttccagtcccccagatgcactccaggacgaagccatgaccgaagggtcaatgggcgtcacactggaagcttccgctgaggcagacttgaaggccgggaacagctgtcccgagctcgttccttcccggcgttcaaaactgaggaaacccaagccagtacccctgcggaaaaaggcaattgggggggaattttctgacaccaatgccgctgtagaaggcacacccctgccgaaggcctcgtatcacttttctccagaggaattggacgaaaacaccagtcccctccttggggacgcgagatttcagaaatctccacctgatctaaaagagacccctggcacactgagctccgacaccaatgattccggggtcgagttgggggaggagagtcggtcaagccccctgaagctggaatttgacttcacagaagacactggaaatattgaagcccggaaagctctccctcgcaaacttggccgcaagctggggagcaccctgacaccgaagattcaaaaagacgggatttccaaatctgccggcctggagcaaccaaccgaccctgtggcacgcgatggcccacttagccagacctcttcaaaaccagacccgagccaatgggaaagcccttcctttaacccattcggctctcacagcgtgctacagaatagtccccccttaagttcggaggggtcctaccacttcgaccccgacaatttcgatgagtctatggaccccttcaaaccaaccaccacccttaccagtagcgacttttgcagtcctactgggaatcacgtaaatgagatattggagtcccctaagaaagctaaaagcaggctaatcacttctggttgtaaagtgaagaaacacgagacccaaagtctcgctctggacgcctgtagcagggacgaaggcgccgttatctcccagatatccgacatcagcaatcgagatgggcatgcaaccgatgaggaaaagctggcatccaccagctgcgggcagaaaagcgccggtgctgaggtcaagggaattgaaaaagagacatgtcagaaaatggaagaggacggatcaaccgtgttgggactcctggagagttctgccgagaaggcgcctgtttcagtgtcatgtggaggcgagagcccccttgacgggatttgcttgtccgagtctgacaagaccgccgtccttacccttattagagaggaaatcattacgaaggagattgaagccaacgagtggaaaaaaaagtatgaggaaacacgccaagaagtgctggagatgaggaaaattgtcgctgagtacgaaaaaacgattgcacagatgatcgaagacgaacagcgaactagtatgacctcccaaaaatcctttcagcaattgacaatggaaaaagagcaggctttggccgacttgaacagtgtagaaagatcgctgtctgacctgttccggaggtacgagaatctaaagggtgtgttggaaggctttaagaagaacgaggaggccctgaagaaatgtgctcaagattaccttgcacgagtaaagcaggaggagcaaaggtaccaggccttaaaaattcacgcggaggaaaaactggataaggcaaatgaagagatcgcgcaggtaaggaccaaggccaaggcagagagcgcggccttgcacgccggtttgcggaaagagcagatgaaggtggaatcgctggagagggcattgcagcagaagaaccaggagattgaagaactgaccaaaatctgcgatgaactcattgcgaagctcggaaaaaccgattag

SEQ ID NO: 341610 - DNA, 1746 bp, Artificial Sequence
  derived and/or modified sequence
atgaccgagggcagcatgggcgtgaccctggaggccagcgccgaggctgacctgaaggccggcaatagttgtcctgaactggtgccatcccggcggtccaaattgaggaagccaaaacctgtacctttgcggaaaaaggccatcggcggcgaattctcagatactaacgccgccgtggaaggaacaccccttcctaaagcaagttaccactttagccccgaagaattggatgagaacacatccccactgctgggggatgctagattccaaaaatctcctccagacctcaaggaaacacccggaacactgtcctcagatactaatgactctggagtggagctgggcgaggaaagtaggtcatctcccctcaaactcgagttcgacttcaccgaggacacgggaaacatcgaggcccgcaaagcgctgccaaggaagctcggacgcaagctcggctccactttgacaccgaagatacagaaagacggcatcagtaaaagtgctggtctcgaacagcccacggatccagtagcacgagatgggcccctctcccagacatcaagcaagccagatccttcacagtgggagagcccatccttcaatcctttcggctcacactctgtcctccaaaatagcccgccccttagctccgagggatcctaccatttcgaccctgacaacttcgatgaatcaatggacccattcaagccaacgacaacactgacatcatccgacttctgttctccgaccgggaaccacgtgaatgagatcctggaaagtccgaaaaaagcgaagtcacgccttattacttcagggtgcaaggtgaaaaagcacgagacccagtctcttgccctggacgcttgtagccgcgacgagggagcagtgatttcacagattagcgatattagcaatcgagacggtcacgccaccgatgaggagaaactggctagcacttcttgcggccagaagtcagcaggagccgaggtcaagggaatcgagaaagagacctgtcaaaagatggaagaagatggaagtactgtgcttggccttcttgaatcctcggctgagaaagctccagtgtcagtgtcatgtggaggcgaaagccccctagatggaatctgcctgtccgaatcagacaagactgcggtgctcaccctcattagggaggagattattaccaaagaaatcgaggctaacgagtggaagaaaaagtatgaggaaacacggcaggaagtgctggagatgcgtaagattgtcgcagaatacgagaagactatcgcacaaatgatcgaggacgagcagcgcacctctatgacctctcagaagtcgttccagcaactgaccatggaaaaagaacaagcacttgccgacctcaatagtgtcgagaggtctctgtctgatctgtttaggaggtatgaaaacttaaaaggcgtgctcgaaggctttaagaaaaacgaggaggctttgaagaagtgtgcacaggattacctagccagggttaagcaggaggaacagcggtaccaggcactgaaaattcacgcagaggaaaaactggataaggctaacgaggagattgcacaggtcaggactaaagcaaaggcggaaagcgctgccctccacgctggtttaagaaaagaacaaatgaaggtagagtccctggagcgcgccttacagcagaagaatcaggagattgaagagttgaccaaaatctgtgacgaactcatcgccaaactgggtaagaccgattag

SEQ ID NO: 341611 - DNA, 390 bp, Artificial Sequence
  derived and/or modified sequence
atggccttcagcccctggcagatcctgagccccgtgcagtgggccaaatggacatggtctgccgtgaggggcggagcggcgggtgaagacgaggcgggtggtcccgaaggcgatcctgaggaagaagactcccaggccgaaaccaagtctctaagtttctcctcagatagcgaaggaaattttgagacccccgaggccgagactccaatacgatcgccttttaaagagtcctgtgatcctagcttaggattggctgggcccggagcaaagagccaggaaagtcaggaggccgacgaacaactggtggctgaggtcgtggaaaaatgctcttccaagacatgtagtaaacctagcgagaacgaggtgccccaacaggctatcgattcatag

SEQ ID NO: 341612 - DNA, 2379 bp, Artificial Sequence
  derived and/or modified sequence
atgcaacggcagactatcaagggggctggggcaggcggtgctgcactgatggccttttccccatggcagatcctttctcccgtgcagtgggcaaaatggacttggtccgctgtgcgcggaggtgccgctggagaagacgaggcgggagggccagagggcgaccccgaagaggaggacagtcaagcagagacaaagagcctgtccttctcctcagatagcgaaggcaatttcgaaactcccgaagccgagacacccattcgttcaccttttaaggagtcctgtgatccttcactgggactcgcagggcctggtgccaaaagccaggaaagccaggaggccgacgagcagttagtagccgaagtcgtcgaaaaatgcagctccaaaacctgctctaagccatcagaaaatgaggttccccagcaggcaatcgactcacactccgtcaagaattttcgcgaagaaccagaacatgacttcagtaagattagcatcgtgcggccattctcaatcgagactaaagacagcactgatatttccgcagtgctgggtactaaggccgcacatggttgcgtgactgctgtatccggaaaggctcttccaagctctccgcctgacgcattacaggacgaggctatgacagaaggaagcatgggggtcacactagaagccagcgcagaggctgacctgaaagcgggtaacagttgtcccgagttggtcccttcacgaagatctaagctccgaaaacctaaaccagttcccctcagaaaaaaagccatcggaggtgaattttccgataccaatgccgctgttgaggggacccccctacccaaagcttcttatcactttagtcctgaggagttagatgaaaacacttctcctctcctcggcgatgcacggttccagaagtcccccccagatctgaaagagacacccggaactctcagcagcgatacaaacgactctggggtggagctgggcgaggagtctaggtctagtcccctgaaactggagtttgattttaccgaggatacaggcaacatcgaagcacgcaaggcccttcccagaaaacttgggcgtaaactgggatcgacacttaccccaaagattcaaaaggatggaatctccaaaagtgcgggattagaacagcctacagaccctgtggccagagacggacctcttagtcagaccagcagtaaacccgatccaagccagtgggaatcacccagttttaacccctttggcagtcactcagtattgcagaacagccctccattgagttctgagggttcttaccactttgaccccgacaattttgatgaatccatggacccctttaaaccaacaactacactcacatctagcgacttttgttcaccaaccggcaatcatgtgaacgagatcctggaaagcccgaagaaagctaaatcacggctaataacctctggctgcaaggtgaagaaacatgagacccaatccttggcactcgacgcttgcagccgcgacgagggcgcagttatcagtcagatctctgacattagcaatcgcgatggacacgctaccgacgaggagaagctggcttctacctcgtgcggacaaaaatctgctggggcagaagtgaagggcatcgagaaggagacctgccagaagatggaggaggacggcagcactgtcctgggcctgctagaatcttctgccgagaaagcaccagtatcagtctcgtgtgggggtgaatcaccccttgatggtatttgcctgtcggaaagtgacaaaaccgccgttctaaccctcattcgggaagagatcatcaccaaggaaatcgaagcaaacgagtggaagaaaaagtacgaggaaacaagacaagaagtactggagatgcgtaagatcgtagctgaatacgagaagaccatcgcccaaatgatcgaggacgaacagcgaaccagcatgacgtctcagaagagttttcagcagctgactatggaaaaggagcaggctctggcggatctgaattcagtggagcggagtctgtccgacttgttccggaggtatgagaatcttaagggcgtcctcgaagggtttaagaaaaacgaggaggccttaaagaagtgtgcccaggattacttggccagagtgaagcaggaggaacagaggtatcaggccctgaagattcacgcggaggagaagcttgataaagcaaatgaagagattgcgcaagtgagaacaaaggccaaagcagagagcgctgctctgcatgcagggcttaggaaagagcagatgaaggtcgagtcactagagagagccctgcagcagaagaaccaggagatagaggaactaaccaaaatttgtgacgagttaattgctaagctcggcaaaaccgattag

SEQ ID NO: 341613 - DNA, 2196 bp, Artificial Sequence
  derived and/or modified sequence
atgaacaacatactcaaactgaagtctagcgactctgaagggaatttcgagactccagaagcagaaacccccatcaggagtccctttaaagagtcatgcgacccctccctcggactggcgggtcccggagctaagagccaggagtcacaagaagccgatgagcaattagtggccgaggtagtggaaaaatgttcgtccaaaacatgcagcaaacccagcgagaacgaggtcccccagcaggcgatcgacagccattccgtcaagaacttcagggaagagccagagcacgacttttcgaagatctcaatcgtgcgacctttcagcatcgagactaaagattcaaccgacatatctgctgtcctgggcaccaaggctgctcacggctgtgtaactgcagtatcaggaaaggccctgccatcgtcacctcccgatgccctgcaggatgaggctatgacggagggcagtatgggcgtgacgctggaggcttctgccgaggccgaccttaaggctggcaattcctgtccagaacttgtaccatcacgacgaagtaagttgcgaaagcccaagccagtgcccctgagaaagaaggccattgggggtgaatttagtgacaccaacgcggctgtggaggggactcctctgcctaaggcgtcttaccacttttcccctgaggaacttgacgagaatacctcccctctgctgggagacgcaagattccagaagagtccacctgatttgaaggagacccccggtacgctgtcttctgatactaacgacagtggagtcgagttgggggaagaaagtcgatccagccccctgaagctggaattcgatttcaccgaagataccggaaacatagaggcacgaaaagcgctgccgcgaaagctgggaaggaaacttggtagcacccttacaccaaaaatccaaaaagacggcatttccaagagtgccggactggagcaaccaaccgaccccgtcgcaagagatggacccctgagccagacaagctctaagcccgatccctcgcagtgggagtctccaagcttcaatcccttcggctcccattccgtgctccaaaacagtccccctctcagcagtgaaggatcctaccacttcgaccctgacaactttgatgaatctatggatcccttcaaacccaccacaactctcacctccagcgacttttgtagtccgacaggaaaccatgtgaatgaaatcttggagtctcccaagaaagctaagtccaggctgattacatctggctgtaaagtgaagaagcatgagacacagagcctcgccctggacgcttgcagccgggatgaaggtgcagtgatttctcagatcagcgacatttctaacagggacggccacgccactgacgaggaaaaactcgcatctaccagctgcggccaaaaaagcgccggagccgaggtcaagggcatcgagaaagaaacgtgtcagaaaatggaagaggacggctccacggttttgggcctgcttgaatcttcagctgaaaaggcgcctgtcagcgtgtcttgcggcggagaatcccccctggatggaatctgcctgtcagaatcagataagaccgccgtgctcactctcatccgcgaagaaataataacgaaggagatagaagctaacgagtggaaaaagaaatacgaggagacccgtcaggaggtgctagagatgaggaaaatcgtggccgaatatgagaaaacgatcgcgcaaatgattgaggacgagcagcggactagtatgacctcacagaaatcctttcagcagctcactatggaaaaggaacaggcactggcggatctgaactccgtggagcgttctctatccgacttattcagacgatacgaaaacctgaagggagtgctggaaggttttaagaagaatgaggaagctctgaaaaaatgtgcacaggattacttggctagagtaaagcaggaggaacagcgctatcaggctctaaagatccacgctgaggagaagctggataaggctaacgaggaaattgcacaagttcgtaccaaggcaaaagctgaatcggccgcacttcatgcagggcttcggaaagaacaaatgaaagtggaaagcctggagagggctctgcaacagaagaatcaggaaatagaggagctgaccaagatctgtgatgagcttatagcaaagttggggaaaactgactag

SEQ ID NO: 341614 - DNA, 1746 bp, Artificial Sequence
  derived and/or modified sequence
atgaccgaggggtctatgggggtgacattagaagcttctgcagaagcagatctcaaagccggaaactcatgtccagagctcgtgccatctcgacgctcgaagcttaggaagcccaaacctgtgcccctgagaaagaaggccatcggcggtgaattcagcgataccaatgcagcggtggagggcacccccctgcccaaggcatcgtaccatttctcgcccgaggagctggacgagaatacttcccccctgctgggtgatgcaaggttccagaagtccccccctgatctgaaggaaacccccggaaccttgagttcagatactaacgacagtggagttgaactgggggaagagagcagatcaagtccattaaagcttgagttcgatttcaccgaagacaccggtaatatcgaagcgcgtaaggcacttcccaggaagctcggccgaaaactcgggtctaccctcacgcccaagattcagaaggacggtatctccaaaagcgcgggtctggagcagccaacggatccagtggccagagatggccctctgtctcagacaagtagcaaaccggaccccagtcaatgggagtcccccagctttaatcccttcggctctcactctgtgctgcagaactctcctcctctcagctcagaaggtagttaccatttcgatcctgacaatttcgacgaatctatggacccctttaagcctaccacaacacttacttccagtgacttctgctctccgaccggaaaccatgtaaacgagatcctggaatccccaaagaaagccaagagcaggcttatcaccagtggatgcaaagttaagaaacatgaaacgcagagcttagccctggatgcctgtagccgagatgagggagcagtgatatcccaaattagcgatatttcaaaccgggatgggcacgccacagatgaggagaaactcgctagcacctcctgcggccagaagtcggctggcgcagaggtgaagggtatcgagaaggagacttgccaaaaaatggaagaagacgggagcacagtcctcgggctattagaatccagcgctgagaaagctcctgtttcggtgagttgtggtggagagagtcctctcgatggaatatgcctatccgagtctgataaaacggctgtactcaccttgatccgggaagagataatcacgaaggaaatcgaagcaaatgaatggaagaaaaaatacgaggagactcggcaggaggtgcttgagatgaggaagatagtagccgaatatgagaagacaattgctcagatgatcgaggacgagcagcgcacctctatgaccagccagaaatccttccaacagctcacaatggaaaaagagcaggcccttgcagacttgaattcagtggagcgcagcctgtctgacttattccgcaggtacgaaaacctgaagggagtactggagggatttaaaaaaaacgaggaggctttaaagaaatgtgcccaagactacctagcccgagttaagcaagaagagcagaggtatcaagcccttaagatccacgcagaggagaaactcgataaagccaacgaggagatcgctcaggtgcgaacaaaggctaaagccgagtccgccgctttacacgccggtttgcgtaaagaacagatgaaagtggagtcactagagagagcgctgcagcaaaaaaatcaggagatcgaagagctgaccaagatctgtgacgagctaattgccaaactcggcaagactgactag

SEQ ID NO: 341615 - DNA, 390 bp, Artificial Sequence
  derived and/or modified sequence
atggccttcagcccttggcagattctgtccccagtgcaatgggccaaatggacctggagtgccgtaagaggcggtgccgcaggtgaggatgaggccggaggacccgagggggatcccgaagaggaggattcgcaagccgagaccaagtctctgagcttttcttcagattcagagggcaatttcgagacccctgaagcggagacacctattcgcagcccattcaaagagagttgcgatcctagtcttggtctcgctggcccaggggcaaagtcacaggagagccaggaggctgacgagcagttggttgccgaggtggtagaaaagtgtagcagcaagacctgcagtaagcctagcgagaacgaggttccgcagcaggccattgatagttag

SEQ ID NO: 341616 - DNA, 2635 bp, Artificial Sequence
  derived and/or modified sequence
agatgcgaaatcagcggtagcaggtggcgcagaagggagaggggagcgaccctggggaccgactctggggaccctcgccgaagagtcccaagggttccaaggccagagagaggtcctggtcttgattgctggcatgtttactcttccaagtacactgagatcaaatgcaaagacaaaccatcaaaggagctggagccggaggagccgcgctcatggcgttcagcccgtggcagatcctgtcccccgtgcagtgggcgaaatggacgtggtctgcggtacgcggcggggccgccggcgaggacgaggctggcgggcccgagggcgaccccgaggaggaggattcgcaagccgagaccaaatccttgagtttcagctcggattctgaaggtaattttgagactcctgaagctgaaaccccgatccgatcacctttcaaggagtcctgtgatccatcactcggattggcaggacctggggccaaaagccaagaatcacaagaagctgatgaacagcttgtagcagaagtggttgaaaaatgttcatctaagacttgttctaaaccttcagaaaatgaagtgccacagcaggccattgactctcactcagtcaagaatttcagagaagaacctgaacatgattttagcaaaatttccatcgtgaggccattttcaatagaaacgaaggattccacggatatctcggcagtcctcggaacaaaagcagctcatggctgtgtaactgcagtctcaggcaaggctctgccttccagcccgccagacgccctccaggacgaggcgatgacagaaggcagcatgggggtcaccctcgaggcctccgcagaagctgatctaaaagctggcaactcctgtccagagcttgtgcccagcagaagaagcaagctgagaaagcccaagcctgtccccctgaggaagaaagcaattggaggagagttctcagacaccaacgctgctgtggagggcacacctctccccaaggcatcctatcacttcagtcctgaagagttggatgagaacacaagtcctttgctaggagatgccaggttccagaagtctccccctgaccttaaagaaactcccggcactctcagtagtgacaccaacgactcaggggttgagctgggggaggagtcgaggagctcacctctcaagcttgagtttgatttcacagaagatacaggaaacatagaggccaggaaagcccttccaaggaagcttggcaggaaactgggtagcacactgactcccaagatacaaaaagatggcatcagtaagtcagcaggtttagaacagcctacagacccagtggcacgagacgggcctctctcccaaacatcttccaagccagatcctagtcagtgggaaagccccagcttcaacccctttgggagccactctgttctgcagaactccccacccctctcttctgagggctcctaccactttgacccagataactttgacgaatccatggatccctttaaaccaactacgaccttaacaagcagtgacttttgttctcccactggtaatcacgttaatgaaatcttagaatcacccaagaaggcaaagtcgcgtttaataacgagtggctgtaaggtgaagaagcatgaaactcagtctctcgccctggatgcatgttctcgggatgaaggggcagtgatctcccagatttcagacatttctaatagggatggccatgctactgatgaggagaaactggcatccacgtcatgtggtcagaaatcagctggtgccgaggtgaaaggcatagagaaggagacgtgccagaagatggaagaagacgggtccactgtgcttgggctgctggagtcctctgcagagaaggcccctgtgtcggtgtcctgtggaggtgagagccccctggatgggatctgcctcagcgaatcagacaagacagccgtgctcaccttaataagagaagagataattactaaagagattgaagcaaatgaatggaagaagaaatacgaagagacccggcaagaagttttggagatgaggaaaattgtagctgaatatgaaaagactattgctcaaatgattgaagatgaacaaaggacaagtatgacctctcagaagagcttccagcaactgaccatggagaaggaacaggccctggctgaccttaactctgtggaaaggtccctttctgatctcttcaggagatatgagaacctgaaaggtgttctggaagggttcaagaagaatgaagaagccttgaagaaatgtgctcaggattacttagccagagttaaacaagaggagcagcgataccaggccctgaaaatccacgcagaagagaaactggacaaagccaatgaagagattgctcaggttcgaacaaaagcaaaggctgagagtgcagctctccatgctggactccgcaaagagcagatgaaggtggagtccctggaaagggccctgcagcagaagaaccaagaaattgaagaactgacaaaaatctgtgatgagctgattgcaaagctgggaaagactgactgagacactccccctgttagctcaacagatctgcatttggctgcttctcttgtgaccacaattatcttgccttatccaggaataattgccccttt

SEQ ID NO: 341617 - DNA, 3011 bp, Artificial Sequence
  derived and/or modified sequence
ggggaccgactctggggaccctcgccgaagagtcccaagggttccaaggccagagagaggtcctggtcttgattgctggcatgtttactcttccaagtacactgagatcaaatgcaaagacaaaccatcaaagaaaataactctaaaatctggacatgatatacaaagtgactgcctaaaggagctgaagagaggacataagtggatcgcctctgctgttgcatgttggcttggagaacagaagatgaggagccaaataagcaagtccttcagccccaggcttctagcacggggctgcatgtaggctatgcattctggggagtgaggagatcatgaatgctgaaaataaatgaaggaatccagaaaagcaagagtcaaagaaggcatctgcaggccaaatctctgatcaacccctgacccacatacacacaaaatacactcaaagcagctcagctaaagacaaagatctgcactcagagtagagctgcctccccagaaacagagctcgcagttcaggcccagcaagaaaattacctgcaaaacaaaggaaaaacaacactcatcagagaaaaagaacagaatctggaatcttcacaacctagcattcatcatatccaagattgaaacccaaattatgggacatatttaaaaaccaggaaaatggaacgtagtcttaagagaaaagtcaatcaaatctgacctggagatgaataatatattgaaacttaaaagctcggattctgaaggtaattttgagactcctgaagctgaaaccccgatccgatcacctttcaaggagtcctgtgatccatcactcggattggcaggacctggggccaaaagccaagaatcacaagaagctgatgaacagcttgtagcagaagtggttgaaaaatgttcatctaagacttgttctaaaccttcagaaaatgaagtgccacagcaggccattgactctcactcagtcaagaatttcagagaagaacctgaacatgattttagcaaaatttccatcgtgaggccattttcaatagaaacgaaggattccacggatatctcggcagtcctcggaacaaaagcagctcatggctgtgtaactgcagtctcaggcaaggctctgccttccagcccgccagacgccctccaggacgaggcgatgacagaaggcagcatgggggtcaccctcgaggcctccgcagaagctgatctaaaagctggcaactcctgtccagagcttgtgcccagcagaagaagcaagctgagaaagcccaagcctgtccccctgaggaagaaagcaattggaggagagttctcagacaccaacgctgctgtggagggcacacctctccccaaggcatcctatcacttcagtcctgaagagttggatgagaacacaagtcctttgctaggagatgccaggttccagaagtctccccctgaccttaaagaaactcccggcactctcagtagtgacaccaacgactcaggggttgagctgggggaggagtcgaggagctcacctctcaagcttgagtttgatttcacagaagatacaggaaacatagaggccaggaaagcccttccaaggaagcttggcaggaaactgggtagcacactgactcccaagatacaaaaagatggcatcagtaagtcagcaggtttagaacagcctacagacccagtggcacgagacgggcctctctcccaaacatcttccaagccagatcctagtcagtgggaaagccccagcttcaacccctttgggagccactctgttctgcagaactccccacccctctcttctgagggctcctaccactttgacccagataactttgacgaatccatggatccctttaaaccaactacgaccttaacaagcagtgacttttgttctcccactggtaatcacgttaatgaaatcttagaatcacccaagaaggcaaagtcgcgtttaataacgagtggctgtaaggtgaagaagcatgaaactcagtctctcgccctggatgcatgttctcgggatgaaggggcagtgatctcccagatttcagacatttctaatagggatggccatgctactgatgaggagaaactggcatccacgtcatgtggtcagaaatcagctggtgccgaggtgaaaggcatagagaaggagacgtgccagaagatggaagaagacgggtccactgtgcttgggctgctggagtcctctgcagagaaggcccctgtgtcggtgtcctgtggaggtgagagccccctggatgggatctgcctcagcgaatcagacaagacagccgtgctcaccttaataagagaagagataattactaaagagattgaagcaaatgaatggaagaagaaatacgaagagacccggcaagaagttttggagatgaggaaaattgtagctgaatatgaaaagactattgctcaaatgattgaagatgaacaaaggacaagtatgacctctcagaagagcttccagcaactgaccatggagaaggaacaggccctggctgaccttaactctgtggaaaggtccctttctgatctcttcaggagatatgagaacctgaaaggtgttctggaagggttcaagaagaatgaagaagccttgaagaaatgtgctcaggattacttagccagagttaaacaagaggagcagcgataccaggccctgaaaatccacgcagaagagaaactggacaaagccaatgaagagattgctcaggttcgaacaaaagcaaaggctgagagtgcagctctccatgctggactccgcaaagagcagatgaaggtggagtccctggaaagggccctgcagcagaagaaccaagaaattgaagaactgacaaaaatctgtgatgagctgattgcaaagctgggaaagactgactgagacactccccctgttagctcaacagatctgcatttggctgcttctcttgtgaccacaattatcttgccttatccaggaataattgcccctttgcagagaaaaaaaaaaa

SEQ ID NO: 341618 - DNA, 2564 bp, Artificial Sequence
  derived and/or modified sequence
agtcgctccccggcccttcccggggccctaccgtgtacccaaaacgcagccgcggtgaagaaggtcgcgtgatgacaggcccctggcagctgctgggaaatggtggtctctgccgggctgtcatccgcgtgattgcggaagctcggattctgaaggtaattttgagactcctgaagctgaaaccccgatccgatcacctttcaaggagtcctgtgatccatcactcggattggcaggacctggggccaaaagccaagaatcacaagaagctgatgaacagcttgtagcagaagtggttgaaaaatgttcatctaagacttgttctaaaccttcagaaaatgaagtgccacagcaggccattgactctcactcagtcaagaatttcagagaagaacctgaacatgattttagcaaaatttccatcgtgaggccattttcaatagaaacgaaggattccacggatatctcggcagtcctcggaacaaaagcagctcatggctgtgtaactgcagtctcaggcaaggctctgccttccagcccgccagacgccctccaggacgaggcgatgacagaaggcagcatgggggtcaccctcgaggcctccgcagaagctgatctaaaagctggcaactcctgtccagagcttgtgcccagcagaagaagcaagctgagaaagcccaagcctgtccccctgaggaagaaagcaattggaggagagttctcagacaccaacgctgctgtggagggcacacctctccccaaggcatcctatcacttcagtcctgaagagttggatgagaacacaagtcctttgctaggagatgccaggttccagaagtctccccctgaccttaaagaaactcccggcactctcagtagtgacaccaacgactcaggggttgagctgggggaggagtcgaggagctcacctctcaagcttgagtttgatttcacagaagatacaggaaacatagaggccaggaaagcccttccaaggaagcttggcaggaaactgggtagcacactgactcccaagatacaaaaagatggcatcagtaagtcagcaggtttagaacagcctacagacccagtggcacgagacgggcctctctcccaaacatcttccaagccagatcctagtcagtgggaaagccccagcttcaacccctttgggagccactctgttctgcagaactccccacccctctcttctgagggctcctaccactttgacccagataactttgacgaatccatggatccctttaaaccaactacgaccttaacaagcagtgacttttgttctcccactggtaatcacgttaatgaaatcttagaatcacccaagaaggcaaagtcgcgtttaataacgagtggctgtaaggtgaagaagcatgaaactcagtctctcgccctggatgcatgttctcgggatgaaggggcagtgatctcccagatttcagacatttctaatagggatggccatgctactgatgaggagaaactggcatccacgtcatgtggtcagaaatcagctggtgccgaggtgaaaggcatagagaaggagacgtgccagaagatggaagaagacgggtccactgtgcttgggctgctggagtcctctgcagagaaggcccctgtgtcggtgtcctgtggaggtgagagccccctggatgggatctgcctcagcgaatcagacaagacagccgtgctcaccttaataagagaagagataattactaaagagattgaagcaaatgaatggaagaagaaatacgaagagacccggcaagaagttttggagatgaggaaaattgtagctgaatatgaaaagactattgctcaaatgattgaagatgaacaaaggacaagtatgacctctcagaagagcttccagcaactgaccatggagaaggaacaggccctggctgaccttaactctgtggaaaggtccctttctgatctcttcaggagatatgagaacctgaaaggtgttctggaagggttcaagaagaatgaagaagccttgaagaaatgtgctcaggattacttagccagagttaaacaagaggagcagcgataccaggccctgaaaatccacgcagaagagaaactggacaaagccaatgaagagattgctcaggttcgaacaaaagcaaaggctgagagtgcagctctccatgctggactccgcaaagagcagatgaaggtggagtccctggaaagggccctgcagcagaagaaccaagaaattgaagaactgacaaaaatctgtgatgagctgattgcaaagctgggaaagactgactgagacactccccctgttagctcaacagatctgcatttggctgcttctcttgtgaccacaattatcttgccttatccaggaataattgcccctttgcagagaaaaaaaaaaacttaaaaaaagcacatgcctactgctgcctgtcccgctttgctgccaatgcaacagccctggaagaaaccctagagggttgcatagtctagaaaggagtgtgacctgacagtgctggagcctcctagtttccccctatgaaggt

SEQ ID NO: 341619 - DNA, 660 bp, Artificial Sequence
  derived and/or modified sequence
agtcgctccccggcccttcccggggccctaccgtgtacccaaaacgcagccgcggtgaagaaggtcgcgtgatgacaggcccctggcagctgctgggaaatggtggtctctgccgggctgtcatccgcgtgattgcggaaggcagctcggattctgaaggtaattttgagactcctgaagctgaaaccccgatccgatcacctttcaaggagtcctgtgatccatcactcggattggcaggacctggggccaaaagccaagaatcacaagaagctgatgaacagcttgtagcagaagtggttgaaaaatgttcatctaagacttgttctaaaccttcagaaaatgaagtgccacagcaggccattgactctcactcagtcaagaatttcagagaagaacctgaacatgattttagcaaaatttccatcgtgaggccattttcaatagaaacgaaggattccacggatatctcggcagtcctcggaacaaaagcagctcatggctgtgtaactgcagtctcaggcaaggctctgccttccagcccgccagacgccctccaggacgaggcgatgacagaaggcagcatgggggtcaccctcgaggcctccgcagaagctgatctaaaagctggcaactcctgtccagagcttgtgcccagca

SEQ ID NO: 341620 - DNA, 967 bp, Artificial Sequence
  derived and/or modified sequence
aagaaggtcgcgtgatgacaggcccctggcagctgctgggaaatggtggtctctgccgggctgtcatccgcgtgattgcggaaggcaggtgacaccattcttagcctcgggcccagggagttccagcagctcggattctgaaggtaattttgagactcctgaagctgaaaccccgatccgatcacctttcaaggagtcctgtgatccatcactcggattggcaggacctggggccaaaagccaagaatcacaagaagctgatgaacagcttgtagcagaagtggttgaaaaatgttcatctaagacttgttctaaaccttcagaaaatgaagtgccacagcaggccattgactctcactcagtcaagaatttcagagaagaacctgaacatgattttagcaaaatttccatcgtgaggccattttcaatagaaacgaaggattccacggatatctcggcagtcctcggaacaaaagcagctcatggctgtgtaactgcagtctcaggcaaggctctgccttccagcccgccagacgccctccaggacgaggcgatgacagaaggcagcatgggggtcaccctcgaggcctccgcagaagctgatctaaaagctggcaactcctgtccagagcttgtgcccagcagaagaagcaagctgagaaagcccaagcctgtccccctgaggaagaaagcaattggaggagagttctcagacaccaacgctgctgtggagggcacacctctccccaaggcatcctatcacttcagtcctgaagagttggatgagaacacaagtcctttgctaggagatgccaggttccagaagtctccccctgaccttaaagaaactcccggcactctcagtagtgacaccaacgactcaggggttgagctgggggaggagtcgaggagctcacctctcaagcttgagtttgatttcacagaagatacaggaaacatagaggcc

SEQ ID NO: 341621 - DNA, 685 bp, Artificial Sequence
  derived and/or modified sequence
gtgcaaatgtgttgtgggccttgaggtggcagtcctatgaggcggtggtagggctttcccctgattcagtactcagctggtcccaaggggctttgagtgtggcttttgcctccttaactggatgctgaataggctccttgcacttattttgggactccgttgtgcctgtgcccagcacagggtgtgctgctggtgaatcacaagaagctgatgaacagcttgtagcagaagtggttgaaaaatgttcatctaagacttgttctaaaccttcagaaaatgaagtgccacagcaggccattgactctcactcagtcaagaatttcagagaagaacctgaacatgattttagcaaaatttccatcgtgaggccattttcaatagaaacgaaggattccacggatatctcggcagtcctcggaacaaaagcagctcatggctgtgtaactgcagtctcaggcaaggctctgccttccagcccgccagacgccctccaggacgaggcgatgacagaaggcagcatgggggtcaccctcgaggcctccgcagaagctgatctaaaagctggcaactcctgtccagagcttgtgcccagcagaagaagcaagctgagaaagcccaagcctgtccccctgaggaagaaagcaattggaggagagttctcagacaccaacgctgctgtggaggg

SEQ ID NO: 341622 - DNA, 476 bp, Artificial Sequence
  derived and/or modified sequence
agaaacagaaccctgtgtcaaatccaggagcctgggggactgtagaacctgaagttttactgggagctggagccggaggagccgcgctcatggcgttcagcccgtggcagatcctgtcccccgtgcagtgggcgaaatggacgtggtctgcggtacgcggcggggccgccggcgaggacgaggctggcgggcccgagggcgaccccgaggaggaggattcgcaagccgagaccaaatccttgagtttcagctcggattctgaaggtaattttgagactcctgaagctgaaaccccgatccgatcacctttcaaggagtcctgtgatccatcactcggattggcaggacctggggccaaaagccaagaatcacaagaagctgatgaacagcttgtagcagaagtggttgaaaaatgttcatctaagacttgttctaaaccttcagaaaatgaagtgccacagcaggccattgactct

SEQ ID NO: 341623 - protein, 379 aa, Artificial Sequence
  derived and/or modified sequence
MGGSHSQTPRGREPAGERHPRPTETATTEQVKFLCFLLSGCKVKKHETQSLALDACSRDEGAVISQISDISNRDGHATDEEKLASTSCGQKSAGAEVKGEPEEDLEYFECSNVPVSTINHAFSSSEAGIEKETCQKMEEDGSTVLGLLESSAEKAPVSVSCGGESPLDGICLSESDKTAVLTLIREEIITKEIEANEWKKKYEETRQEVLEMRKIVAEYEKTIAQMIEDEQRTSMTSQKSFQQLTMEKEQALADLNSVERSLSDLFRRYENLKGVLEGFKKNEEALKKCAQDYLARVKQEEQRYQALKIHAEEKLDKANEEIAQVRTKAKAESAALHAGLRKEQMKVESLERALQQKNQEIEELTKICDELIAKLGKTD

SEQ ID NO: 341624 - protein, 367 aa, Artificial Sequence
  derived and/or modified sequence
MGGSHSQTPRGREPAGERHPRPTETASGCKVKKHETQSLALDACSRDEGAVISQISDISNRDGHATDEEKLASTSCGQKSAGAEVKGEPEEDLEYFECSNVPVSTINHAFSSSEAGIEKETCQKMEEDGSTVLGLLESSAEKAPVSVSCGGESPLDGICLSESDKTAVLTLIREEIITKEIEANEWKKKYEETRQEVLEMRKIVAEYEKTIAQMIEDEQRTSMTSQKSFQQLTMEKEQALADLNSVERSLSDLFRRYENLKGVLEGFKKNEEALKKCAQDYLARVKQEEQRYQALKIHAEEKLDKANEEIAQVRTKAKAESAALHAGLRKEQMKVESLERALQQKNQEIEELTKICDELIAKLGKTD

SEQ ID NO: 341625 - DNA, 1140 bp, Artificial Sequence
  derived and/or modified sequence
atgggcggcagccacagccagacccccagaggcagagagcccgccggcgagagacaccccagacccaccgagaccgccaccaccgagcaggtgaagttcctgtgcttcctgctgagcggctgcaaggtgaagaagcacgagacccagagcctggccctggacgcctgcagcagagacgagggcgccgtgatcagccagatcagcgacatcagcaacagagacggccacgccaccgacgaggagaagctggccagcaccagctgcggccagaagagcgccggcgccgaggtgaagggcgagcccgaggaggacctggagtacttcgagtgcagcaacgtgcccgtgagcaccatcaaccacgccttcagcagcagcgaggccggcatcgagaaggagacctgccagaagatggaggaggacggcagcaccgtgctgggcctgctggagagcagcgccgagaaggcccccgtgagcgtgagctgcggcggcgagagccccctggacggcatctgcctgagcgagagcgacaagaccgccgtgctgaccctgatcagagaggagatcatcaccaaggagatcgaggccaacgagtggaagaagaagtacgaggagaccagacaggaggtgctggagatgagaaagatcgtggccgagtacgagaagaccatcgcccagatgatcgaggacgagcagagaaccagcatgaccagccagaagagcttccagcagctgaccatggagaaggagcaggccctggccgacctgaacagcgtggagagaagcctgagcgacctgttcagaagatacgagaacctgaagggcgtgctggagggcttcaagaagaacgaggaggccctgaagaagtgcgcccaggactacctggccagagtgaagcaggaggagcagagataccaggccctgaagatccacgccgaggagaagctggacaaggccaacgaggagatcgcccaggtgagaaccaaggccaaggccgagagcgccgccctgcacgccggcctgagaaaggagcagatgaaggtggagagcctggagagagccctgcagcagaagaaccaggagatcgaggagctgaccaagatctgcgacgagctgatcgccaagctgggcaagaccgactag

SEQ ID NO: 341626 - DNA, 1104 bp, Artificial Sequence
  derived and/or modified sequence
atgggcggcagccacagccagacccccagaggcagagagcccgccggcgagagacaccccagacccaccgagaccgccagcggctgcaaggtgaagaagcacgagacccagagcctggccctggacgcctgcagcagagacgagggcgccgtgatcagccagatcagcgacatcagcaacagagacggccacgccaccgacgaggagaagctggccagcaccagctgcggccagaagagcgccggcgccgaggtgaagggcgagcccgaggaggacctggagtacttcgagtgcagcaacgtgcccgtgagcaccatcaaccacgccttcagcagcagcgaggccggcatcgagaaggagacctgccagaagatggaggaggacggcagcaccgtgctgggcctgctggagagcagcgccgagaaggcccccgtgagcgtgagctgcggcggcgagagccccctggacggcatctgcctgagcgagagcgacaagaccgccgtgctgaccctgatcagagaggagatcatcaccaaggagatcgaggccaacgagtggaagaagaagtacgaggagaccagacaggaggtgctggagatgagaaagatcgtggccgagtacgagaagaccatcgcccagatgatcgaggacgagcagagaaccagcatgaccagccagaagagcttccagcagctgaccatggagaaggagcaggccctggccgacctgaacagcgtggagagaagcctgagcgacctgttcagaagatacgagaacctgaagggcgtgctggagggcttcaagaagaacgaggaggccctgaagaagtgcgcccaggactacctggccagagtgaagcaggaggagcagagataccaggccctgaagatccacgccgaggagaagctggacaaggccaacgaggagatcgcccaggtgagaaccaaggccaaggccgagagcgccgccctgcacgccggcctgagaaaggagcagatgaaggtggagagcctggagagagccctgcagcagaagaaccaggagatcgaggagctgaccaagatctgcgacgagctgatcgccaagctgggcaagaccgactag

SEQ ID NO: 341627 - DNA, 1140 bp, Artificial Sequence
  derived and/or modified sequence
atgggcggttcacacagccagacccctcgggggagggaacctgctggcgagcggcacccacgcccaactgaaacggctaccactgagcaggttaaattcttgtgctttttgctctctggctgtaaagtcaagaaacacgagacccagtccttggccctcgacgcatgtagccgtgatgagggcgcggtgatcagccagatcagtgacatctctaatagggacggtcacgctaccgacgaagagaagttggcttcaactagttgcggacagaagtcggcaggggcagaggttaagggagagcccgaagaggaccttgagtacttcgaatgctccaatgttcctgtctccaccattaatcacgccttctctagtagtgaagccggcattgaaaaggagacctgccaaaaaatggaggaggacggcagcactgtgctgggcctgttagagtcttctgccgaaaaagcccctgtgtcagtctcatgcggcggcgagtccccgttagatggcatctgtctgtcggaatccgataagactgccgtgttgacacttattcgggaggagatcatcaccaaggagatcgaggcaaatgaatggaaaaagaaatacgaagagactcgtcaggaagtcctcgagatgcggaagatcgtagcagaatatgaaaagacgatcgcccagatgattgaggatgagcagagaaccagtatgacgtctcaaaagtccttccagcagctcaccatggaaaaagaacaggctctcgcggatctaaactcagtagagcgaagtttatccgacttgttccggcggtacgaaaacctaaaaggggtattggagggatttaagaagaacgaggaagccctaaaaaagtgcgctcaggattacctggctagagtcaaacaggaggaacaacgataccaggcgctcaaaatacatgccgaagagaagttggacaaggccaacgaagaaatcgctcaagttcggaccaaggcaaaggccgaatcagcagctcttcacgcgggtctgcggaaggagcagatgaaggtcgaatcactggaaagggccctgcagcagaagaatcaagagatcgaggagttgacaaaaatctgcgatgagctgatcgccaagctgggaaagacagattag

SEQ ID NO: 341628 - DNA, 1104 bp, Artificial Sequence
  derived and/or modified sequence
atggggggcagccacagtcaaactccaagaggccgtgagcctgccggcgaacgacatccaagacctaccgaaaccgctagtggatgcaaggtaaaaaaacacgaaacgcaaagccttgcgttggacgcatgtagccgcgatgagggggcagtaatctctcagatctctgacatctcgaaccgcgatggacatgcaacggacgaggagaagctcgcctcgacatcttgcggccaaaaaagtgctggcgccgaagtcaaaggcgagccagaagaggatctggaatactttgaatgtagtaatgtgcctgtgagcacaatcaaccacgcattcagtagctcagaagcagggatagagaaagagacatgtcagaaaatggaggaggacggcagtacagtgctgggtctgttggagtcatcggcagagaaggccccagtgtcagtttcttgcggcggggaaagtcctctggatggaatatgtctgagcgaatcggataagacagcagtgttgacccttataagagaggaaattatcaccaaggagatcgaggccaacgagtggaaaaaaaagtacgaggagactcgccaggaagtgctggaaatgaggaagatcgtggcagaatatgagaaaaccattgcccagatgatcgaggatgaacagcgcacttctatgacctcccaaaaatcctttcagcagctgacaatggaaaaagaacaagctctggctgatctcaattcagtcgaaagatctttgtctgacctgttcaggcggtacgagaacttaaagggggtgttggaaggctttaagaagaacgaggaggcactgaaaaagtgcgcccaggattacctcgcaagagtcaaacaggaggagcagaggtatcaggccctgaagatccatgcagaagaaaaattagacaaggcgaatgaggaaattgcgcaagtgagaactaaagctaaggcggagagcgctgccctgcacgcaggacttcggaaggaacaaatgaaagttgaaagcttagaaagggcccttcaacaaaaaaatcaggaaattgaagaactcactaagatatgtgatgaattgatagctaaacttggaaaaaccgattag

SEQ ID NO: 341629 - DNA, 1140 bp, Artificial Sequence
  derived and/or modified sequence
atgggcggcagccacagccagaccccccggggccgggagcctgctggggagcggcacccccggcccacagaaacagccaccacagagcaggtgaagttcctgtgcttcctgctgagcggctgcaaggtgaagaagcatgagacccagagcctggccctggatgcctgcagcagagatgaaggagctgtgatcagccagatcagtgacatcagcaacagagatggccacgccacagatgaggagaagctggccagcaccagctgtggccagaagtctgctggagctgaggtgaagggggagcctgaggaggacctggagtactttgaatgtagcaatgtgcctgtgtccaccatcaaccacgccttcagcagcagcgaggccggcatcgagaaggagacctgccagaagatggaggaggatggcagcacagtgctgggcctgctggagagcagcgctgagaaggcccctgtgtctgtgtcctgtggcggggagagccccctggatggcatctgcctgtctgagagtgacaagacagctgtgctgaccctcatccgggaggagatcatcaccaaggagattgaggccaatgagtggaagaagaagtatgaggagacccggcaggaggtgctggagatgaggaagatcgtggccgagtatgagaagaccatcgcccagatgattgaagatgagcagaggacctccatgaccagccagaagagcttccagcagctgaccatggagaaggagcaggccctggccgacctgaacagcgtggagaggagcctgagtgacctcttcagaagatatgagaacctgaagggcgtgctggagggcttcaagaagaatgaggaggccctgaagaagtgtgcccaggactacctggcccgggtgaagcaggaggagcagcgctaccaggccctgaagatccatgctgaggagaagctggacaaggccaatgaggagatcgcccaggtgaggaccaaggccaaggccgagagcgctgccctgcacgccggcctgaggaaggagcagatgaaggtggagagcctggagcgggccctgcagcagaagaaccaggagattgaggagctgaccaagatctgtgatgagctgattgccaagctgggcaagacagactag

SEQ ID NO: 341630 - DNA, 1104 bp, Artificial Sequence
  derived and/or modified sequence
atgggcggcagccacagccagaccccccggggccgggagcctgctggggagcggcacccccggcccacagaaacagccagcggctgcaaggtgaagaagcatgagacccagagcctggccctggatgcctgcagcagagatgaaggagctgtgatcagccagatcagtgacatcagcaacagagatggccacgccacagatgaggagaagctggccagcaccagctgtggccagaagtctgctggagctgaggtgaagggggagcctgaggaggacctggagtactttgaatgtagcaatgtgcctgtgtccaccatcaaccacgccttcagcagcagcgaggccggcatcgagaaggagacctgccagaagatggaggaggatggcagcacagtgctgggcctgctggagagcagcgctgagaaggcccctgtgtctgtgtcctgtggcggggagagccccctggatggcatctgcctgtctgagagtgacaagacagctgtgctgaccctcatccgggaggagatcatcaccaaggagattgaggccaatgagtggaagaagaagtatgaggagacccggcaggaggtgctggagatgaggaagatcgtggccgagtatgagaagaccatcgcccagatgattgaagatgagcagaggacctccatgaccagccagaagagcttccagcagctgaccatggagaaggagcaggccctggccgacctgaacagcgtggagaggagcctgagtgacctcttcagaagatatgagaacctgaagggcgtgctggagggcttcaagaagaatgaggaggccctgaagaagtgtgcccaggactacctggcccgggtgaagcaggaggagcagcgctaccaggccctgaagatccatgctgaggagaagctggacaaggccaatgaggagatcgcccaggtgaggaccaaggccaaggccgagagcgctgccctgcacgccggcctgaggaaggagcagatgaaggtggagagcctggagcgggccctgcagcagaagaaccaggagattgaggagctgaccaagatctgtgatgagctgattgccaagctgggcaagacagactag

SEQ ID NO: 341631 - DNA, 1140 bp, Artificial Sequence
  derived and/or modified sequence
atgggcggcagccacagccagaccccccggggccgggagcccgccggggagcggcaccccagaccaactgaaactgctactaccgagcaagtgaagttcttgtgtttcttgttatccgggtgtaaagtgaaaaaacacgaaacacagagtttagcactggatgcatgttcccgggacgagggcgctgtaatcagccagatttccgatatcagcaaccgggacggacacgctacagacgaggagaaactggccagcacatcatgcggacagaaaagtgcaggcgcagaagttaagggtgaacctgaagaagatctggagtatttcgaatgctctaacgtgcctgtgagtactataaaccacgcattttccagttccgaggctggaatcgagaaggagacttgccagaaaatggaagaagatggctcaaccgtcctcggcctgctggaatccagcgccgaaaaggccccagtgtccgtttcttgtggaggtgagagtcctctcgacggaatctgcctttccgaaagtgacaaaaccgcagtgctgacccttatccgggaagagattattacaaaagaaatcgaggcaaatgagtggaagaagaagtatgaggaaacccgtcaggaagtcctcgagatgagaaagattgtcgctgagtatgagaaaacaatcgcccaaatgattgaggacgagcagaggactagtatgacttcacaaaagagcttccagcagctaacgatggagaaggaacaggccctagctgacttgaactcagttgagagatctctctcagatctatttcggcggtatgagaacttgaagggggtactcgaaggatttaagaagaacgaagaagccttaaagaagtgtgctcaggactatttggccagagtaaagcaagaggagcagcggtatcaggctctgaaaatacacgctgaagaaaagcttgacaaggcaaatgaggaaatcgctcaagtgcgcacaaaggcaaaggccgaatccgccgccttgcacgcagggcttcgtaaggaacagatgaaagtcgagtcccttgaaagggccctgcagcagaaaaaccaggaaattgaggaactgaccaagatttgcgacgagctgattgcgaaactaggtaagacagattag

SEQ ID NO: 341632 - DNA, 1104 bp, Artificial Sequence
  derived and/or modified sequence
atgggcggcagccacagccagaccccccggggccgggagcccgccggggaaaggcacccgcgaccaaccgagaccgctagtggatgcaaggtaaagaagcacgagacgcaaagtcttgcactggatgcctgctctcgagacgagggagccgtaatttctcagatcagcgatatttcgaatcgagatggccatgctaccgacgaggaaaagctggcttcaacgtcgtgcgggcagaaaagcgccggggctgaagttaagggtgaacctgaagaggatttagaatactttgaatgctccaacgttccagtgtccaccatcaaccacgccttttccagctctgaggccggaattgagaaggagacgtgccagaagatggaagaggacgggagtaccgtgctggggctgttggaaagctcggccgagaaagcccccgtttccgtgtcctgcgggggagaatcacctttggatggaatttgcctcagtgaaagtgataaaacagccgttctcaccctgatccgagaagaaataatcactaaagagatcgaagcaaatgagtggaagaaaaagtacgaggaaacgaggcaagaggtcctggagatgagaaagattgtggctgagtatgaaaagactattgcacaaatgattgaagatgaacagagaacgtctatgacgagtcagaagtcatttcagcagctcaccatggagaaggaacaggccttggccgatctgaattcagtggagagatcactctctgatctcttcaggcgttatgagaatcttaaaggcgtattggagggattcaagaagaatgaggaggccctcaaaaaatgcgcccaggactacctggctcgggtgaagcaggaggaacagcgttatcaggctttaaaaattcacgccgaagagaagctggacaaggctaatgaggagatcgcgcaggtacgcaccaaagccaaggctgaatctgccgcgctgcacgccggactgaggaaggagcagatgaaagtggaatctctggagcgggctctacagcaaaagaaccaggagatagaggaactgacaaagatttgcgacgaactgatagcgaaactgggcaaaaccgattag

SEQ ID NO: 341633 - DNA, 1140 bp, Artificial Sequence
  derived and/or modified sequence
atgggtggatctcactctcaaactccccgaggaagggagcctgccggagaaagacatccacgcccaactgaaacggcaaccacagagcaggtaaaatttttgtgctttctgttaagcggctgtaaggtaaaaaagcacgagacacagagcctagctctggacgcctgctcccgggatgagggggcagtcatctcccagatctccgacatttctaatcgagatgggcacgcgaccgatgaagaaaagttggcatctacctcctgcgggcagaagtcagccggtgccgaggtcaagggtgagcccgaagaggatcttgagtactttgaatgctcaaacgtgccagtgtctaccatcaatcacgccttctcatcttccgaggctggtattgaaaaggaaacatgccaaaagatggaagaggacggcagcaccgtgttaggattactggagtcctctgccgagaaggcccctgtttctgtctcgtgtggcggtgaatcaccactcgatggtatctgcctgagcgaaagcgataaaactgccgtactgacactaatcagagaagagatcattaccaaggagatcgaggcaaatgaatggaaaaaaaagtacgaagagactaggcaggaggttcttgagatgcgtaagattgtcgcagaatacgagaagactatcgcccagatgattgaggacgagcagcggacttctatgacgagccagaaatctttccagcagctgactatggaaaaagaacaggccttggcagatctgaactctgtggaaaggagcctctctgacctgttcagacgatatgaaaacctgaagggggtgctagagggcttcaagaagaacgaggaagccctcaagaaatgtgcgcaggattatcttgcccgagttaagcaggaagaacagcgttatcaggccctcaagatccatgcagaagagaaactcgacaaggccaacgaggaaatagcacaggtcaggacaaaggctaaggccgagagtgctgcccttcacgccggactgcggaaggaacagatgaaggtagagtccctcgaacgggcattgcagcagaaaaaccaagagatagaagagcttactaagatttgcgacgagctcattgcgaagctgggtaaaactgactag

SEQ ID NO: 341634 - DNA, 1104 bp, Artificial Sequence
  derived and/or modified sequence
atgggtgggtctcactctcagacccctcggggacgagaacctgcaggcgaaagacatccaaggcctaccgagaccgccagtggctgcaaggttaagaaacacgaaacacagagcctggctctggatgcatgttccagagatgagggtgccgtgatcagccagatctccgatatctcaaatagggatggccacgcaacggacgaggaaaagctggccagtacttcatgtggtcagaaaagtgctggcgctgaggtcaagggggagccagaagaagatctggaatattttgagtgcagcaacgtccccgtgagtacaatcaaccacgcattcagtagctctgaggctggaatcgaaaaggaaacatgccagaagatggaggaagatgggagtaccgtgctgggcctcctggaatcatctgctgagaaagccccagtcagcgttagctgcgggggtgaaagccctctggacgggatctgcctgagtgagagtgataagaccgcagttttgacactgatcagggaggaaattatcaccaaagaaatcgaggctaatgaatggaagaagaagtacgaggagacacgccaggaagttttggaaatgaggaaaatcgtggccgagtatgagaaaaccatagcacaaatgattgaagatgaacaacgcacttccatgacctcgcagaagagcttccaacagctgaccatggagaaggagcaggccctagctgatttaaactcagtggaacggtcactctccgacttattccggagatatgagaacctgaagggagtgctggagggcttcaagaaaaacgaagaggcccttaagaaatgcgcccaagactacctggccagagtcaagcaggaggaacagcggtaccaggctctcaaaattcacgcagaagagaagctagataaggctaatgaggaaattgcacaagttaggaccaaggcgaaagccgaaagtgccgcattgcacgcaggcttacgcaaagaacaaatgaaagtggaaagcctggaacgtgcattgcaacagaagaatcaggaaattgaagaactaacaaagatctgcgacgaacttatagcaaagttaggcaaaacagactag

SEQ ID NO: 341635 - DNA, 6145 bp, Artificial Sequence
  derived and/or modified sequence
atgggaggctcccactctcagaccccgaggggccgggaacccgccggggagaggcacccgagacccacggagaccgcgactactgaacaagtgaaatttctctgttttctgttgagtggctgtaaggtgaagaagcatgaaactcagtctctcgccctggatgcatgttctcgggatgaaggggcagtgatctcccagatttcagacatttctaatagggatggccatgctactgatgaggagaaactggcatccacgtcatgtggtcagaaatcagctggtgccgaggtgaaaggtgagccagaggaagacctggagtactttgaatgttccaatgttcctgtgtctaccataaatcatgcgttttcatcctcagaagcaggcatagagaaggagacgtgccagaagatggaagaagacgggtccactgtgcttgggctgctggagtcctctgcagagaaggcccctgtgtcggtgtcctgtggaggtgagagccccctggatgggatctgcctcagcgaatcagacaagacagccgtgctcaccttaataagagaagagataattactaaagagattgaagcaaatgaatggaagaagaaatacgaagagacccggcaagaagttttggagatgaggaaaattgtagctgaatatgaaaagactattgctcaaatgattgaagatgaacaaaggacaagtatgacctctcagaagagcttccagcaactgaccatggagaaggaacaggccctggctgaccttaactctgtggaaaggtccctttctgatctcttcaggagatatgagaacctgaaaggtgttctggaagggttcaagaagaatgaagaagccttgaagaaatgtgctcaggattacttagccagagttaaacaagaggagcagcgataccaggccctgaaaatccacgcagaagagaaactggacaaagccaatgaagagattgctcaggttcgaacaaaagcaaaggctgagagtgcagctctccatgctggactccgcaaagagcagatgaaggtggagtccctggaaagggccctgcagcagaagaaccaagaaattgaagaactgacaaaaatctgtgatgagctgattgcaaagctgggaaagactgactgagacactccccctgttagctcaacagatctgcatttggctgcttctcttgtgaccacaattatcttgccttatccaggaataattgcccctttgcagagaaaaaaaaaaacttaaaaaaagcacatgcctactgctgcctgtcccgctttgctgccaatgcaacagccctggaagaaaccctagagggttgcatagtctagaaaggagtgtgacctgacagtgctggagcctcctagtttccccctatgaaggttcccttaggctgctgagtttgggtttgtgatttatctttagtttgttttaaagtcatctttactttcccaaatgtgttaaatttgtaactcctctttggggtcttctccaccacctgtctgatttttttgtgatctgtttaatcttttaattttttagtatcagtggttttatttaaggagacagtttggcctattgttacttccaatttataatcaagaaggggctctggatccccttttaaattacacacactctcacacacatacatgtatgtttatagatgctgctgctcttttccctgaagcatagtcaagtaagaactgctctacagaaggacatatttccttggatgtgagaccctattttgaaatagagtcctgactcagaacaccaacttaagaatttgggggattaaagatgtgaagaccacagtcttgggttttcatatctggagaagactatttgccatgacgttttgttgccctggtatttggacactcctcagctttaatgggtgtggcccctttagggttagtcctcagactaatgatagtgtctgctttctgcatgaacggcaatatgggactccctccaagctagggtttggcaagtctgccctagagtcatttactctcctctgcctccatttgttaatacagaatcaacatttagtcttcattatctttttttttttttttgagacagagtttcgatctattttaagtatgtgaagaaaatctacttgtaaaaggctcagatcttaattaaaaggtaattgtagcacattaccaattataaggtgaagaaatgtttttttcccaagtgtgatgcattgttcttcagatgttgaaaagaaagcaaaaaataccttctaacttaagacagaatttttaacaaaatgagcagtaaaagtcacatgaaccactccaaaaatcagtgcattttgcatatttttaaacaaagacagcttgttgaatactgagaagaggagtgcaaggagaaggtctgtactaacaaagccaaattcctcaagctcttactggactcagttcagagtggtgggccattaaccccaacatggaatttttccatataaatctcaatgaattccctttcatttgaataggcaaacccaaatccatgcaagtgttttaaagcactgtcctgtcttaatcttacatgctgaaagtcttcatggtgatatgcactatattcagtatacgtatgttttcctacttctcttgtaaaactgttgcatgatccaacttcagcaatgaattgtgcctagtggagaacctctatagatcttaaaaaatgaattattctttagcagtgtattactcacatgggtgcaatctttagccccagggaggtcaataatgtcttttaaagccagaagtcacattttaccaatatgcatttatcataattggtgcttaggctgtatattcaagcctgttgtcttaacattttgtataaaaaagaacaacagaaattatctgtcatttgagaagtggcttgacaatcatttgagctttgaaagcagtcactgtggtgtaatatgaatgctgtcctagtggtcatagtaccaagggcacgtgtctccccttggtataactgatttcctttttagtcctctactgctaaataagttaattttgcattttgcagaaagaaacattgattgctaaatctttttgctgctgtgttttggtgttttcatgtttacttgttttatattgatctgttttaagtatgagaggcttatagtgccctccattgtaaatccatagtcatctttttaagcttattgtgtttaagaaagtagctatgtgttaaacagaggtgatggcagcccttccctagcacactggtggaagagaccccttaagaacctgaccccagtgaatgaagctgatgcacagggagcaccaaaggaccttcgttaagtgataattgtcctggcctctcagccatgaccgttatgaggaaatatcccccattcgaacttaacagatgcctcctctccaaagagaattaaaatcgtagcttgtacagatcaagagaatatactgggcagaatgaagtatgtttgtttatttttctttaaaaataaaggattttggaactctggagagtaagaatatagtatagagtttgcctcaacacatgtgagggccaaataacctgctagctaggcagtaataaactctgttacagaagagaaaaagggccgggcacagtggcttattcctgtaatcccaacactgtggaaggccgaggcaggaggatcacttgagtccaggagtttgaaacctacctaggcaacatggtgaaaccttgtctctaccaaaataaaaattagctgggcatggtggcacgtgcctgtggtcccagctacttgggaggctgaggtgggagcctgggaggtcaaggctgcagtgagccatgatcatgccactgcactccatcctgggtgacagcaagatcttgtctcaaaaaaaaaaaaaaaaaaaaaaaaaccaggagtgaaaaaggaaagtagaaggcagctgctggcctagatgttggtttgggaatattaggtgatcctgttgagattctggatccagagcaatttctttagcttttgactttgccaaagtgtagatagcctttatccagcagtattttaagtggggaatgcaacgtgaggccaactgaacaattccccccgtggctgcccagatagtcacagtcaaggttggagagtctccttccagccagtgacctacccaaaccttttgttctgtaaaactgctctggaaataccgggaagcccagttttctcacgtggtttctagcttcttcagactcagcccaaattaggaagtgcagaagcacatgatggtgaaaaacctaggatttggcagccttccagaatggtatggaatctgagggaagatttatgtttcgttttggaggatagctcaagttgaattttctttccagccagttaccctttcaacctacccatactttgtacaactcttacacaaatacttagatatttattagatagccctgaattcactctaattataaacagggagtgtaaactgcccccagatgttcctgggctgggtaaaagcagctggagtgaagcactcattttccataaaggtaacaaagggcagctcagtggttactcaagctcaaaagggtttttttaagagcaagcattggttaagtctgtgtatactgagttggaagtgatttcagcacattcttttttagtggagtgaaagttctgaagcccccttttaacttcctcttggtttttcattataattggtagccatctcatgaactgtctctgactgttgtctctttgtggtcatgtgattgtgagcttgctttctgacttgcatttctgactttatcctgttgttaggaagatagaaactaggttttgaaagattacatgattcaagcgagggattttaaagtaaagatgtatttattctgaagaatctaaaagataacagattatttgcttatgaaagaacaatatagtctgggaatcccagaatgtcaagccaaaggtctaagaagtcatctccttcaaatactttaataaagaagtatttcgaggagatatctgtccaaaaaggtttgactggcctccagattccagttatttttaaaaagcaacttaccactaaatccttgagtctccatagagtaacagtaaagaaactgatgtaacagactctcctctcaaaggatctcctctggaagagactatcagcggcagcattctccagggaagacccatcccctagtgccagagcttgcatcctggagactaaagattgcacttttttgtagttttttgtccaaatgcaatcccatttctgtgcctcttagcatgcagttagatttggacaaacaagattcctaaggaatgactttattaactataatatggttacagctattatataaatatatattctggttatagttctaatatggagatgttgtgtgcaatgctggcctgtggtggtctgtgtaatgctttaacttgtatggaggaggccaggctcagagctgagatgtggcctgaaccttccctgtatcgatcctttaatttagaactgtcaagatgtcactttctccccctctgccttttagtggtatctgacatatactcaaaacagtaatttcctggtcacatcattaactgctaattctgtatttataaagaattttcagatggacatgtacaaatttgaactcaaaccatccccagtccagatacagggcagcgtgtaggtgaccacaccagagcctcagcctcggtccttctcagccgtcgggataggatccaggcatttcttttaaatctcagaggtagcagtaaacttttcagtattgctgttagcaagtgtgtgtttgccaatagatacccattatactaatgtgccaagtaaatgttcattgcacatctgcttccactgtgttcccacgggtgccatgaagtgtgtgaggagcccctcatctggagggatgagtgctgcgttgactactgctatcaggattgtgttgtgtggaatattcatctacataaattttatatgcacagtaatttccctttttatatgtcaagtaactatttgtaaaagttatactcacaaattattataatgattactaatatattttttccatgtttcattgcctgaataaaaactgtttaccactgtta

SEQ ID NO: 341636 - DNA, 6109 bp, Artificial Sequence
  derived and/or modified sequence
atgggaggctcccactctcagaccccgaggggccgggaacccgccggggagaggcacccgagacccacggagaccgcgagtggctgtaaggtgaagaagcatgaaactcagtctctcgccctggatgcatgttctcgggatgaaggggcagtgatctcccagatttcagacatttctaatagggatggccatgctactgatgaggagaaactggcatccacgtcatgtggtcagaaatcagctggtgccgaggtgaaaggtgagccagaggaagacctggagtactttgaatgttccaatgttcctgtgtctaccataaatcatgcgttttcatcctcagaagcaggcatagagaaggagacgtgccagaagatggaagaagacgggtccactgtgcttgggctgctggagtcctctgcagagaaggcccctgtgtcggtgtcctgtggaggtgagagccccctggatgggatctgcctcagcgaatcagacaagacagccgtgctcaccttaataagagaagagataattactaaagagattgaagcaaatgaatggaagaagaaatacgaagagacccggcaagaagttttggagatgaggaaaattgtagctgaatatgaaaagactattgctcaaatgattgaagatgaacaaaggacaagtatgacctctcagaagagcttccagcaactgaccatggagaaggaacaggccctggctgaccttaactctgtggaaaggtccctttctgatctcttcaggagatatgagaacctgaaaggtgttctggaagggttcaagaagaatgaagaagccttgaagaaatgtgctcaggattacttagccagagttaaacaagaggagcagcgataccaggccctgaaaatccacgcagaagagaaactggacaaagccaatgaagagattgctcaggttcgaacaaaagcaaaggctgagagtgcagctctccatgctggactccgcaaagagcagatgaaggtggagtccctggaaagggccctgcagcagaagaaccaagaaattgaagaactgacaaaaatctgtgatgagctgattgcaaagctgggaaagactgactgagacactccccctgttagctcaacagatctgcatttggctgcttctcttgtgaccacaattatcttgccttatccaggaataattgcccctttgcagagaaaaaaaaaaacttaaaaaaagcacatgcctactgctgcctgtcccgctttgctgccaatgcaacagccctggaagaaaccctagagggttgcatagtctagaaaggagtgtgacctgacagtgctggagcctcctagtttccccctatgaaggttcccttaggctgctgagtttgggtttgtgatttatctttagtttgttttaaagtcatctttactttcccaaatgtgttaaatttgtaactcctctttggggtcttctccaccacctgtctgatttttttgtgatctgtttaatcttttaattttttagtatcagtggttttatttaaggagacagtttggcctattgttacttccaatttataatcaagaaggggctctggatccccttttaaattacacacactctcacacacatacatgtatgtttatagatgctgctgctcttttccctgaagcatagtcaagtaagaactgctctacagaaggacatatttccttggatgtgagaccctattttgaaatagagtcctgactcagaacaccaacttaagaatttgggggattaaagatgtgaagaccacagtcttgggttttcatatctggagaagactatttgccatgacgttttgttgccctggtatttggacactcctcagctttaatgggtgtggcccctttagggttagtcctcagactaatgatagtgtctgctttctgcatgaacggcaatatgggactccctccaagctagggtttggcaagtctgccctagagtcatttactctcctctgcctccatttgttaatacagaatcaacatttagtcttcattatctttttttttttttttgagacagagtttcgatctattttaagtatgtgaagaaaatctacttgtaaaaggctcagatcttaattaaaaggtaattgtagcacattaccaattataaggtgaagaaatgtttttttcccaagtgtgatgcattgttcttcagatgttgaaaagaaagcaaaaaataccttctaacttaagacagaatttttaacaaaatgagcagtaaaagtcacatgaaccactccaaaaatcagtgcattttgcatatttttaaacaaagacagcttgttgaatactgagaagaggagtgcaaggagaaggtctgtactaacaaagccaaattcctcaagctcttactggactcagttcagagtggtgggccattaaccccaacatggaatttttccatataaatctcaatgaattccctttcatttgaataggcaaacccaaatccatgcaagtgttttaaagcactgtcctgtcttaatcttacatgctgaaagtcttcatggtgatatgcactatattcagtatacgtatgttttcctacttctcttgtaaaactgttgcatgatccaacttcagcaatgaattgtgcctagtggagaacctctatagatcttaaaaaatgaattattctttagcagtgtattactcacatgggtgcaatctttagccccagggaggtcaataatgtcttttaaagccagaagtcacattttaccaatatgcatttatcataattggtgcttaggctgtatattcaagcctgttgtcttaacattttgtataaaaaagaacaacagaaattatctgtcatttgagaagtggcttgacaatcatttgagctttgaaagcagtcactgtggtgtaatatgaatgctgtcctagtggtcatagtaccaagggcacgtgtctccccttggtataactgatttcctttttagtcctctactgctaaataagttaattttgcattttgcagaaagaaacattgattgctaaatctttttgctgctgtgttttggtgttttcatgtttacttgttttatattgatctgttttaagtatgagaggcttatagtgccctccattgtaaatccatagtcatctttttaagcttattgtgtttaagaaagtagctatgtgttaaacagaggtgatggcagcccttccctagcacactggtggaagagaccccttaagaacctgaccccagtgaatgaagctgatgcacagggagcaccaaaggaccttcgttaagtgataattgtcctggcctctcagccatgaccgttatgaggaaatatcccccattcgaacttaacagatgcctcctctccaaagagaattaaaatcgtagcttgtacagatcaagagaatatactgggcagaatgaagtatgtttgtttatttttctttaaaaataaaggattttggaactctggagagtaagaatatagtatagagtttgcctcaacacatgtgagggccaaataacctgctagctaggcagtaataaactctgttacagaagagaaaaagggccgggcacagtggcttattcctgtaatcccaacactgtggaaggccgaggcaggaggatcacttgagtccaggagtttgaaacctacctaggcaacatggtgaaaccttgtctctaccaaaataaaaattagctgggcatggtggcacgtgcctgtggtcccagctacttgggaggctgaggtgggagcctgggaggtcaaggctgcagtgagccatgatcatgccactgcactccatcctgggtgacagcaagatcttgtctcaaaaaaaaaaaaaaaaaaaaaaaaaccaggagtgaaaaaggaaagtagaaggcagctgctggcctagatgttggtttgggaatattaggtgatcctgttgagattctggatccagagcaatttctttagcttttgactttgccaaagtgtagatagcctttatccagcagtattttaagtggggaatgcaacgtgaggccaactgaacaattccccccgtggctgcccagatagtcacagtcaaggttggagagtctccttccagccagtgacctacccaaaccttttgttctgtaaaactgctctggaaataccgggaagcccagttttctcacgtggtttctagcttcttcagactcagcccaaattaggaagtgcagaagcacatgatggtgaaaaacctaggatttggcagccttccagaatggtatggaatctgagggaagatttatgtttcgttttggaggatagctcaagttgaattttctttccagccagttaccctttcaacctacccatactttgtacaactcttacacaaatacttagatatttattagatagccctgaattcactctaattataaacagggagtgtaaactgcccccagatgttcctgggctgggtaaaagcagctggagtgaagcactcattttccataaaggtaacaaagggcagctcagtggttactcaagctcaaaagggtttttttaagagcaagcattggttaagtctgtgtatactgagttggaagtgatttcagcacattcttttttagtggagtgaaagttctgaagcccccttttaacttcctcttggtttttcattataattggtagccatctcatgaactgtctctgactgttgtctctttgtggtcatgtgattgtgagcttgctttctgacttgcatttctgactttatcctgttgttaggaagatagaaactaggttttgaaagattacatgattcaagcgagggattttaaagtaaagatgtatttattctgaagaatctaaaagataacagattatttgcttatgaaagaacaatatagtctgggaatcccagaatgtcaagccaaaggtctaagaagtcatctccttcaaatactttaataaagaagtatttcgaggagatatctgtccaaaaaggtttgactggcctccagattccagttatttttaaaaagcaacttaccactaaatccttgagtctccatagagtaacagtaaagaaactgatgtaacagactctcctctcaaaggatctcctctggaagagactatcagcggcagcattctccagggaagacccatcccctagtgccagagcttgcatcctggagactaaagattgcacttttttgtagttttttgtccaaatgcaatcccatttctgtgcctcttagcatgcagttagatttggacaaacaagattcctaaggaatgactttattaactataatatggttacagctattatataaatatatattctggttatagttctaatatggagatgttgtgtgcaatgctggcctgtggtggtctgtgtaatgctttaacttgtatggaggaggccaggctcagagctgagatgtggcctgaaccttccctgtatcgatcctttaatttagaactgtcaagatgtcactttctccccctctgccttttagtggtatctgacatatactcaaaacagtaatttcctggtcacatcattaactgctaattctgtatttataaagaattttcagatggacatgtacaaatttgaactcaaaccatccccagtccagatacagggcagcgtgtaggtgaccacaccagagcctcagcctcggtccttctcagccgtcgggataggatccaggcatttcttttaaatctcagaggtagcagtaaacttttcagtattgctgttagcaagtgtgtgtttgccaatagatacccattatactaatgtgccaagtaaatgttcattgcacatctgcttccactgtgttcccacgggtgccatgaagtgtgtgaggagcccctcatctggagggatgagtgctgcgttgactactgctatcaggattgtgttgtgtggaatattcatctacataaattttatatgcacagtaatttccctttttatatgtcaagtaactatttgtaaaagttatactcacaaattattataatgattactaatatattttttccatgtttcattgcctgaataaaaactgtttaccactgtta

SEQ ID NO: 341637 - DNA, 122 bp, Artificial Sequence
  derived and/or modified sequence
caacaaaacaggaatggattttgtgtgggtagaacagcactgtggtcgaatcaggaaatctgggcccacctttatgatgtagatgctggaatgaacaagccacttggcccccaaacccagcc

SEQ ID NO: 341638 - protein, 304 aa, Artificial Sequence
  derived and/or modified sequence
MLSSFPVVLLETMSHYTDEPRFTIEQIDLLQRLRRTGMTKHEILHALETLDRLDQEHSDKFGRRSSYGGSSYGNSTNNVPASSSTATASTQTQHSGMSPSPSNSYDTSPQPCTTNQNGRENNERLSTSNGKMSPTRYHANSMGQRSYSFEASEEDLDVDDKVEELMRRDSSVIKEEIKAFLANRRISQAVVAQVTGISQSRISHWLLQQGSDLSEQKKRAFYRWYQLEKTNPGATLSMRPAPIPIEDPEWRQTPPPVSATSGTFRLRRGSRFTWRKECLAVMERNTWSPERRMEENKWKLLSAG

SEQ ID NO: 341639 - DNA, 915 bp, Artificial Sequence
  derived and/or modified sequence
atgctgagcagcttccccgtggtgctgctggagaccatgagccactacaccgacgagcccagattcaccatcgagcagatcgacctgctgcagagactgagaagaaccggcatgaccaagcacgagatcctgcacgccctggagaccctggacagactggaccaggagcacagcgacaagttcggcagaagaagcagctacggcggcagcagctacggcaacagcaccaacaacgtgcccgccagcagcagcaccgccaccgccagcacccagacccagcacagcggcatgagccccagccccagcaacagctacgacaccagcccccagccctgcaccaccaaccagaacggcagagagaacaacgagagactgagcaccagcaacggcaagatgagccccaccagataccacgccaacagcatgggccagagaagctacagcttcgaggccagcgaggaggacctggacgtggacgacaaggtggaggagctgatgagaagagacagcagcgtgatcaaggaggagatcaaggccttcctggccaacagaagaatcagccaggccgtggtggcccaggtgaccggcatcagccagagcagaatcagccactggctgctgcagcagggcagcgacctgagcgagcagaagaagagagccttctacagatggtaccagctggagaagaccaaccccggcgccaccctgagcatgagacccgcccccatccccatcgaggaccccgagtggagacagacccccccccccgtgagcgccaccagcggcaccttcagactgagaagaggcagcagattcacctggagaaaggagtgcctggccgtgatggagagaaacacctggagccccgagagaagaatggaggagaacaagtggaagctgctgagcgccggctag

SEQ ID NO: 341640 - DNA, 915 bp, Artificial Sequence
  derived and/or modified sequence
atgctctctagcttccccgtcgtactgttggagaccatgagccattacaccgacgagcctaggtttactatcgaacagatagatctgctccagcggttacgcagaacaggcatgaccaagcatgaaattctccatgcactggagacactcgatcgtctcgatcaggaacattctgacaagttcggtcggaggtctagctacgggggcagttcctacgggaattctactaataatgtgcccgcctcgtcaagcaccgctacagcctctacccaaactcagcacagcggcatgtcccctagcccaagtaattcttacgataccagccctcagccctgtacaaccaatcagaacggccgagagaataatgagcgactgagcacaagcaatggaaagatgtctccaacgaggtaccacgccaatagtatggggcagcggtcatactctttcgaggccagtgaggaagatctggacgtggatgataaggtggaggaactcatgcggcgcgactcctctgtcataaaggaggagatcaaggcctttttggctaacaggaggatctcccaagcagttgtcgcccaggtgacaggaatctctcagtctaggatctcccattggctgcttcagcagggctcagacctgagtgaacagaagaagcgggcattctatagatggtatcaactggaaaagacgaatccgggggcaactctttctatgaggcctgccccaatccccatcgaggatcctgagtggagacaaactccaccccccgtgtccgccacctcaggaacatttagactgaggcgcggttcccgattcacctggagaaaagagtgcttagccgtaatggagcgcaacacgtggtctccggagcgacgtatggaggaaaataaatggaagctgctaagtgcgggatag

SEQ ID NO: 341641 - DNA, 915 bp, Artificial Sequence
  derived and/or modified sequence
atgctgagcagcttccctgtggtgctgctggagaccatgagccactacacagatgagccccgcttcaccatcgagcagattgacctgctgcagaggctgcggaggacaggcatgaccaagcatgagatcctgcacgccctggagaccctggaccggctggaccaggagcacagcgacaagtttggaagaagaagcagctatggaggcagcagctatggcaacagcaccaacaacgtgcctgccagcagcagcacagccacagccagcacccagacccagcacagcggcatgagccccagccccagcaacagctatgacaccagcccccagccctgcaccaccaaccagaatggccgggagaacaatgaaaggctgagcaccagcaatggcaagatgagccccacccgctaccacgccaacagcatgggccagaggagctacagctttgaggccagcgaggaggacctggatgtggatgacaaggtggaggagctgatgagaagagacagcagcgtcatcaaggaggagatcaaggccttcctggccaacagacgcatcagccaggccgtggtggcccaggtgacaggcatcagccagagccgcatcagccactggctgctgcagcagggcagtgacctgtctgagcagaagaagagggccttctaccgctggtaccagctggagaagaccaaccctggggccaccctgtccatgaggcctgcccccatccccatcgaggaccctgagtggaggcagaccccacctcctgtgtctgccaccagcggcaccttccggctgcggcggggcagccgcttcacctggaggaaagaatgtctggccgtgatggagaggaacacctggagccctgagaggaggatggaggagaacaagtggaagctgctgtctgctggatag

SEQ ID NO: 341642 - DNA, 915 bp, Artificial Sequence
  derived and/or modified sequence
atgctgagcagcttccccgtggtgctgctggagaccatgagccactatacagacgaaccgcggttcacaattgaacagatcgatctactccagcgtctgcgccgaactgggatgacaaaacatgagatactgcacgccctcgagaccttggatcgcttggatcaggagcactcagacaaattcggaagacgcagcagctacggcggatccagttacgggaactccacgaacaacgtgcccgctagttcgtcaacagctacggcttccacgcagacacaacacagtggcatgagcccttcgcccagcaactcttacgacacgagtcctcagccttgcacaacaaaccaaaatgggagagagaacaatgaacggctcagcaccagtaatggaaagatgagtcctactaggtaccacgcaaacagcatgggtcagcgctcatatagtttcgaggctagcgaagaagacttggacgtggacgacaaggtggaggaattgatgcgacgcgacagttctgtcatcaaggaggaaatcaaagcatttcttgccaaccggcgcatctctcaggcagtagtcgcacaggtgaccggcatttctcagtcaaggattagccactggctactgcagcagggctccgatcttagcgagcaaaagaagcgagccttctatcgctggtaccagttggagaaaactaatcctggggcaactttatccatgcggccagccccaataccaatcgaagacccagaatggcggcagactcctccacccgtgtccgccaccagcgggacgtttcgcctgcgccgcgggtcacggttcacctggagaaaagagtgcttggccgttatggaaaggaacacgtggtctccagagcggcggatggaggaaaataagtggaagctgctgtcggccggctag

SEQ ID NO: 341643 - DNA, 915 bp, Artificial Sequence
  derived and/or modified sequence
atgctgagctcgttcccagtcgtgcttttggagacaatgagtcattatacggacgagccgaggtttacgattgagcaaatcgatctgcttcagcgtctgcgtcggaccggcatgactaagcacgagattctccatgcgctcgagaccctggaccgcctcgatcaggagcatagtgataagttcgggagaagatcctcgtacggcggatccagctatgggaattctacaaataacgtgcccgcttcatcgagtactgcaaccgcgtctactcaaacccagcattccggtatgagcccaagcccctccaactcctacgatacgtcgcctcagccatgtaccacaaatcagaacggccgagagaataacgaacggctttcaacttcaaacggcaagatgtcaccaacaaggtaccatgccaacagcatgggccagaggagctattcgtttgaggccagcgaagaagacctggatgtcgatgataaagtggaggagctgatgcgacgggattcctccgtcataaaagaagagatcaaagcctttctcgccaacagacgcattagccaggctgtcgtggcccaagtgactggcatttcacagtctcgaatctctcattggcttttgcagcaaggttccgatctgagtgagcagaaaaagagagcattttaccgatggtaccagctagagaagactaacccgggagccactctgagtatgagacctgccccaatcccaatagaagaccccgagtggaggcagaccccacccccagtctcagctacttctgggacatttcggcttaggagagggtctagatttacttggcggaaagagtgcctggccgtgatggaacgcaatacctggtcgcccgagagaagaatggaagaaaacaaatggaaactgctcagcgccggttag

SEQ ID NO: 341644 - DNA, 1257 bp, Artificial Sequence
  derived and/or modified sequence
tgttgatatcaatatggcggttgtcagccagacaaagacagtcagtctgatgtgattgagacaagggaggtttttcagggggagactgggagataggggcctcccctcccccttctcctcttcctgcgccggcctcaacccctccccagtcccctcccgacgggcgccccacgcggaagacacccctccccctcccgccttccctcctccctatctcagcccttcgtactgggacgttggggagggggctgtgccgggcggagagaactcagcgaggattctgagaatggtagataacgcagatcatctctggaaaggatattgatccgcctcatgtaaagtatgcttagttcctttccagtggttttgctggaaaccatgtctcattatacagatgaacccagatttaccatagagcagatagatctgcttcagcgacttcggcgtactggaatgactaaacatgaaattctccatgccttggaaactttggaccgtcttgatcaagagcatagtgacaagtttggaagaaggtccagctatggaggaagttcatatgggaatagtactaacaatgtcccagcatcttcctctacagctacagcttccacacagacgcagcattcgggaatgtccccgtcacctagcaacagttatgatacttccccacagccttgcactaccaatcaaaatgggagggagaataatgagcgattatctacatccaatggaaagatgtcaccaactcgctaccatgcaaacagcatgggtcagaggtcatacagttttgaagcctcagaagaggacctagatgtagatgataaagtggaagaattaatgaggagggacagcagtgtgataaaagaggaaatcaaagcctttcttgccaatcggaggatttcccaagcagttgttgcacaggtaacaggtatcagtcagagccggatctctcattggctgttgcagcagggatcagacctgagtgaacagaagaaaagagcattttaccgatggtatcaacttgagaagacaaaccctggcgctacactaagtatgagaccagcccccattccaatagaggaccctgaatggagacaaacgcctcccccagtctctgccacatctggtactttccgactgcgacgagggagtcgatttacctggagaaaggagtgcctggctgttatggaaaggaacacttggtcccctgagagaaggatggaagaaaataaatggaagttgctttctgcagggtag

SEQ ID NO: 341645 - DNA, 357 bp, Artificial Sequence
  derived and/or modified sequence
atgctgagcagcttccccgtggtgctgctggagaccatgagccactacaccgacgagcccagattcaccatcgagcagatcgacctgctgcagagactgagaagaaccggcatgaccaagcacgagatcctgcacgccctggagaccctggacagactggaccaggagcacagcgacaagttcggcagaagaagcagctacggcggcagcagctacggcaacagcaccaacaacgtgcccgccagcagcagcaccgccaccgccagcacccagacccagcacagcggcatgagccccagccccagcaacagctacgacaccagcccccagccctgcaccaccaaccagaacggctag

SEQ ID NO: 341646 - DNA, 357 bp, Artificial Sequence
  derived and/or modified sequence
atgctctcctcctttccagtggtgctgctcgaaaccatgtcgcattataccgacgaaccgaggttcacaatcgagcagatcgacctcctgcaaagattgcgtagaactggaatgaccaagcatgaaatcctgcacgctctggaaaccctggataggctcgatcaagaacactccgacaagtttggcaggaggagctcctatggcggaagttcctacgggaacagcacaaataatgtgccggcatcttcatccacagccaccgcctctacccaaactcagcattctggtatgtcccctagcccttcaaactcctatgacacatccccccagccatgtacaaccaatcagaacgggtag

SEQ ID NO: 341647 - DNA, 357 bp, Artificial Sequence
  derived and/or modified sequence
atgctgagcagcttccctgtggtgctgctggagaccatgagccactacacagatgagccccgcttcaccatcgagcagattgacctgctgcagaggctgcggaggacaggcatgaccaagcatgagatcctgcacgccctggagaccctggaccggctggaccaggagcacagcgacaagtttggaagaagaagcagctatggaggcagcagctatggcaacagcaccaacaacgtgcctgccagcagcagcacagccacagccagcacccagacccagcacagcggcatgagccccagccccagcaacagctatgacaccagcccccagccctgcaccaccaaccagaatggatag

SEQ ID NO: 341648 - DNA, 357 bp, Artificial Sequence
  derived and/or modified sequence
atgctgagcagcttccccgtggtgctgctggagaccatgagccactacacggacgaaccccggtttactattgagcaaattgacctgctccagcgcctgcgacggaccggcatgaccaagcacgaaatcctacacgccctggagacattagatcgtctggaccaggagcattccgacaaattcggcagaaggtcaagctatggcgggagctcctatggcaattcaacgaacaacgttcctgcatcaagctcaaccgccaccgcgtccacacagacacagcacagcggaatgtctccgtcacctagtaacagttatgatacctcaccccaaccgtgtactaccaaccaaaacggctag

SEQ ID NO: 341649 - DNA, 357 bp, Artificial Sequence
  derived and/or modified sequence
atgctaagtagtttccccgttgtgctgctcgagacaatgagccattatacagacgagcccaggtttacgattgagcagatcgacttgttgcagcggctgagacgcactggaatgactaagcacgagatacttcatgcgctggagaccttggaccggctcgatcaggagcactccgacaagtttggccgtcgtagctcctacgggggttcaagttacggtaattctacaaacaacgtgcccgctagcagttcaactgctacggcaagcacacagactcagcacagcggaatgtctccaagtcccagcaattcttacgatacctctcctcagccgtgtacgacaaatcagaatggatag

SEQ ID NO: 341650 - DNA, 811 bp, Artificial Sequence
  derived and/or modified sequence
gttgatatcaatatggcggttgtcagccagacaaagacagtcagtctgatgtgattgagacaagggaggtttttcagggggagactgggagataggggcctcccctcccccttctcctcttcctgcgccggcctcaacccctccccagtcccctcccgacgggcgccccacgcggaagacacccctccccctcccgccttccctcctccctatctcagcccttcgtactgggacgttggggagggggctgtgccgggcggagagaactcagcgaggattctgagagtttcgctcttgtccatgctggagtgcaatggtgtaatctcagctcaccacaacctccgcctcctgggttcaagtgattctcctgcctcagcttcctgagtagctgggattacagaatggtagataacgcagatcatctctggaaaggatattgatccgcctcatgtaaagtatgcttagttcctttccagtggttttgctggaaaccatgtctcattatacagatgaacccagatttaccatagagcagatagatctgcttcagcgacttcggcgtactggaatgactaaacatgaaattctccatgccttggaaactttggaccgtcttgatcaagagcatagtgacaagtttggaagaaggtccagctatggaggaagttcatatgggaatagtactaacaatgtcccagcatcttcctctacagctacagcttccacacagacgcagcattcgggaatgtccccgtcacctagcaacagttatgatacttccccacagccttgcactaccaatcaaaatggg

SEQ ID NO: 341651 - protein, 229 aa, Artificial Sequence
  derived and/or modified sequence
MKSSDIDQDLFTDSYCKVCSAQLISESQRVAHYESRKHASKVRLYYMLHPRDGGCPAKRLRSENGSDADMVDKNKCCTLCNMSFTSAVVADSHYQGKIHAKRLKLLLGEKTPLKTTATPLSPLKPPRMDTAPVVASPYQRRDSDRYCGLCAAWFNNPLMAQQHYDGKKHKKNAARVALLEQLGTTLDMGELRGLRRNYRCTICSVSLNSIEQYHAHLKGSKHQTNLKNK

SEQ ID NO: 341652 - protein, 211 aa, Artificial Sequence
  derived and/or modified sequence
MKSSDIDQDLFTDSYCKVCSAQLISESQRVAHYESRKHASKVRLYYMLHPRDGGCPAKRLRSENGSDADMVDKNKCCTLCNMSFTSAVVADSHYQGKIHAKRLKLLLGEKTPLKTTATPLSPLKPPRMDTAPVVASPYQRRDSDRYCGLCAAWFNNPLMAQQHYDGKKHKKNAARVALLEQLGTTLDMGELRGLRRNYRCTICSVSLNSIE

SEQ ID NO: 341653 - DNA, 2466 bp, Artificial Sequence
  derived and/or modified sequence
cagttggtccgagctgccgaaaggtctggtcgcagagacaggaacgtgtaatcctcagcgtgctccagcccacagcttcgctctactgctcggcagggcagctggcctctgggcaccggcggcccctctgcctcgcggaaaagcctgatgaagtcctccgatattgatcaggatttattcacagacagttactgcaaggtgtgcagtgcacagctgatctccgaatcgcagcgtgtggcccactacgagagtcgaaaacatgcaagcaaagtccgactgtattacatgcttcaccccagggatggagggtgtcctgccaagaggctccggtcagaaaatggaagtgatgccgacatggtggataagaacaagtgctgcacactctgcaacatgtcattcacttcagcggtggtggccgattcccattatcaaggcaaaatccacgccaagaggttaaaactcttgctaggagagaagaccccattaaagaccacagcaacacccctgagcccacttaagcccccacggatggacactgctccggtggtcgcatctccctatcaaagaagagattcagacagatactgtgggctctgtgcagcctggtttaataaccctctgatggcccagcaacattatgatggcaagaaacacaaaaagaatgcggcaagagttgctttgttagaacaactggggacaaccctggatatgggggaactgagaggtctgaggcgcaattacagatgtaccatctgcagtgtctccctaaactcaatagaacagtatcatgcccatctgaaaggatctaaacaccagaccaacctgaagaataagtagtgaaagcatcaatcaagacataagaacaaaacattagcatttctctgccgtggagaattgcttatcaaccaccagaggaggcttctttcttgaacaataaacatttcttataaggattcacagattcacatacgactgatcttgatttttggaaatgaatgaggtttcttttttctttttcctttttttaattttggggtaagttatgatatttggatggatttttaaattctttcctgataacatatttagcacatgttctaaattataatcctatagcaaacagttggagcattattcaaactgaaagtggaaaaatttaaatttccaatttattctagatttcctcagagcataattattctgttaaatcctcaatgagtgtgatgtaaaccacctctatccagaaatatacattcttttctcatcatgttggacacagttgagggtgacatgcacagaactggaacagatcactattagtggaaaataccaaatggacaaataaataccagtcgttttctccgttctccaagcacaggagccaggtttaccatctgaacaatgaagacgaagggagtaaataaaggaagaattctcatcttttttcctgatcattcaaagaacagtttctcaaggttaagccaagtcctccttgcaagttgccaaataatagcttaggaaaagaattagtctgcctgcatgatgatcttcttaggcaaaaacgtcttcacagcccttgaccttggtgaatttttttccccaaaagcatccaaaagaagaattataaaccccagaatgagatggaaataaacaagtatttttttttatgatgtttggcctgaactgtgggctttaattgggggatactgatcgtttggaaagaagtgagaaaattctgaagaaatggcggccttgggctaggcggggtcccctatttcttctgtttctcactgaagtcctactgctgagccaagactcagtcactctggaaagagcatgaccgataaagaaaacagttcctttctgatggggagcgtctgagtgcagatcatgaggctctttctctaggtttaattcttttccatggtgaccggacttggtgtcttgtagcctggttacgaagtgggacgttgagcttctactgacgatgccctgcatggaccagctgggatctggctggggctgccctgtgtccctaacgaccataggcaatccatcttcttgtgtcagcaatttctggacacccactgttttccaccaagagctgaggtggcaacaactcagtgagcaataaacaaaatgacacagaaatgcacagtgttgttatgaaggagcctgtttacctgtgttcaaaatctggcaccattcccttgagcagggcccgctcaggagggaccaggtctgccagtttctgtgcctgcagagagacgaagccccacgagccacaccctactctacaagaggaaagggggttggatgggaagaatctattttgctgttttggaaagcacacagccgacctacaaacctcctgtgatggtgtttcttcggatgtgtaaaataaggctttatttgtcaattccgctgtaaaataagcattgtccgagtaaaaacagcagcaacaac

SEQ ID NO: 341654 - DNA, 690 bp, Artificial Sequence
  derived and/or modified sequence
ctttggaccgttcacaggctaattgggaaaagtggacaggcctgcctgaagcctgatgaagtcctccgatattgatcaggatttattcacagacagttactgcaaggtgtgcagtgcacagctgatctccgaatcgcagcgtgtggcccactacgagagtcgaaaacatgcaagcaaagtccgactgtattacatgcttcaccccagggatggagggtgtcctgccaagaggctccggtcagaaaatggaagtgatgccgacatggtggataagaacaagtgctgcacactctgcaacatgtcattcacttcagcggtggtggccgattcccattatcaaggcaaaatccacgccaagaggttaaaactcttgctaggagagaagaccccattaaagaccacagcaacacccctgagcccacttaagcccccacggatggacactgctccggtggtcgcatctccctatcaaagaagagattcagacagatactgtgggctctgtgcagcctggtttaataaccctctgatggcccagcaacattatgatggcaagaaacacaaaaagaatgcggcaagagttgctttgttagaacaactggggacaaccctggatatgggggaactgagaggtctgaggcgcaattacagatgtaccatctgcagtgtctccctaaactcaatagaaca

SEQ ID NO: 341655 - protein, 153 aa, Artificial Sequence
  derived and/or modified sequence
MKSSDIDQDLFTDSYCKVCSAQLISESQRVAHYESRKHASKVRLYYMLHPRDGGCPAKRLRSENGSDADMVDKNKCCTLCNMSFTSAVVADSHYQGKIHAKRLKLLLGEKTPLKTTGLRRNYRCTICSVSLNSIEQYHAHLKGSKHQTNLKNK

SEQ ID NO: 341656 - DNA, 2250 bp, Artificial Sequence
  derived and/or modified sequence
cgctagcacagttggtccgagctgccgaaaggtctggtcgcagagacaggaacgtgtaatcctcagcgtgctccagcccacagcttcgctctactgctcggcagggcagctggcctctgggcaccggcggcccctctgcctcgcggaaaagcctgatgaagtcctccgatattgatcaggatttattcacagacagttactgcaaggtgtgcagtgcacagctgatctccgaatcgcagcgtgtggcccactacgagagtcgaaaacatgcaagcaaagtccgactgtattacatgcttcaccccagggatggagggtgtcctgccaagaggctccggtcagaaaatggaagtgatgccgacatggtggataagaacaagtgctgcacactctgcaacatgtcattcacttcagcggtggtggccgattcccattatcaaggcaaaatccacgccaagaggttaaaactcttgctaggagagaagaccccattaaagaccacaggtctgaggcgcaattacagatgtaccatctgcagtgtctccctaaactcaatagaacagtatcatgcccatctgaaaggatctaaacaccagaccaacctgaagaataagtagtgaaagcatcaatcaagacataagaacaaaacattagcatttctctgccgtggagaattgcttatcaaccaccagaggaggcttctttcttgaacaataaacatttcttataaggattcacagattcacatacgactgatcttgatttttggaaatgaatgaggtttcttttttctttttcctttttttaattttggggtaagttatgatatttggatggatttttaaattctttcctgataacatatttagcacatgttctaaattataatcctatagcaaacagttggagcattattcaaactgaaagtggaaaaatttaaatttccaatttattctagatttcctcagagcataattattctgttaaatcctcaatgagtgtgatgtaaaccacctctatccagaaatatacattcttttctcatcatgttggacacagttgagggtgacatgcacagaactggaacagatcactattagtggaaaataccaaatggacaaataaataccagtcgttttctccgttctccaagcacaggagccaggtttaccatctgaacaatgaagacgaagggagtaaataaaggaagaattctcatcttttttcctgatcattcaaagaacagtttctcaaggttaagccaagtcctccttgcaagttgccaaataatagcttaggaaaagaattagtctgcctgcatgatgatcttcttaggcaaaaacgtcttcacagcccttgaccttggtgaatttttttccccaaaagcatccaaaagaagaattataaaccccagaatgagatggaaataaacaagtatttttttttatgatgtttggcctgaactgtgggctttaattgggggatactgatcgtttggaaagaagtgagaaaattctgaagaaatggcggccttgggctaggcggggtcccctatttcttctgtttctcactgaagtcctactgctgagccaagactcagtcactctggaaagagcatgaccgataaagaaaacagttcctttctgatggggagcgtctgagtgcagatcatgaggctctttctctaggtttaattcttttccatggtgaccggacttggtgtcttgtagcctggttacgaagtgggacgttgagcttctactgacgatgccctgcatggaccagctgggatctggctggggctgccctgtgtccctaacgaccataggcaatccatcttcttgtgtcagcaatttctggacacccactgttttccaccaagagctgaggtggcaacaactcagtgagcaataaacaaaatgacacagaaatgcacagtgttgttatgaaggagcctgtttacctgtgttcaaaatctggcaccattcccttgagcagggcccgctcaggagggaccaggtctgccagtttctgtgcctgcagagagacgaagccccacgagccacaccctactctacaagaggaaagggggttggatgggaagaatctattttgctgttttggaaagcacacagccgacctacaaacctcctgtgatggtgtttcttcggatgtgtaaaataaggctttatttgtcaattccgctgtaaaataagcattgtccgagtaaaaacagcagcaacaacaaaa

SEQ ID NO: 341657 - DNA, 580 bp, Artificial Sequence
  derived and/or modified sequence
gaaagctcgctgtcgctgggaggcgcgcgccggcgttcctcggccgctccgggtacctgagggacgcgcggccgcccgcggcaggcggtgcagcccccccaccccttggagccaggcgccggggtctgagatatttcagttgaaggaagaaatagctcttctcctaagatggaatctgtggtttgggaatgtggttgatcaacttgatatgttggccaaatgtgccccatgtaataaaatgaaaagaagagacaagatgatgtcattttcccatattgtgaaaccaaaaacaaacgccttttgtgagaccaagctaacaaacctctgacggtgcgaagagtatttaactgtttgaagaatttaacagtaagatacagaagaagtaccttcgagctgagacctgcaggtgtataaatatctaaaatacatattgaataggcctgatcatctgaatctccttcagacccaggaaggatggctatgacttggattgtcttctctctttggcccttgactgtgttcatggggcatataggtgggcacagtttgttttcttgtgaacctattaccttgaggatgt

SEQ ID NO: 341658 - DNA, 108 bp, Artificial Sequence
  derived and/or modified sequence
atggctatgacatggattgtttttagtctgtggccactgaccgtttttatggggcacatagggggacatagtctgttttcctgcgagccaattaccctccggatgtag

SEQ ID NO: 341659 - DNA, 108 bp, Artificial Sequence
  derived and/or modified sequence
atggccatgacctggatcgtgttcagcctgtggcccctgaccgtcttcatgggccacatcggcggccacagcctcttcagctgtgagcccatcaccctgaggatgtag

SEQ ID NO: 341660 - DNA, 108 bp, Artificial Sequence
  derived and/or modified sequence
atggccatgacctggatcgtgttcagcctgtggcccctgaccgtgttcatgggtcatataggaggccattcacttttctcatgcgagcctatcacactccgcatgtag

SEQ ID NO: 341661 - DNA, 108 bp, Artificial Sequence
  derived and/or modified sequence
atggctatgacttggatcgttttctccctgtggccactgaccgtctttatgggccacattggtggtcacagcctgttcagttgcgagccaattacgttgcgcatgtag

SEQ ID NO: 341662 - DNA, 108 bp, Artificial Sequence
  derived and/or modified sequence
atggccatgacctggatcgtgttcagcctgtggcccctgaccgtgttcatgggccacatcggcggccacagcctgttcagctgcgagcccatcaccctgagaatgtag

SEQ ID NO: 341663 - DNA, 1053 bp, Artificial Sequence
  derived and/or modified sequence
atggccagatggatccccaccaagagacagaagtacggcgtggccatctacaactacaacgccagccaggacgtggagctgagcctgcagatcggcgacaccgtgcacatcctggagatgtacgagggctggtacagaggctacaccctgcagaacaagagcaagaagggcatcttccccgagacctacatccacctgaaggaggccaccgtggaggacctgggccagcacgagaccgtgatccccggcgagctgcccctggtgcaggagctgaccagcaccctgagagagtgggccgtgatctggagaaagctgtacgtgaacaacaagctgaccctgttcagacagctgcagcagatgacctacagcctgatcgagtggagaagccagatcctgagcggcaccctgcccaaggacgagctggccgagctgaagaagaaggtgaccgccaagatcgaccacggcaacagaatgctgggcctggacctggtggtgagagacgacaacggcaacatcctggaccccgacgagaccagcaccatcgccctgttcaaggcccacgaggtggccagcaagagaatcgaggagaagatccaggaggagaagagcatcctgcagaacctggacctgagaggccagagcatcttcagcaccatccacacctacggcctgtacgtgaacttcaagaacttcgtgtgcaacatcggcgaggacgccgagctgttcatggccctgtacgaccccgaccagagcaccttcatcagcgagaactacctgatcagatggggcagcaacggcatgcccaaggagatcgagaagctgaacaacctgcaggccgtgttcaccgacctgagcagcatggacctgatcagacccagagtgagcctggtgtgccagatcgtgagagtgggccacatggagctgaaggagggcaagaagcacacctgcggcctgagaagacccttcggcgtggccgtgatggacatcaccgacatcatccacggcaaggtggacgacgaggagaagcagcacttcatccccttccagcagtag

SEQ ID NO: 341664 - DNA, 1053 bp, Artificial Sequence
  derived and/or modified sequence
atggcgcgttggatccccaccaaaagacagaaatacggggttgccatctacaactataatgctagccaagacgtcgagctttccctccagatcggggataccgtgcatatcttggagatgtatgagggatggtatagaggatatacactgcagaacaagtctaagaagggaatctttcctgaaacatacatccatctgaaggaagctactgtggaggacctcggccagcacgagacagtgatccccggggagctccctctggtacaggaactgactagcacactgcgtgagtgggctgtgatctggagaaagctgtatgtgaacaataagctgaccttgtttcgtcagctgcagcagatgacttatagcctcatcgagtggaggtctcagatccttagtggaacattgcccaaggacgaactggcagagctgaagaagaaggttacagccaaaatagatcacggcaacaggatgctggggctagatctcgttgtccgagacgacaatgggaatatactagatcccgatgaaacgagcactattgccctgtttaaggcccatgaagtggcttcgaaacgcatagaagagaagattcaagaggagaaatctatactgcagaatctggatctccgggggcagtctattttttcaactatccacacctatggcctgtatgtgaacttcaagaacttcgtttgtaatataggagaggacgctgagcttttcatggccctgtacgatcccgatcaatctacattcatctccgagaactacctgataaggtggggatccaatggcatgcccaaggagattgagaagctgaataatctccaggctgtgtttacggacctcagcagtatggacctcattaggccccgcgtcagtttagtctgccagatcgtgcgtgtcggccacatggagctgaaggaggggaagaaacacacatgcggcctgcgcaggccctttggcgttgccgtaatggatatcactgacatcatccacggtaaggtggacgacgaggagaagcagcatttcatccccttccagcagtag

SEQ ID NO: 341665 - DNA, 1053 bp, Artificial Sequence
  derived and/or modified sequence
atggcccgctggatccccaccaagaggcagaagtatggagtggccatctacaactacaatgccagccaggatgtggagctgagcctgcagattggagacacagtgcacatcctggagatgtatgagggctggtaccggggctacaccctgcagaacaagagcaagaagggcatcttccctgagacctacatccacctgaaggaggccaccgtggaggacctgggccagcatgaaacagtcatccctggagagctgcccctggtgcaggagctgaccagcaccctgcgggagtgggccgtcatctggaggaagctgtatgtgaacaacaagctgaccctcttccggcagctgcagcagatgacctacagcctgattgagtggaggagccagatcctgagcggcaccctgcccaaggatgagctggccgagctgaagaagaaggtgacagccaagattgaccacggcaacaggatgctgggcctggacctggtggtgagagatgacaatggaaacatcctggaccctgatgagaccagcaccatcgccctcttcaaggcccacgaggtggccagcaagagaattgaggagaagatccaggaggagaagagcatcctgcagaacctggacctgcggggccagagcatcttcagcaccatccacacctacggcctgtatgtgaacttcaagaactttgtgtgcaacattggagaagatgctgagctgttcatggccctgtatgaccctgaccagagcaccttcatcagcgagaactacctgatccgctggggcagcaatggcatgcccaaggagattgagaagctgaacaacctgcaggccgtgttcacagacctgagctccatggacctgatccggccccgggtgtccctggtgtgccagatcgtgcgggtgggccacatggagctgaaggagggcaagaagcacacctgtggcctgcggcggcccttcggcgtggccgtgatggacatcacagacatcatccacggcaaggtggatgatgaggagaagcagcacttcatccccttccagcagtag

SEQ ID NO: 341666 - DNA, 1053 bp, Artificial Sequence
  derived and/or modified sequence
atggcccggtggatccccaccaagcggcagaagtacggcgtggccatttacaactacaacgctagccaggacgttgagctgtccctgcaaatcggcgacacggtgcacatcttggaaatgtatgagggatggtatagggggtacactctgcaaaataagtccaaaaaaggcattttccccgaaacctatatccatttaaaggaagctacagttgaggatcttggccagcacgagactgtaattccaggggaacttccgctggtccaggaattgacatctacacttagagaatgggccgtaatttggaggaagctatatgttaacaacaagttgaccttgttccgccagctgcagcagatgacctattcattaattgagtggaggtcacagattctgtccggaactcttcctaaggacgaactggcggagttgaagaaaaaagtgacagccaaaattgaccacggtaatcggatgctgggtctagacttagtcgtgcgcgacgacaatggaaatatcctggatcctgatgagacgagcacaatcgcgctctttaaggctcacgaggtggcctcgaaacgtatagaggagaagatccaggaggaaaagtcaatcctccagaacctcgacctgagagggcagtctatattcagcactatccatacttacggcttgtacgtgaactttaaaaactttgtttgtaacatcggggaggacgcggaactattcatggcactttacgatcctgaccaatccactttcattagcgagaattacctgatccgatggggttccaatgggatgcctaaagagatagaaaagcttaataacctccaggccgtatttacagacctgtcaagtatggatcttataaggccccgcgtcagtcttgtttgtcaaatagtgcgcgtggggcatatggaacttaaggagggtaaaaaacacacctgtggtctgagacggccctttggcgtggcagtgatggatatcactgacatcatccacggtaaggtagatgatgaggaaaagcagcactttattccttttcaacagtag

SEQ ID NO: 341667 - DNA, 1053 bp, Artificial Sequence
  derived and/or modified sequence
atggcaaggtggattcccaccaagcggcaaaagtatggagtggccatatataattacaatgccagccaggacgtcgaactttctctacagatcggcgacacagtgcatattctcgagatgtatgagggatggtatcggggttataccttgcagaacaagtctaaaaagggaatcttccccgagacttatatccacctcaaagaggccacggtggaggaccttgggcaacatgaaaccgttattcccggagagttgcccctagttcaggaactcactagcacacttagggaatgggcagtgatctggcgtaagctctacgttaataataagctgactctgtttagacagctccagcagatgacatactccctgatagaatggaggagtcagattctgtccgggactctgcctaaggacgaactggctgaattaaaaaaaaaagtgaccgcaaagatcgatcacggcaatcgcatgctcggactggacctggtggtgcgggatgataacgggaacatcctggacccggacgaaacatccacgatcgcacttttcaaggcccacgaggtggcctctaagcgcattgaggagaagatccaagaggagaaatcaatcctgcagaacctggatcttcgtggccaaagcattttttccacaattcatacttacgggctctatgtcaatttcaagaatttcgtgtgtaacattggcgaggatgctgaattgttcatggccttgtatgaccccgatcagtccacatttatctctgagaactacctcataagatggggcagcaacggaatgccaaaggaaatagagaagctcaacaacctacaggccgtgtttacagatctttcctccatggatctcatacgtccacgtgtgtctcttgtgtgtcagattgtgagggtcggtcatatggagttaaaagaagggaagaagcacacgtgcggcctgcgtaggcccttcggagtcgccgttatggatattaccgatattatccacgggaaagttgatgatgaagagaaacagcactttataccgtttcagcagtag

SEQ ID NO: 341668 - DNA, 2166 bp, Artificial Sequence
  derived and/or modified sequence
ggcccgcggagtccagcgaagtttggcggaacatggcggaagcgtctggggcacgcaggagcgcggggcggcggcggccggagcccgaggagctgtagcagccttagtcgccgccgccgcggggcgaggtcgccgccatggcccgctggatcccgaccaagaggcagaagtacggggttgcgatctataactacaatgcttctcaagatgtggagctctccttgcagatcggtgacacagttcacatcctggagatgtacgagggttggtacagaggatataccctccaaaataaatctaaaaagggcattttccctgaaacatatatccatttgaaagaggcaactgtggaagacctggggcagcatgaaaccgtgattcctggcgagctccccctggtgcaggagctcacgtccactctgcgagaatgggctgtcatctggcgaaagctctacgtgaacaacaagctcaccctcttccgccagctgcagcagatgacgtacagcctgatcgagtggcggtcccagatcctgtctgggacgctccccaaggatgaactggcagagctcaagaagaaagtcacagccaaaattgatcatgggaacagaatgctggggttagatctggtggtgcgagatgacaatgggaacatcctagaccctgacgaaaccagcaccattgccctcttcaaggcccatgaggtggcctccaaaaggattgaggaaaagatccaagaagagaagtcaatcctgcagaacctcgatttgcggggccagtccatcttcagtaccatccacacctatggcctctatgtgaacttcaagaactttgtctgcaacatcggggaagatgcagagttgtttatggccctctacgacccagaccagtccacttttatcagtgagaactatctaattcgttggggcagtaacgggatgcccaaggaaatagagaagctcaataacctccaagcagtgtttacagaccttagcagcatggacctcatccggccccgcgtcagccttgtgtgccagattgtccgcgtgggccatatggagctgaaggaaggcaagaagcacacctgtggactccgaagaccttttggagtggcagtgatggatattactgatatcatacatgggaaggtggatgatgaagaaaagcagcattttattccctttcagcagtaagtactttggcatgtgtcccaggtgacttgagacctggattagccattcaattgtcttttaacacagaaacaggtgttagaaaccattttctcagagaaggaaagattctaagctgcaagattgtcagataggagctgaacagaagactttattcaaagtccttgatgttggactcccattgaagagggtaaactgaactttcctgattctatagaaagcatcaaaggaatataaaagggcacatatctgtctgctctggaatgcagagagggtgccgtccttgtgtcagcaatgccaaaatatatgtgcagtctattgcatgaaacaggcatcatggatgacacggaatcacgtgggctagcatagggcttctcagactgcatcatgcatatgaatcaggggaacttgttaggctgcaggggagttctgcctctgacaagctcccaggtgatgctgatgtagctggtctgagggccacactgtctgtagcgagggtttaggagatgagagagtgaagggctgacccacccatgggccagtgttcctgcatgttgggggaaagccagcctgggagcatgtgaaaggatccttgcagagctttactgaggccctccatattgagctgcaggagctggagccatgggtaggccattgaggagctgttgggagcagattcaagccgtgtcactctgaagaagtgcaggtgtgaacgtcatgacctgctccagcacctgcacaggcagtggaggcctagtggaggccaagagcattgccgggaccaagtcccaccaggggccatcgtgccagtcagagggcatcatctcagctcacttgcagctgccactgcagacaagtagaacaaactgagaattccacaaaccagccagagtcatatatttgagttaatatatcactttttacaaatgatatcacaaattagtggagaaagatacattatgcaaaaaaaaaaaaaaaa

SEQ ID NO: 341669 - DNA, 306 bp, Artificial Sequence
  derived and/or modified sequence
atggagctggacagcgccctggaggcccccagccaggaggacagcaacctgagcgaggagctgagccacagcgccttcggccaggccttcagcaagatcctgcactgcctggccagacccgaggccagaagaggcaacgtgaaggacgccgtgctgaaggacctgggcgacctgatcgaggccaccgagttcgacagactgttcgagggcaccggcgccagactgagaggcatgcccgagaccctgggccaggtggccaaggccctggagaagtacgccgcccccagcaaggaggaggagggctag

SEQ ID NO: 341670 - DNA, 306 bp, Artificial Sequence
  derived and/or modified sequence
atggaactggattctgccctggaggccccaagccaggaggacagcaacttgagcgaggagctctctcatagcgccttcggacaggccttttctaaaatcttgcattgtcttgcccgacctgaggcacgcagaggcaacgtgaaagatgcagtgcttaaagacttaggtgatctgatcgaggccaccgagtttgaccgcttattcgagggaacaggggcacggttgagaggaatgcctgagactctggggcaggtggcaaaagccttggaaaagtacgcggcaccctctaaggaggaggaggggtag

SEQ ID NO: 341671 - DNA, 306 bp, Artificial Sequence
  derived and/or modified sequence
atggagctggacagcgccctggaggcccccagccaggaggacagcaacctgtctgaggagctgagccacagcgccttcggccaggccttcagcaagatcctgcactgcctggcccggcctgaggccaggagaggaaatgtgaaggatgctgtgctgaaggacctgggggacctgattgaggccacagaatttgaccggctgtttgagggcactggagcccggctgcggggcatgcctgagaccctgggccaggtggccaaggccctggagaagtatgctgcccccagcaaggaggaggagggctag

SEQ ID NO: 341672 - DNA, 306 bp, Artificial Sequence
  derived and/or modified sequence
atggagctggacagcgccctggaggcccccagccaggaggacagcaacctttcagaggagttgtcccactctgcgttcggccaagcttttagcaagatccttcactgcttagcccgcccagaagctcgaagaggaaacgtgaaagacgcggtacttaaggatctgggcgatctcattgaagcgaccgaatttgatcggttattcgagggcactggggctcggctgcgcggcatgccagagacactcggacaagtggcaaaggcattagagaaatacgctgccccctccaaagaggaagaggggtag

SEQ ID NO: 341673 - DNA, 306 bp, Artificial Sequence
  derived and/or modified sequence
atggagttggactccgctttagaggcacctagccaggaagacagcaacctctccgaagaattatcacatagcgcattcggacaggccttttccaagatcctgcattgcttggcaagacctgaggcacgcagaggcaacgtcaaagacgctgtgctgaaagatctcggtgacttgattgaggccacagaattcgatcggctgttcgaagggactggagccagactgcgtggaatgcctgaaactctggggcaggtcgccaaggccttggagaagtatgctgccccttcaaaagaggaggagggctag

SEQ ID NO: 341674 - DNA, 485 bp, Artificial Sequence
  derived and/or modified sequence
ggatcctgttagacaccggcgggcgcgagccgttgcagtcttcagaaaggcaacagtagtcttttaacgtcactgttaaaagtttctctttgggtgatcgctccttccctcttcaacggatccctccccgcctccatcctcgttctgtgggagagaccagccttctggtgctgcagtcaggaatggagcttgacagcgctctggaagccccatcgcaggaagactctaatttgtccgaggagttgtctcactccgcctttggacaggccttctccaagattttacactgtcttgcccgcccggaggcacgacgaggcaatgtaaaagatgcagttcttaaagacctcggtgatctaatagaagccacagaatttgataggttatttgaggggactggtgcacggctccgcggaatgccggagacactggggcaggtagcaaaagccctggagaagtatgcagccccctccaaggaggaggaaggt

SEQ ID NO: 341675 - protein, 162 aa, Artificial Sequence
  derived and/or modified sequence
MNSNASEHTGMLRTCWSHSHWDPFSSGSVTAMWATHSPTSKAWAGIQGRGRWALGFPWRGQGVLHVIASQKAAVTEAVDLRTGAASQAMSEAFVRSGMFYLRPAFVLLCYKWGKLRHSEVSNLLGVAWPVSEEACMGTWGSLAVAVTLPAQGLGTWGRDEGE

SEQ ID NO: 341676 - DNA, 489 bp, Artificial Sequence
  derived and/or modified sequence
atgaactccaatgcctcagagcataccgggatgttgagaacttgttggtcacacagccattgggacccattctcttccgggtcagtgaccgcaatgtgggcgacccacagtccaactagtaaagcttgggccgggatacaaggcagagggaggtgggccctcggatttccgtggagaggacaaggtgttttacacgtgatagccagtcagaaagcggcagtcaccgaggcggttgatttacgcaccggggcagcctctcaggcgatgtccgaggcatttgtgcgcagcggaatgttttaccttaggccggctttcgtgttgttatgctataaatggggtaagttgagacacagcgaggtgtctaacctcctcggagtggcctggccagtgagcgaagaagcatgtatgggaacctggggatccctggcagtggccgtcaccttgccggctcagggcttgggaacttgggggagagatgagggcgaatag

SEQ ID NO: 341677 - DNA, 489 bp, Artificial Sequence
  derived and/or modified sequence
atgaactcgaacgcctctgaacacactggaatgcttcgcacatgttggtctcattcccactgggacccattctcctccgggagcgtgaccgccatgtgggcaacacacagtcctactagcaaagcctgggcgggaatccaaggccgagggagatgggctctggggtttccctggagaggacagggtgtactgcacgtgatcgcttcacagaaggccgctgtcaccgaagccgtggatttgcgaacgggcgcagcaagccaggcaatgtcagaagcttttgtaagaagcggcatgttttacctgcgccctgcattcgtgctgctctgctacaaatggggaaagctcaggcattcagaagtttcgaatttacttggagtagcctggcccgttagtgaagaagcttgtatggggacgtggggctctctggcagttgcagtcacattacccgctcaggggctggggacttgggggagagacgaaggagagtag

SEQ ID NO: 341678 - protein, 521 aa, Artificial Sequence
  derived and/or modified sequence
MVRIQRRKLLASCLCVTATVFLLVTLQALDTVENLMKVTGPPQGVTDSMQCFNDQRPLSNTRSSEHIKEVMVELGKFERKEFKSSSLQDGHTKMEEAPTHLNSFLKKEGLTFNRKRKWELDSYPIMLWWSPLTGETGRLGQCGADACFFTINRTYLHHHMTKAFLFYGTDFNIDSLPLPRKAHHDWAVFHEESPKNNYKLFHKPVITLFNYTATFSRHSHLPLTTQYLESIEVLKSLRYLVPLQSKNKLRKRLAPLVYVQSDCDPPSDRDSYVRELMTYIEVDSYGECLRNKDLPQQLKNPASMDADGFYRIIAQYKFILAFENAVCDDYITEKFWRPLKLGVVPVYYGSPSITDWLPSNKSAILVSEFSHPRELASYIRRLDSDDRLYEAYVEWKLKGEISNQRLLTALRERKWGVQDVNQDNYIDAFECMVCTKVWANIRLQEKGLPPKRWEAEDTHLSCPEPTVFAFSPLRTPPLSSLREMWISSFEQSKKEAQALRWLVDRNQNFSSQEFWGLVFKD

SEQ ID NO: 341679 - DNA, 1566 bp, Artificial Sequence
  derived and/or modified sequence
atggtgagaatccagagaagaaagctgctggccagctgcctgtgcgtgaccgccaccgtgttcctgctggtgaccctgcaggccctggacaccgtggagaacctgatgaaggtgaccggccccccccagggcgtgaccgacagcatgcagtgcttcaacgaccagagacccctgagcaacaccagaagcagcgagcacatcaaggaggtgatggtggagctgggcaagttcgagagaaaggagttcaagagcagcagcctgcaggacggccacaccaagatggaggaggcccccacccacctgaacagcttcctgaagaaggagggcctgaccttcaacagaaagagaaagtgggagctggacagctaccccatcatgctgtggtggagccccctgaccggcgagaccggcagactgggccagtgcggcgccgacgcctgcttcttcaccatcaacagaacctacctgcaccaccacatgaccaaggccttcctgttctacggcaccgacttcaacatcgacagcctgcccctgcccagaaaggcccaccacgactgggccgtgttccacgaggagagccccaagaacaactacaagctgttccacaagcccgtgatcaccctgttcaactacaccgccaccttcagcagacacagccacctgcccctgaccacccagtacctggagagcatcgaggtgctgaagagcctgagatacctggtgcccctgcagagcaagaacaagctgagaaagagactggcccccctggtgtacgtgcagagcgactgcgacccccccagcgacagagacagctacgtgagagagctgatgacctacatcgaggtggacagctacggcgagtgcctgagaaacaaggacctgccccagcagctgaagaaccccgccagcatggacgccgacggcttctacagaatcatcgcccagtacaagttcatcctggccttcgagaacgccgtgtgcgacgactacatcaccgagaagttctggagacccctgaagctgggcgtggtgcccgtgtactacggcagccccagcatcaccgactggctgcccagcaacaagagcgccatcctggtgagcgagttcagccaccccagagagctggccagctacatcagaagactggacagcgacgacagactgtacgaggcctacgtggagtggaagctgaagggcgagatcagcaaccagagactgctgaccgccctgagagagagaaagtggggcgtgcaggacgtgaaccaggacaactacatcgacgccttcgagtgcatggtgtgcaccaaggtgtgggccaacatcagactgcaggagaagggcctgccccccaagagatgggaggccgaggacacccacctgagctgccccgagcccaccgtgttcgccttcagccccctgagaaccccccccctgagcagcctgagagagatgtggatcagcagcttcgagcagagcaagaaggaggcccaggccctgagatggctggtggacagaaaccagaacttcagcagccaggagttctggggcctggtgttcaaggactag

SEQ ID NO: 341680 - DNA, 3675 bp, Artificial Sequence
  derived and/or modified sequence
gtcttcccggcgcccaggcttgggctcatagggagaaaggaagctgcgctgcattctgcgggacgaaccctgctccgcgcgagaatttttttgattccttcttatttggagaaatctccagctgctctgatgatagcctaagaagactgcatgctgcttcctctcgatgccaagccagaccctctcacaacctcggatctcagtccttcatggagacctggtcccagcaggaatggcagtgcaggaaattggcgcccagatggttcttccatgtgaagttgtctcgggctctgggctgacgagagaacacctggtaaccaggttagccctctgtcagtcacccagggcagggcagcatggtgcggattcagaggaggaagcttttggcatcttgcctgtgcgtcacagccaccgtctttctgcttgtcacactccaggccttggataccgttgagaatctaatgaaagtcacgggccctccccagggagttacagactccatgcaatgcttcaatgatcagcggcctttatctaacaccaggagcagcgagcacataaaagaggtcatggttgagctggggaagtttgaaaggaaggagtttaaaagttccagtttgcaagatggacatacaaaaatggaggaagcacctacgcatcttaattcatttcttaagaaagaaggattgaccttcaacaggaaaagaaaatgggaattggacagctaccccattatgctctggtggtccccgctgacgggggagactgggaggttaggccaatgtggagcagatgcttgtttcttcaccatcaaccggacctacctccatcatcacatgaccaaagcattcctcttctatggtactgactttaacatagatagcttacctctgcctcggaaagcccatcatgactgggctgtttttcatgaagagtccccgaaaaacaattataagctctttcataaaccagtgatcaccttgttcaactacactgccacgttcagcaggcattcccacttgccactaactacccaatacttggagagcattgaagtcctgaagtcactccgatacctagttcctttgcagtccaaaaacaagcttagaaaaagacttgctccgctggtgtatgtacagtcagactgtgacccaccatcagacagggacagctatgttcgcgagctgatgacttacatcgaggtcgattcctatggtgaatgtttacgaaacaaagacctccctcagcagctgaaaaatccagcctctatggatgccgatggcttttataggatcattgcacagtataagtttatcctagcttttgagaatgcagtttgtgatgactacatcactgagaagttctggaggccactgaaactgggggtagtccctgtatattacggatcccccagcatcacagactggcttccaagtaacaaaagtgctattcttgtatcagaattttctcaccccagggaactggcaagttacatcagacgactggattctgatgacagattgtatgaggcctatgtagaatggaagctgaagggtgagatctctaaccagcgacttctgacagctctcagggaacggaaatggggagtgcaagacgtcaaccaggacaattacatcgatgcatttgagtgtatggtgtgcaccaaggtgtgggctaatatcaggcttcaggaaaagggcttaccacccaaaagatgggaggcagaagatacccacctgagttgcccagagcccacagtgtttgctttctcaccactccggactccacctttgagctctttgcgagagatgtggatttccagctttgaacaatccaagaaagaagcccaggcactaaggtggctggttgataggaatcaaaacttttcatctcaagagttttggggcctagtattcaaggactgatttcaaaaatgatcagaatgaaacagactagagccttcttgaggtttattttctaggttgccttaatatttgaacataatagctattctgttgactatccatcaggataataattagttgctgcagtactcataatgagccctttcaaggaatagatgtaaattacccttaggggtagccactatattttttatactaaaaaaggaaatatttcttatggacactggttatcttccatgtccgtgtctgtggacccacatacttactgccttttgtggaaattcacctagagtgagtactttccttgtgcaatggagggagacgatctagctatagattcttgatactcacctcactctcaacagcttattggtatttggcaaacctggtatcctgcagccgagcatgaacatgaaatacattagaacttggcaatgagagatcccatctgttggtttccagggatgtaagtgagtaataaaagctgtttcaagtttatccactatccactcttcaagtgaaaagaacttatgtgtgtctaccttcttctccataccctgagccacctctctcactttctttagttgtgccttgccctatcgcctcccattttcccttcaaagtagaatgtcttgtaaagacacagtaactcctgtgtgttttgattagtgagatgttaccacttaccccttctgctgcgcagaataatattaagaattgctatgcttatgattcaggctggacagcctggacattttgagcagcgcgagagtagaagtgaatacccccaggaactccaattgtgctgaagctgatttgtctgttcgtaggatgatgtgcagcctgtcacagtggcagccacaggcattcagtttgtgggcatttcctgtcatttcggatcctgctatagggaaggttcagctctcctgtctggggcatctactggagcacctcagaagacaaggaggaaaacactggctcatgttttctttccatgtgagggaggggaggtttctagatgatactaaaagcctgttgccactgttgtgtcatgatttccattcttcatcatggaaagccacaagcctcagaaggcagccagaggacaggaagagtctgtgatgctcatgtctgtgtcatggcatgagggggaattgacgagtgcttgcttagcatcagctctcattgtattgaaggctgtgcccttggtgtgcttagcagtgagcagcgtcttcattaggtagctctggctgggctttgtcagccagcgtgtgagaaaggagaaccaaaaccaatacctccttatagaagccagaaggatcacattggatgagagaaggtgtctataactgggttcttcccaatcccagctctttcattaactaaatatgatcttggacatatctcttaacctccatcggccttagtttttgcatccaaaaagaagtgattgggctggtcttggaaggtttttttcttttttttcccctgtgtaacattcttcattgttcatcaacatttaagaaatttaattttgtagatgtttttactaaagagggtaacaaactattttggaactgctgtatgttattcaagggaagcacgctgtttggaggaaggagcatacttaatgggtagtattgaggatgaaagggaatttctctctctgccattttatttgataatattaaagaaataaagactggaaagggggattccttgttaaaggtcagattttaaattgcatataaaa

SEQ ID NO: 341681 - DNA, 1566 bp, Artificial Sequence
  derived and/or modified sequence
atggtgaggatccagaggcgaaagttgctcgcaagctgcctctgcgtcacagcaacagtgtttctgctggtgactctgcaagccctcgacacggtggaaaatctgatgaaggtcactggtccaccacaaggagtgacagacagcatgcagtgcttcaatgatcagcgtcccttgtctaacacacggagctccgagcatattaaggaggttatggtggaactgggtaagtttgagagaaaggaatttaagtcttctagtctgcaggatggccacaccaagatggaggaagctcccactcatcttaactcgttcctgaaaaaagaaggccttacgttcaacaggaagagaaagtgggaactagacagctaccctatcatgttgtggtggagtcctttgacaggcgaaaccgggagacttggccaatgcggagctgatgcctgtttcttcacaattaatcggacatacctacaccaccatatgaccaaggcctttctgttttacggcactgattttaacatcgactccctccctctgcctagaaaggcacatcatgactgggccgtgtttcatgaggagtcgccaaaaaataactataaactgttccacaaacccgttatcaccctgttcaattatacggctactttctccagacactctcatctccctctgactacccagtacttggagagcatagaagtgctgaaatcccttcggtaccttgtgccgctgcagagtaaaaacaagctcaggaagagactggcccccctggtttacgtgcagagcgattgcgacccaccttcagaccgggactcttacgtgcgggaactcatgacatacattgaagtggactcctacggtgagtgtctacgcaacaaggatctgcctcaacagctcaagaaccctgctagcatggacgccgacggattttacaggattatcgctcagtacaagttcattctggctttcgagaacgccgtatgtgatgactacattactgaaaaattttggcgtcccctcaaactgggcgtggtgccagtctattacggatctccatccatcacggactggctgcctagcaataagtctgcaattctcgtgtcagagttctctcacccacgggagctagcttcctacattagacggctggactctgacgatcgactgtacgaagcatacgtggaatggaaactgaagggcgaaatctccaaccaaagacttctcactgcgctccgcgagcggaaatggggtgtccaggatgtgaaccaggacaactatatcgacgccttcgaatgcatggtgtgtacgaaggtgtgggctaatatcagattgcaagagaaggggctccctccaaagaggtgggaagcagaagacacccatctgagctgccccgaaccaaccgtattcgccttctcccctttgagaacacctcctctctctagcctccgggagatgtggataagtagcttcgagcagtctaaaaaggaggcacaagcactgcgctggctagtggatcgtaaccagaatttctcatcccaggagttctgggggttagtcttcaaggattag

SEQ ID NO: 341682 - DNA, 1566 bp, Artificial Sequence
  derived and/or modified sequence
atggtgcgcatccagaggaggaagctgctggccagctgcctgtgtgtgacagccaccgtcttcctgctggtgaccctgcaggccctggacacagtggagaacctgatgaaggtgactggaccaccccagggcgtgacagacagcatgcagtgcttcaatgaccagaggcccctgagcaacaccaggagcagcgagcacatcaaggaggtgatggtggagctgggcaagtttgagaggaaggagttcaagagcagcagcctgcaggacggccacaccaagatggaggaggcccccacccacctgaacagcttcctgaagaaggagggcctgaccttcaacaggaagaggaagtgggagctggacagctaccccatcatgctgtggtggagccccctgactggagagaccggccgcctgggccagtgtggggctgatgcctgcttcttcaccatcaacagaacctacctgcaccaccacatgaccaaggccttcctgttctatggaacagacttcaacatcgacagcctgcccctgcccaggaaggcccaccacgactgggccgtgttccacgaggagagccccaagaacaactacaagctgttccacaagcctgtgatcaccctcttcaactacacagccaccttcagccgccacagccacctgcccctgaccacccagtacctggagagcattgaggtgctgaagagcctgcgctacctggtgcccctgcagagcaagaacaagctgaggaagaggctggcccccctggtgtatgtgcagagcgactgtgaccccccaagtgaccgggacagctatgtgcgggagctgatgacctacatcgaggtggacagctatggagaatgtctgaggaacaaggacctgccccagcagctgaagaacccagcctccatggatgctgatggcttctaccgcatcatcgcccagtacaagttcatcctggcctttgaaaatgctgtgtgtgatgactacatcacagagaagttctggaggcccctgaagctgggcgtggtgcctgtgtactacggcagccccagcatcacagactggctgcccagcaacaagagcgccatcctggtgtctgagttcagccacccccgggagctggccagctacatccggcggctggacagtgatgaccggctgtatgaggcctacgtggagtggaagctgaagggggagatcagcaaccagaggctgctgacagccctgcgggagaggaagtggggcgtgcaggatgtgaaccaggacaactacattgatgcctttgagtgcatggtgtgcaccaaggtgtgggccaacatccggctgcaggagaagggcctgccccccaagcgctgggaggccgaggacacccacctgagctgcccagagcccaccgtgtttgccttcagccccctgcggaccccacccctgagcagcctgcgggagatgtggatcagcagctttgagcagagcaagaaggaggcccaggccctgcgctggctggtggacaggaaccagaacttcagcagccaggagttctggggcctggtgttcaaggactag

SEQ ID NO: 341683 - DNA, 1566 bp, Artificial Sequence
  derived and/or modified sequence
atggtgcggatccagcggcggaagctgctggccagctgcctgtgcgttaccgccactgtgttcctgctggtaacactgcaggccctggatacagtcgaaaatctcatgaaggtgacagggccaccacaaggtgtcactgactcaatgcaatgttttaatgatcagaggcctctatctaatactcgatcatccgaacacatcaaggaggtcatggtggaactagggaaattcgaacggaaagagttcaagagcagttcattgcaggacggtcatactaagatggaagaagccccaacccatctcaatagttttctgaaaaaggaggggctgacgttcaaccgtaaaaggaagtgggaactagattcttatccgatcatgttgtggtggtcacccctaacgggcgaaactggacgactagggcaatgtggcgctgatgcctgcttctttaccataaatcggacctacctgcaccatcacatgaccaaggcttttctgttctatgggacagattttaacatcgactctcttccgctgccacggaaggctcatcacgactgggctgtttttcatgaggagagccccaagaataattacaagctgttccacaagccagtaatcacgctgttcaattacacagcgaccttctctcggcatagtcatctgccgttgacgacccagtacctggagtcgatcgaagtactaaagagtctcaggtacttagtgcccctgcagagcaagaacaaattaagaaaacgcttagcgccattggtgtacgttcagtcagattgtgaccccccatccgaccgggattcgtacgtacgcgagttgatgacgtacatcgaagtggactcttatggggagtgcctcaggaacaaagacctccctcaacagctgaagaacccggccagcatggacgctgatggcttctaccggattattgctcagtataaattcattttggccttcgagaatgccgtgtgcgacgattacatcaccgaaaagttttggcgccctctgaaattaggagtggtccctgtttactatggtagcccaagcattactgattggctgccctctaacaaatctgcaatcctcgtgtccgaatttagccatccccgagagctagccagctatatccggagactggacagcgatgatcggctctacgaagcatacgtggaatggaagctaaagggagaaatttctaaccagaggttgctaacagccttgagggagcggaagtggggggtacaggatgtcaatcaggataattatatagacgctttcgagtgtatggtgtgtaccaaagtgtgggccaacattcgccttcaggaaaagggattgcccccaaaaagatgggaagccgaggatacgcatctttcttgccccgagccaactgttttcgccttcagccccctccgcaccccaccactgtcatcattacgcgagatgtggatctcctcattcgaacagtctaaaaaggaagcccaggcactgcgatggctggttgataggaaccaaaatttctcgagccaggaattctggggcctcgtgtttaaggattag

SEQ ID NO: 341684 - DNA, 1566 bp, Artificial Sequence
  derived and/or modified sequence
atggtgcgtatccagaggcggaaattactcgccagctgcctgtgtgttacagctaccgtgtttttgctagttacgcttcaggccttggatactgtagagaaccttatgaaagtaacaggaccacctcagggtgtaaccgactccatgcagtgtttcaatgatcaaaggcctctgtccaatactcggtccagtgagcacattaaggaagtgatggtggagcttgggaaattcgagcgtaaagaatttaaatctagttcactgcaggatggccacaccaaaatggaggaggccccaacacacctgaattcatttttgaagaaagaaggcctgaccttcaacaggaaaaggaaatgggagctggattcttaccctatcatgctctggtggtcccccttgaccggcgaaactggacgactcggacagtgtggcgcagacgcttgcttctttacaataaaccgaacatatctccaccatcatatgactaaggcatttcttttctacggcacagatttcaacatcgactctttacccctccccaggaaggctcatcacgattgggcagtctttcacgaagaatcacccaagaacaattacaagctcttccacaaaccagtgattaccctgttcaactatacagccactttttctcggcactctcaccttccgctaaccacacaatatcttgagagcatcgaggtgttgaaaagcctgaggtatctagttcctctccagagcaaaaacaaattgcggaagaggctggcgccactagtttacgtgcagtccgactgcgacccaccctcagatcgggactcctacgtgcgtgagttgatgacgtacatcgaggtagatagttatggtgaatgcctccgaaataaggatctcccacagcagttgaagaatcccgcttctatggacgctgacgggttttacaggatcattgcccagtacaaatttatccttgcatttgaaaacgcagtatgtgatgactacattaccgaaaagttctggaggcccctgaaactgggggtggtccccgtctattacggttcacctagtatcacagattggctcccatcgaacaaaagtgcaattctagtcagtgagttcagccatccgagggagctggcatcatacatacgcagacttgactctgacgaccggctctatgaagcatacgtcgagtggaagctcaaaggcgagatcagcaaccagcgactgctgacggctttgagagagcgcaagtggggggtacaagatgtcaaccaggacaattatatcgatgcgtttgaatgtatggtatgtaccaaggtgtgggcgaatattcgcctccaggaaaaaggcctcccacccaagagatgggaggcggaggacacacacttatcctgccccgaacccacagtgtttgctttctctcctttgagaactccaccactctcctccctccgtgagatgtggataagtagcttcgaacagagcaaaaaagaggcacaggctctcaggtggctggtcgacaggaaccagaacttctccagccaggaattctgggggctcgtatttaaagattag

SEQ ID NO: 341685 - protein, 357 aa, Artificial Sequence
  derived and/or modified sequence
MGIGQLPHYALVVPADGGDWEVRPMWSRCLFLHHQPDLPPSSHDQSIPLLWSQEESPPLAENDGTDFNIDSLPLPRKAHHDWAVFHEESPKNNYKLFHKPVITLFNYTATFSRHSHLPLTTQYLESIEVLKSLRYLVPLQSKNKLRKRLAPLVYVQSDCDPPSDRDSYVRELMTYIEVDSYGECLRNKDLPQQLKNPASMDADGFYRIIAQYKFILAFENAVCDDYITEKFWRPLKLGVVPVYYGSPSITDWLPSNKSAILVSEFSHPRELASYIRRLDSDDRLYEAYVEWKLKGEISNQRLLTALRERKWGVQDVNQDNYIDAFECMVCTKVWANIRLQEKVSKSKVGIEPAGWPS

SEQ ID NO: 341686 - protein, 251 aa, Artificial Sequence
  derived and/or modified sequence
MEQFPCAFEFNERFLIHIQHHIYSCQFGNFLCNSQKERRELKIQERTYSLWAHLWKNRADYLNPLFRADHSQTQGTLHLPTTPCNFMYKFWSGMYNRFEKGMQPRQSVTDYLMAVKEETQQLEEELEALEERLEKIQKVQLNCTKVKSKQSEPSKHSGFSTSDNSIANTPQDYSGNMKSFPSRSPSQGDEDSALILTQDNLKSSDPDLSANSDQESGVEDLSCRSPSGGEHAPSEDSGKDRDSDEAVFLTA

SEQ ID NO: 341687 - DNA, 756 bp, Artificial Sequence
  derived and/or modified sequence
atggagcagtttccatgtgcattcgagttcaacgagaggttcttgatccacatccagcatcacatctacagctgtcaattcggaaacttcttgtgcaattcccagaaggagaggcgtgagcttaagatccaggagcgaacttacagtttgtgggcccatctgtggaagaatcgtgcagactatctgaatcctctgttcagggctgaccatagccaaacacagggaactctgcacttacccactaccccctgcaactttatgtacaaattctggtctggcatgtataaccggttcgagaaaggcatgcagccccgtcagtcagttacagactacttaatggcagtcaaggaagaaacccagcagctcgaggaggagctcgaagccctggaagaacgactcgagaagattcaaaaggtccaactgaactgcaccaaggtcaagagcaaacaatcggagccctccaagcactctggtttctccacatctgacaatagtattgctaacactcctcaagattacagcggcaacatgaaatctttccctagtaggtctccttcccagggcgacgaggactccgccttgattctgacccaagataatcttaaatccagcgaccctgacttaagcgcaaattccgaccaagaatccggcgtcgaggacctaagttgcagatctccctctggtggagaacacgcaccgtcagaagacagcggtaaggatcgggactctgatgaggcagtttttctgacagcttag

SEQ ID NO: 341688 - DNA, 756 bp, Artificial Sequence
  derived and/or modified sequence
atggagcagttcccctgtgcctttgagttcaatgaacgcttcctgatccacatccagcaccacatctacagctgccagtttggaaacttcctgtgcaacagccagaaggagcggcgggagctgaagatccaggagaggacctacagcctgtgggcccacctgtggaagaacagagctgactacctgaaccccctcttccgggctgaccacagccagacccagggcaccctgcacctgcccaccaccccctgcaacttcatgtacaagttctggagcggcatgtacaacagatttgagaagggcatgcagccccggcagagcgtgacagactacctgatggctgtgaaggaggagacccagcagctggaggaggagctggaggccctggaggagcggctggagaagatccagaaggtgcagctgaactgcaccaaggtgaagagcaagcagagcgagcccagcaagcacagcggcttcagcaccagtgacaacagcatcgccaacaccccccaggactacagcggcaacatgaagagcttccccagccgcagccccagccagggagatgaggacagcgccctgatcctgacccaggacaacctgaagagcagtgaccctgacctgagcgccaacagcgaccaggagagcggcgtggaggacctgagctgccgcagccccagcggcggggagcacgcccccagtgaagattctgggaaggaccgggacagtgatgaggccgtgttcctgacagcctag

SEQ ID NO: 341689 - DNA, 1455 bp, Artificial Sequence
  derived and/or modified sequence
attctttgtgactctttgcggatcgtgtgttttctaggcagtgtcagaggaaggggcaagtgtgcttgttcactgttctgatggctgggacaggaccgctcaggtgtgctcggtggcaagcctgctgctggaccctcactaccggactctgaagggcttcatgatatggcaatctagatggtgacccaaaagaaatctctccagttattgaccagttcattgagtgtgtttggcagttaatggaacaatttccctgtgcctttgagttcaatgagaggtttttgattcacattcaacatcacatttattcctgccagtttggaaacttcctatgtaacagccaaaaggagagacgagaactcaagattcaagaaagaacatactcattatgggctcacctgtggaagaatcgggccgactacctgaatcctctgtttagagctgatcacagccagactcagggaacccttcatctccctacaacaccatgtaacttcatgtacaagttttggagtggaatgtataaccgctttgaaaaggggatgcagccccgacagtcagttacagattacctaatggcagtgaaggaagaaactcagcagctagaggaagaactagaggccctggaagaaaggctggaaaaaattcaaaaggtccagttaaattgcactaaggtgaagagtaagcaaagtgagcccagcaagcactcagggttttctacctcagacaacagcatagccaacactccccaggattacagtgggaatatgaaatcatttccatcccggagcccttcacaaggcgatgaagattctgctctgattctaacccaagacaatctgaaaagttcagatccagatctgtcagccaacagtgaccaagagtccggggtggaggatttgagctgtcggtctccaagtggtggtgagcatgcaccgagtgaagatagtggcaaggaccgggattctgatgaagccgtgtttctcactgcctgaagtttccctttggagttccaaagtaaaggacacataagcaacacttccaaaaacaagggaacaaggtggtttattgtaaaaacaggaaatggtgcatgtcattgagaactactttaatgcagctatgaaaagggaaaaaagtgcccagttcttgatttcttagatactgaagaggacgtagtcatttcatttatcaaatataaggaaaattattcaccattttgaagctcaccctagactatgaaaattatattcactgcagagcaattacttctgtcattacctgaagtgatcagtatctatcttccttgtcatagcatgcatctctcaaaaagcctccactcctttccctcacatctgtgatcatcatgattcttttagttcacttctagatgcatattttgtgttttctaaagcatctgacattatcctcctttccgaccctcttatacatatttct

SEQ ID NO: 341690 - DNA, 756 bp, Artificial Sequence
  derived and/or modified sequence
atggagcagttcccctgcgccttcgagttcaacgagcggttcctgatccatatccaacatcatatatattcttgtcagttcgggaatttcctgtgcaactcacagaaggaacgaagagaactcaaaattcaggagcgcacctattcattgtgggcgcatttatggaagaatagggcagactacctgaacccactctttagagccgaccattctcagacccaaggtacgttacacctgccgacaacaccgtgtaatttcatgtataaattttggagcggaatgtataaccgattcgagaagggtatgcagccacgacagagcgtgacagattacttgatggctgtgaaggaagagacccagcagctagaggaggagctggaagctctggaagagaggctggagaagattcagaaagtgcaactgaattgcaccaaggtcaagtctaagcagtctgagcccagtaaacactccgggtttagtacatcagacaacagtattgctaatactccccaggattattctggcaacatgaagagttttccatcccgttctcccagtcagggtgacgaggactctgctctgattctgactcaggacaacctgaaatccagcgaccctgatcttagcgccaactccgatcaggagtccggggtggaggatctgagctgtagaagcccatcaggtggtgaacacgccccgagtgaggatagcgggaaggacagagacagcgacgaagccgtctttttgaccgcctag

SEQ ID NO: 341691 - DNA, 756 bp, Artificial Sequence
  derived and/or modified sequence
atggagcaattcccttgtgcttttgaattcaacgagagattcctgatccatatccagcaccatatctattcttgtcagttcggtaacttcctttgtaactcccagaaggaacggagagaacttaaaattcaggagcggacctattcactttgggcccatctttggaagaaccgggctgattacttgaacccactgtttcgcgcagaccattctcagactcaaggcaccctccatctgccaaccacgccttgtaacttcatgtacaagttctggtccggcatgtataatcgctttgaaaagggcatgcagcccagacaatcagtcaccgactatctgatggcggtgaaagaagaaactcagcagcttgaggaggagctcgaggccctcgaagagaggctggaaaagattcagaaggtccagctgaactgcaccaaggtaaagtccaagcaaagtgagcccagcaagcattcagggtttagcacaagcgataatagcattgctaataccccgcaggattactcaggcaatatgaagtcctttccctctagatcgccatcgcaaggagacgaagatagcgccctgattctgactcaggataacctgaaatctagcgacccggatctctcagctaattcagaccaggagtccggcgtggaagatctgtcctgccgctctcccagcggtggggagcacgcccctagcgaggactctggtaaggaccgcgactcagacgaggcagttttcttaaccgcctag

SEQ ID NO: 341692 - DNA, 756 bp, Artificial Sequence
  derived and/or modified sequence
atggagcagttcccctgcgccttcgagttcaacgagagattcctgatccacatccagcaccacatctacagctgccagttcggcaacttcctgtgcaacagccagaaggagagaagagagctgaagatccaggagagaacctacagcctgtgggcccacctgtggaagaacagagccgactacctgaaccccctgttcagagccgaccacagccagacccagggcaccctgcacctgcccaccaccccctgcaacttcatgtacaagttctggagcggcatgtacaacagattcgagaagggcatgcagcccagacagagcgtgaccgactacctgatggccgtgaaggaggagacccagcagctggaggaggagctggaggccctggaggagagactggagaagatccagaaggtgcagctgaactgcaccaaggtgaagagcaagcagagcgagcccagcaagcacagcggcttcagcaccagcgacaacagcatcgccaacaccccccaggactacagcggcaacatgaagagcttccccagcagaagccccagccagggcgacgaggacagcgccctgatcctgacccaggacaacctgaagagcagcgaccccgacctgagcgccaacagcgaccaggagagcggcgtggaggacctgagctgcagaagccccagcggcggcgagcacgcccccagcgaggacagcggcaaggacagagacagcgacgaggccgtgttcctgaccgcctag

SEQ ID NO: 341693 - DNA, 1635 bp, Artificial Sequence
  derived and/or modified sequence
atgcaatggactaaggtgttggggctcggcctcggcgccgcggctcttctggggctaggtattatcctgggccattttgcgattcccaaaaaggccaattctttagcacctcaggatctggacttggagatcctggaaactgtgatgggtcagttagacgcgcatcgcattagggagaacctccgtgagctgagcagagagcctcacctagctagttccccccgcgacgaggaccttgtgcagctactgctgcagcgctggaaggatcctgaatccggtttagattcggccgaagcatctacttacgaagtgttgctctcttttccgagccaagaacagcctaatgtggtcgatattgttggaccaactggcggcataattcactcatgccacagaacggaagaaaatgtcaccggggaacaggggggacctgatgttgttcagccatacgcagcatacgcgccttctgggacccctcagggattgctagtctacgctaaccggggagccgaagaggactttaaggaactccaaacccaggggattaaactggagggaactattgccctcacccggtacggaggtgttggcaggggagctaaagctgttaacgccgccaagcatggtgtggccggggtgctggtttacacagatcctgctgatattaacgatggactaagctccccagatgaaacattcccaaattcctggtacctgcctccctccggagtggaaagaggatcttactacgagtatttcggagaccccctcaccccttatttacccgcggtgccatcttcttttcgggttgatctggctaatgtgtctggattccctcctattccaacgcagccaatcggctttcaggacgcacgcgacctgctgtgcaacttaaatggtaccttggctcctgccacctggcaaggagcgttagggtgtcactaccgccttggcccaggcttccgtcccgatggcgactttccagccgactcccaggttaacgttagtgtgtacaaccggcttgagctccggaatagttccaatgttctgggtatcatccgcggagccgtcgaacctgaccggtacgtgctatatggcaaccatagagattcctgggttcacggagcggtggatccctcatccggtacagcggtcctgctagagttgtcccgggtgctaggaaccctgctcaagaaggggacctggaggccaagaagatcaattgtgtttgcttcctggggcgctgaggaattcggactgattggaagcacagagttcaccgaggagttcttcaacaaactccaggagaggaccgtggcatacatcaatgtcgacatttctgtgtttgccaacgcgacactcagagtccaaggcactccgccagttcagagcgtggtcttcagcgcgacaaaggagatcagatcacccggaccgggggacttgagtatctacgacaactggatccgctattttaataggtcatccccagtgtatggactggtgccaagagcccggctgcagcccggcagtacaccaccaacaacacagccactgacgccgctcacaatgtggacatctttctggacacgggcttctgcagctattcgcctgtggcctggccagcggggagtctag

SEQ ID NO: 341694 - DNA, 1635 bp, Artificial Sequence
  derived and/or modified sequence
atgcagtggaccaaggtgctgggcctgggcctgggcgccgccgccctgctgggcctgggcatcatcctgggccactttgccatccccaagaaggccaacagcctggccccccaggacctggacctggagatcctggagaccgtgatgggccagctggatgcccaccgcatccgggagaacctgcgggagctgagccgggagccccacctggccagcagccccagagatgaggacctggtgcagctgctgctgcagcgctggaaggaccctgagagcggcctggacagcgctgaggccagcacctatgaggtgctgctgtccttccccagccaggagcagcccaacgtggtggacatcgtgggccccactggaggcatcatccacagctgccacaggacagaagaaaatgtgactggagagcagggcggcccagatgtggtgcagccctatgctgcctatgcccccagcggcaccccccagggcctgctggtgtatgccaacagaggagctgaggaggacttcaaggagctgcagacccagggcatcaagctggagggcaccatcgccctgaccaggtatggaggagtgggccgcggggccaaggctgtgaatgctgccaagcacggcgtggccggcgtgctggtgtacacagatcctgctgacatcaatgatggcctgagcagcccagatgagaccttccccaacagctggtacctgccccccagcggcgtggagcggggcagctactatgagtactttggagaccccctgaccccctacctgcctgctgtgcccagcagcttccgggtggacctggccaacgtgtctggcttcccccccatccccacccagcccatcggcttccaggatgcccgggacctgctgtgcaacctgaatggcaccctggccccagccacctggcagggcgccctgggctgccactaccgcctgggccctggcttccggccagatggagacttccctgctgacagccaggtgaatgtgtctgtgtacaaccggctggagctgaggaacagcagcaatgtgctgggcatcatcagaggagctgtggagccagaccgctacgtgctgtatggcaaccaccgggacagctgggtgcacggggctgtggaccccagcagcggcacagctgtgctgctggagctgagccgggtgctgggcaccctgctgaagaagggcacctggaggcccaggaggagcatcgtgtttgcctcctggggcgctgaggagtttggcctgattggcagcacagagttcacagaggagttcttcaacaagctgcaggagaggacagtggcctacatcaacgtggacatctctgtgtttgccaatgccaccctgcgggtgcagggcaccccacctgtgcagagcgtggtgttcagcgccaccaaggagatccgcagccctggccctggggacctgagcatctatgacaactggatccgctacttcaacagaagcagccctgtgtatggcctggtgccccgggcccggctgcagcccggcagcaccccacccaccacccagcccctgacccccctgaccatgtggaccagcttctggacccgggccagcgctgccatccggctgtggccaggccagaggggcgtgtag

SEQ ID NO: 341695 - DNA, 2594 bp, Artificial Sequence
  derived and/or modified sequence
gccaagagtccgcaggatgcagtggacgaaggtgttggggctggggctgggggctgctgccctcttggggctggggatcatcctcggccactttgccatccccaaaaaagccaactcactggccccccaggacctggacctggagatcctggagaccgtcatggggcagctggatgcccacaggatccgggagaacctcagagaactctccagggagccacacctggcctccagccctcgggatgaggacctggtgcagctgctgctgcagcgctggaaggacccagagtcaggcctggactcggccgaggcctccacgtacgaagtgctgctgtccttccctagccaggagcagcccaacgtcgtggacatcgtgggccccactgggggcatcatccactcctgccaccggactgaggagaacgtgaccggggagcaaggggggccagatgtggtacaaccctatgctgcctatgctccttctggaaccccacagggcctcctcgtctatgccaaccggggcgcggaagaagactttaaggagctacagactcagggcatcaaacttgaaggcaccattgccctgactcgatatgggggtgtagggcgtggggccaaggctgtgaacgctgccaagcacggggtagctggggtgctggtgtacacagaccctgccgacatcaacgatgggctgagctcacccgacgaaacctttcccaactcctggtacctgcccccctcaggagtggagcgaggctcctactacgagtattttggggaccctctgactccctaccttccagccgtcccctcttccttccgcgtggaccttgccaatgtctccggatttcccccaattcctacacagcccattggcttccaggatgcaagagacctgctctgtaacctcaacggaactttggccccagccacctggcagggagcactgggctgccactacaggttgggtcccggcttccggcctgacggagacttcccagcagacagccaggtgaatgtgagcgtctacaaccgcctggagctgaggaactcttccaacgtcctgggcatcatccgtggggctgtggagcctgatcgctacgtgctgtatgggaaccaccgagacagctgggtgcacggggctgtggaccccagcagtggcaccgccgtcctcctggagctctcccgtgtcctggggaccctgctgaagaagggcacctggcgtcctcgcagatcaatcgtgtttgcgagctggggggctgaggagtttgggctcattggctccacggaattcacagaagagttcttcaacaagctgcaggagcgcacggtggcctacatcaacgtggacatctcggtgtttgccaacgctacccttagggtgcaggggacgccccctgtccagagcgtcgtcttctctgcaaccaaagagatccgctcaccaggccctggcgacctgagcatctacgacaactggatccggtacttcaaccgcagcagcccggtgtacggcctggtccccagagcaagacttcagccaggatctaccccacctaccacacagcctttgacacctttgactatgtggacaagtttttggacccgggcttcagcagccatcaggctgtggcccggacagcggggagtgtgattctccggctcagtgacagcttcttcctgcccctcaaagtcagtgactacagtgagacactccgcagcttcctgcaggcagcccagcaagatcttggggccctgctggagcagcacagcatcagcctggggcctctggtgactgcagtggagaagtttgaggcagaagctgcagccttgggccaacgcatatcaacactgcagaagggcagccctgaccccctgcaggtccggatgctcaatgaccagttgatgctcttggaacggacctttctgaaccctagagccttcccagaggaacgctactacagccatgtgctctgggcacctcgcacgggctccgtagtcacattcccgggcctatccaatgcctgctccagggccagggacacagcttctggatctgaagcttgggctgaggtccagagacagctcagcattgtggtgacagccctggagggtgcggcagccaccctgaggcctgtggctgacctctgaccccagccctctttcttcagccctccctttactccaaccctctcctgcctgctttcctgagatgtcctggtcttccttggtgccagaagagggcactaccacaggaccctctcaagcttctcaggcaacagcttgaggtccctgaggggagtggcaagccctaatgcaactcaccctcatcctggtgcttaggtggcagagggtgggcagcaggggacagggatgggatggcaaaaccaccaactgcccttggtggcaggtgggtggagatgggatgcgtgccaacctcagatgccaactcaggtcatcaaggccaaggaccagtggcgaaagtgagtcttggggtaccttaggccttggctagtctgcgttcctctccctgcatgctgtgtatcctaactccctacaacagcccctcaaataaatcacatctagtgactggtacc

SEQ ID NO: 341696 - DNA, 1635 bp, Artificial Sequence
  derived and/or modified sequence
atgcagtggaccaaggtgctgggcctgggcctgggcgccgccgccctgctggggctgggtataatcctgggacactttgcgatcccaaagaaagctaacagcctggcacctcaagacttagacctggaaattctggagactgtcatggggcagctggatgcgcaccgtattagagaaaatctgagggaactgagccgggagccccatctggccagcagtccccgggacgaagacctcgtgcagctcctgttgcaaaggtggaaagacccagaatcaggactggactctgctgaggcatctacttacgaggtgttactgagctttccctcccaggaacagccaaatgttgtagatatcgtcggccccactggtgggatcatccatagttgccacaggacagaggagaacgtaacaggcgaacaggggggtcccgatgtggtccagccttacgcggcgtacgcccccagcgggaccccgcaagggctgctggtttacgcgaatcggggcgccgaagaagacttcaaggagttgcagacacaggggattaagctggagggcacgatagccctgaccagatacggaggcgtgggccgaggagctaaggcagtcaatgctgcaaaacacggggtggccggggtcctcgtgtacaccgacccagcagatattaacgacggattgtcttcacctgatgaaacattcccaaatagctggtacctgccaccatcaggcgtagaacgcggcagctactatgagtattttggggacccactcacaccttacctgcccgcggtgccttcatcattccgggtggatttagcaaatgtcagtggcttccctccaattcccacccaacctattggattccaggatgcccgtgacctgctgtgcaatttaaatggcaccctggcccccgcaacttggcagggagccctcggatgtcattacaggttggggcctggcttccgacccgatggagacttccccgcggacagccaagtgaacgtgagcgtgtataaccgcctagagctaaggaacagctccaatgtgctcggtatcattcggggcgctgtagaacccgaccgttacgtcctctacgggaatcacagagattcatgggtgcatggcgctgtggaccccagcagtgggaccgccgtgctgctggagctcagccgcgttcttggaaccttacttaaaaagggaacttggcgccctaggcgcagcatcgttttcgcatcctggggggccgaggagtttgggctgataggctccacggaatttactgaagagttcttcaacaagctgcaagagcggactgtcgcttatatcaacgtagatatttctgtgtttgctaacgctactctgcgtgtacagggcacaccaccagtccagtcagtggttttctccgcgacaaaggagattcgtagccccggccccggggacctgtctatttatgacaactggattcgatattttaacagatccagccccgtgtatgggctggtgcctcgtgctaggctgcagcctggtagcactccaccgaccacccagcccctgaccccgcttactatgtggaccagtttctggaccagagcctctgccgccattcggttatggccgggacagaggggtgtatag

SEQ ID NO: 341697 - DNA, 1635 bp, Artificial Sequence
  derived and/or modified sequence
atgcagtggacgaaagttttaggacttggcttgggagccgctgcccttctggggctgggcattatcctcggacatttcgccattcctaagaaagcaaactccctggcccctcaagatctggacctggagattctggaaaccgtcatgggacagttggacgcccaccggataagggaaaatttgcgagaactgtctcgggagcctcacttagcaagttcgcccagggacgaggatctcgtgcagttattactccagagatggaaagaccctgaatctggactggactcagccgaggcatccacatatgaggttctgctctcttttccgtcgcaggaacaaccaaatgtggtagacatcgtaggtccgaccggaggaatcattcatagttgccaccggaccgaggagaatgttaccggcgagcagggcggacctgatgtggtccaaccctatgccgcttacgcccctagcgggactccgcaggggctgctggtgtacgcaaacaggggagcggaggaggacttcaaggagctccagacccaggggataaagctggagggcaccatcgctctgactaggtatggcggagtcgggaggggcgctaaagccgttaacgcagcaaaacacggggtggccggagtgctcgtgtatacggaccccgctgatatcaatgatggtctgtcttcacccgatgaaacgtttccgaatagctggtatttacctccttctggtgtcgaaagaggatcttattacgagtacttcggcgatccactaacgccataccttcccgctgttccatcaagtttccgagtcgacctagccaacgtctcagggttccctcctatccctacccagcctatcggctttcaagatgctcgagacctgctgtgcaatctgaacggaaccctggccccagccacctggcagggcgctctggggtgccactatcgcctgggcccaggtttccggccagatggtgattttccagctgattcacaggtgaatgtcagtgtgtacaaccgtctggagctgcgcaactccagtaatgtacttggcataattaggggggctgtagagcctgatcgctacgtactatacggcaaccaccgggattcttgggtgcatggcgctgttgatccttcaagcggcaccgcggtgctcctggagctgagtcgggtgttgggaaccctgctgaaaaaaggcacctggcgaccccgaaggtcaatcgtgttcgcttcatggggtgccgaagaattcggattgattgggagcacggagtttactgaagagttttttaacaagctccaggagagaactgtggcatacatcaatgtggatatctcagtgttcgccaatgcaactttgagggtccagggaacaccccctgtgcagtcagtggtcttttccgcaacaaaagagattcggtcccccggaccgggagatctttctatttacgacaactggatcagatattttaataggtcatcgccggtgtatgggctggttccacgggcaagattgcagccgggaagtacccctccaacaacgcagcccctgacccctctaaccatgtggacttctttctggaccagggcctccgctgccattaggttgtggcctggccaaagaggggtgtag

SEQ ID NO: 341698 - DNA, 1635 bp, Artificial Sequence
  derived and/or modified sequence
atgcagtggaccaaggtgctgggcctgggcctgggcgccgccgccctgctgggcctgggcatcatcctgggccacttcgccatccccaagaaggccaacagcctggccccccaggacctggacctggagatcctggagaccgtgatgggccagctggacgcccacagaatcagagagaacctgagagagctgagcagagagccccacctggccagcagccccagagacgaggacctggtgcagctgctgctgcagagatggaaggaccccgagagcggcctggacagcgccgaggccagcacctacgaggtgctgctgagcttccccagccaggagcagcccaacgtggtggacatcgtgggccccaccggcggcatcatccacagctgccacagaaccgaggagaacgtgaccggcgagcagggcggccccgacgtggtgcagccctacgccgcctacgcccccagcggcaccccccagggcctgctggtgtacgccaacagaggcgccgaggaggacttcaaggagctgcagacccagggcatcaagctggagggcaccatcgccctgaccagatacggcggcgtgggcagaggcgccaaggccgtgaacgccgccaagcacggcgtggccggcgtgctggtgtacaccgaccccgccgacatcaacgacggcctgagcagccccgacgagaccttccccaacagctggtacctgccccccagcggcgtggagagaggcagctactacgagtacttcggcgaccccctgaccccctacctgcccgccgtgcccagcagcttcagagtggacctggccaacgtgagcggcttcccccccatccccacccagcccatcggcttccaggacgccagagacctgctgtgcaacctgaacggcaccctggcccccgccacctggcagggcgccctgggctgccactacagactgggccccggcttcagacccgacggcgacttccccgccgacagccaggtgaacgtgagcgtgtacaacagactggagctgagaaacagcagcaacgtgctgggcatcatcagaggcgccgtggagcccgacagatacgtgctgtacggcaaccacagagacagctgggtgcacggcgccgtggaccccagcagcggcaccgccgtgctgctggagctgagcagagtgctgggcaccctgctgaagaagggcacctggagacccagaagaagcatcgtgttcgccagctggggcgccgaggagttcggcctgatcggcagcaccgagttcaccgaggagttcttcaacaagctgcaggagagaaccgtggcctacatcaacgtggacatcagcgtgttcgccaacgccaccctgagagtgcagggcaccccccccgtgcagagcgtggtgttcagcgccaccaaggagatcagaagccccggccccggcgacctgagcatctacgacaactggatcagatacttcaacagaagcagccccgtgtacggcctggtgcccagagccagactgcagcccggcagcaccccccccaccacccagcccctgacccccctgaccatgtggaccagcttctggaccagagccagcgccgccatcagactgtggcccggccagagaggcgtgtag

SEQ ID NO: 341699 - protein, 522 aa, Artificial Sequence
  derived and/or modified sequence
MQWTKVLGLGLGAAALLGLGIILGHFAIPKKANSLAPQDLDLEILETVMGQLDAHRIRENLRELSREPHLASSPRDEDLVQLLLQRWKDPESGLDSAEASTYEVLLSFPSQEQPNVVDIVGPTGGIIHSCHRTEENVTGEQGGPDVVQPYAAYAPSGTPQGLLVYANRGAEEDFKELQTQGIKLEGTIALTRYGGVGRGAKAVNAAKHGVAGVLVYTDPADINDGLSSPDETFPNSWYLPPSGVERGSYYEYFGDPLTPYLPAVPSSFRVDLANVSGFPPIPTQPIGFQDARDLLCNLNGTLAPATWQGALGCHYRLGPGFRPDGDFPADSQVNVSVYNRLELRNSSNVLGIIRGAVEPDRYVLYGNHRDSWVHGAVDPSSGTAVLLELSRVLGTLLKKGTWRPRRSIVFASWGAEEFGLIGSTEFTEEFFNKLQERTVAYINVDISVFANATLRVQGTPPVQSVVFSATKEIRSPGPGDLSIYDNWIRYFNRSSPVYGLVPRLQQPSGCGPDSGECDSPAQ

SEQ ID NO: 341700 - DNA, 1569 bp, Artificial Sequence
  derived and/or modified sequence
atgcagtggacaaaggtcttgggcctcggcctgggagccgcagcccttctcggactagggataatcctcgggcattttgctataccaaaaaaagctaattcattggcgccccaggaccttgatctggagattctggagacagtaatgggtcaattggacgctcatcggatcagggagaacctgcgtgagctgtcccgggagcctcacttggcttcatcgccaagggacgaagaccttgttcaactgctgctgcagcgttggaaagatcctgagtccggtctggactctgccgaggctagcacatatgaggttctgttgtcatttccaagccaagaacagcctaacgtggtcgatatcgtcggacctacgggtggcattatccattcatgccatcgcactgaagagaacgtaaccggcgaacaggggggcccagacgttgtacaaccctatgccgcctacgccccctcagggaccccacaaggattgcttgtctacgccaaccgtggagcagaagaagacttcaaggaattgcagacccagggtatcaagctcgaggggactatcgccctcactcgatacggaggggtcggcagaggcgctaaggccgtgaacgcggccaaacacggagtcgccggagttttagtatataccgaccctgctgacatcaatgacggccttagctcaccggacgagacttttcctaactcctggtacttgccacctagtggagtcgagaggggcagctactatgaatattttggcgaccccttaacaccctacctccctgccgttcccagcagcttccgggtagacctagcgaatgtaagcggattccccccaatccctacccagcccatcgggttccaagacgccagagatctcctatgtaatctgaatggcacgctggcccctgccacttggcagggtgccctcggttgccactaccggctcgggccagggttcagacccgatggcgattttcctgctgactcacaggtaaacgtgagtgtctacaaccgcctggagttgaggaacagtagcaacgtactgggaatcatccgcggagctgtagaaccggaccgatatgttctttacggcaaccacagagactcatgggtgcatggcgccgtggatccgtccagcggcaccgccgtactcctcgaactgtctcgggtgctcggcacattactgaagaagggtacttggcgcccacggcgctctattgtgtttgccagttggggggccgaagaatttgggctgataggctctacagagtttactgaggaattctttaacaaacttcaagaacgcaccgttgcctacatcaatgtcgatatctcagtgttcgccaacgccacactgagagtgcaaggtactcccccagtccagtccgtggtcttcagcgcaactaaagagattcgaagtcctgggcctggagatctctctatatatgacaactggatccggtactttaaccggagctctccggtctacggcttagtgccaagactgcagcagccttcaggttgcgggccagactcaggcgagtgtgattcgccagctcagtag

SEQ ID NO: 341701 - DNA, 1569 bp, Artificial Sequence
  derived and/or modified sequence
atgcagtggaccaaggtgctgggcctgggcctgggcgccgccgccctgctgggcctgggcatcatcctgggccactttgccatccccaagaaggccaacagcctggccccccaggacctggacctggagatcctggagaccgtgatgggccagctggatgcccaccgcatccgggagaacctgcgggagctgagccgggagccccacctggccagcagccccagagatgaggacctggtgcagctgctgctgcagcgctggaaggaccctgagagcggcctggacagcgctgaggccagcacctatgaggtgctgctgtccttccccagccaggagcagcccaacgtggtggacatcgtgggccccactggaggcatcatccacagctgccacaggacagaagaaaatgtgactggagagcagggcggcccagatgtggtgcagccctatgctgcctatgcccccagcggcaccccccagggcctgctggtgtatgccaacagaggagctgaggaggacttcaaggagctgcagacccagggcatcaagctggagggcaccatcgccctgaccaggtatggaggagtgggccgcggggccaaggctgtgaatgctgccaagcacggcgtggccggcgtgctggtgtacacagatcctgctgacatcaatgatggcctgagcagcccagatgagaccttccccaacagctggtacctgccccccagcggcgtggagcggggcagctactatgagtactttggagaccccctgaccccctacctgcctgctgtgcccagcagcttccgggtggacctggccaacgtgtctggcttcccccccatccccacccagcccatcggcttccaggatgcccgggacctgctgtgcaacctgaatggcaccctggccccagccacctggcagggcgccctgggctgccactaccgcctgggccctggcttccggccagatggagacttccctgctgacagccaggtgaatgtgtctgtgtacaaccggctggagctgaggaacagcagcaatgtgctgggcatcatcagaggagctgtggagccagaccgctacgtgctgtatggcaaccaccgggacagctgggtgcacggggctgtggaccccagcagcggcacagctgtgctgctggagctgagccgggtgctgggcaccctgctgaagaagggcacctggaggcccaggaggagcatcgtgtttgcctcctggggcgctgaggagtttggcctgattggcagcacagagttcacagaggagttcttcaacaagctgcaggagaggacagtggcctacatcaacgtggacatctctgtgtttgccaatgccaccctgcgggtgcagggcaccccacctgtgcagagcgtggtgttcagcgccaccaaggagatccgcagccctggccctggggacctgagcatctatgacaactggatccgctacttcaacagaagcagccctgtgtatggcctggtgccccggctgcagcagcccagcggctgcggccctgacagcggggagtgtgacagccctgcccagtag

SEQ ID NO: 341702 - DNA, 2512 bp, Artificial Sequence
  derived and/or modified sequence
gccaagagtccgcaggatgcagtggacgaaggtgttggggctggggctgggggctgctgccctcttggggctggggatcatcctcggccactttgccatccccaaaaaagccaactcactggccccccaggacctggacctggagatcctggagaccgtcatggggcagctggatgcccacaggatccgggagaacctcagagaactctccagggagccacacctggcctccagccctcgggatgaggacctggtgcagctgctgctgcagcgctggaaggacccagagtcaggcctggactcggccgaggcctccacgtacgaagtgctgctgtccttccctagccaggagcagcccaacgtcgtggacatcgtgggccccactgggggcatcatccactcctgccaccggactgaggagaacgtgaccggggagcaaggggggccagatgtggtacaaccctatgctgcctatgctccttctggaaccccacagggcctcctcgtctatgccaaccggggcgcggaagaagactttaaggagctacagactcagggcatcaaacttgaaggcaccattgccctgactcgatatgggggtgtagggcgtggggccaaggctgtgaacgctgccaagcacggggtagctggggtgctggtgtacacagaccctgccgacatcaacgatgggctgagctcacccgacgaaacctttcccaactcctggtacctgcccccctcaggagtggagcgaggctcctactacgagtattttggggaccctctgactccctaccttccagccgtcccctcttccttccgcgtggaccttgccaatgtctccggatttcccccaattcctacacagcccattggcttccaggatgcaagagacctgctctgtaacctcaacggaactttggccccagccacctggcagggagcactgggctgccactacaggttgggtcccggcttccggcctgacggagacttcccagcagacagccaggtgaatgtgagcgtctacaaccgcctggagctgaggaactcttccaacgtcctgggcatcatccgtggggctgtggagcctgatcgctacgtgctgtatgggaaccaccgagacagctgggtgcacggggctgtggaccccagcagtggcaccgccgtcctcctggagctctcccgtgtcctggggaccctgctgaagaagggcacctggcgtcctcgcagatcaatcgtgtttgcgagctggggggctgaggagtttgggctcattggctccacggaattcacagaagagttcttcaacaagctgcaggagcgcacggtggcctacatcaacgtggacatctcggtgtttgccaacgctacccttagggtgcaggggacgccccctgtccagagcgtcgtcttctctgcaaccaaagagatccgctcaccaggccctggcgacctgagcatctacgacaactggatccggtacttcaaccgcagcagcccggtgtacggcctggtccccaggcttcagcagccatcaggctgtggcccggacagcggggagtgtgattctccggctcagtgacagcttcttcctgcccctcaaagtcagtgactacagtgagacactccgcagcttcctgcaggcagcccagcaagatcttggggccctgctggagcagcacagcatcagcctggggcctctggtgactgcagtggagaagtttgaggcagaagctgcagccttgggccaacgcatatcaacactgcagaagggcagccctgaccccctgcaggtccggatgctcaatgaccagttgatgctcttggaacggacctttctgaaccctagagccttcccagaggaacgctactacagccatgtgctctgggcacctcgcacgggctccgtagtcacattcccgggcctatccaatgcctgctccagggccagggacacagcttctggatctgaagcttgggctgaggtccagagacagctcagcattgtggtgacagccctggagggtgcggcagccaccctgaggcctgtggctgacctctgaccccagccctctttcttcagccctccctttactccaaccctctcctgcctgctttcctgagatgtcctggtcttccttggtgccagaagagggcactaccacaggaccctctcaagcttctcaggcaacagcttgaggtccctgaggggagtggcaagccctaatgcaactcaccctcatcctggtgcttaggtggcagagggtgggcagcaggggacagggatgggatggcaaaaccaccaactgcccttggtggcaggtgggtggagatgggatgcgtgccaacctcagatgccaactcaggtcatcaaggccaaggaccagtggcgaaagtgagtcttggggtaccttaggccttggctagtctgcgttcctctccctgcatgctgtgtatcctaactccctacaacagcccctcaaataaatcacatctagtgactggtacc

SEQ ID NO: 341703 - DNA, 1569 bp, Artificial Sequence
  derived and/or modified sequence
atgcagtggaccaaggtgctgggcctgggcctgggcgccgccgccctcttggggctgggcatcatccttggtcatttcgccatcccaaaaaaggccaactcactagcgcctcaggaccttgaccttgagattctggagaccgtaatgggccagttggacgcacatcggatccgagagaaccttagggaacttagcagggagccccacctcgcaagctcccccagggacgaggacctggtccaactattgctgcagcggtggaaggaccccgagtcaggcctggattctgccgaggcatccacctacgaggttttactgtcgttcccgtcccaggagcaacccaatgtggtcgatattgtgggtccaaccggcgggattattcactcttgccacagaactgaagaaaacgtcactggggagcaagggggacctgatgtcgtgcagccgtacgccgcctacgctccatccggaactccccagggcttgctcgtgtacgccaaccggggggcagaggaggacttcaaggagctccagacacaaggaataaagctagagggcactatcgctctgactaggtacgggggggttgggagaggcgctaaggctgttaatgctgccaaacatggagtggccggcgtgctggtgtacaccgacccagctgatataaacgacggcctcagctctcctgacgaaacatttccaaactcttggtatcttcccccgagtggagttgaacgaggttcctactacgaatacttcggtgaccctcttacgccttacctgcccgccgtgcccagctccttccgcgtcgatcttgccaatgtgagcgggttcccaccaatccccacacagccaatcggttttcaggacgctagagatctcctctgtaacctgaacggaacactcgcccccgcgacatggcagggggccctggggtgtcattataggctcgggcccgggttccgccctgacggagattttcccgcagatagccaagtcaacgtcagcgtgtacaataggctcgagctaagaaacagtagcaatgtgctgggcatcatccggggggcagtggaacccgacagatacgtgctttacggaaaccatcgagattcatgggtgcacggcgccgtggacccctctagtgggactgctgtcctcctcgagctgtcgcgcgtgctggggactttgttaaaaaaaggcacatggcgcccccgtcgtagcattgtgttcgcgagttggggagcagaggagtttgggctcatcgggagcacagagttcactgaagagttttttaataagctgcaggagaggactgtcgcctatataaacgtcgatattagcgtctttgccaatgcaaccctaagagtgcaaggaacccccccagtgcagtctgtggtatttagcgccaccaaggaaatcagatcaccaggccctggagacctgagcatttacgacaactggatcagatactttaaccgctcttcaccggtgtacggtttggtaccacggctccagcaaccatcgggttgcgggcccgacagcggggagtgcgacagccctgcccagtag

SEQ ID NO: 341704 - DNA, 1569 bp, Artificial Sequence
  derived and/or modified sequence
atgcagtggaccaaagttttggggttgggcctgggcgctgctgctctcctgggactgggtatcatcctgggacatttcgccattcctaagaaagctaatagccttgcaccccaagatttggacttagaaatcctagagactgtgatggggcaacttgatgctcataggatacgggagaatctgcgggaattgagccgagaaccccatctggcgagctctcccagagatgaggacctggtgcagcttctcctccagcgctggaaagatccagaaagcggcctggacagcgccgaggcatctacatacgaggtcctgctatcctttcccagtcaggagcagccgaacgttgtcgacatcgtgggacccaccggtggaataatccatagctgtcataggacagaggaaaatgttacaggagaacagggaggccctgacgtcgtccaaccatacgctgcctatgccccttcaggtacccctcaaggcctactggtgtatgcgaaccgaggtgcagaggaggactttaaggagcttcaaacccagggcatcaagctggaaggcactatcgcgcttactaggtacgggggagtaggccgaggagcaaaagctgtgaacgcagccaagcacggagttgccggagttctggtctacaccgatccagcagatattaacgacggtttgtctagccccgacgaaacctttcctaattcatggtatcttcctccgtcgggagtggaaaggggatcatattacgaatatttcggagatccccttaccccatatttgcccgctgttccatcttcatttcgcgtcgatctggctaatgtgagcggcttccctcctattccgactcagccaattggtttccaggatgccagggatttactgtgtaatctgaatgggaccttggcccctgctacctggcagggcgctctcggctgtcactatcggctcggcccagggttcagaccggatggcgatttccctgccgatagccaggttaatgtgagcgtttacaatcggctggagctaaggaattcaagcaacgttttaggcatcatccgaggcgctgttgaaccggatcggtatgttttatatggaaaccatagggatagctgggttcacggggcagttgaccccagctcagggaccgctgtccttcttgagctgtccagagtgctcgggacccttcttaagaaaggcacatggagaccgaggcgttccattgtgttcgcatcatggggagctgaggagtttggcctgatcgggtctaccgagttcacagaggagttttttaacaaactccaagagcgcacggtcgcgtatatcaacgttgacatttctgtttttgcgaacgccacacttcgcgttcaggggactccaccggttcagtccgtggtattcagcgccactaaggagatcaggtcgcctggaccgggtgatctctcaatctatgacaactggatccgctacttcaaccgatctagccctgtctatgggttggtgccccgtctgcagcagccaagcggatgtggacccgactctggcgaatgcgattcccctgcccagtag

SEQ ID NO: 341705 - DNA, 1569 bp, Artificial Sequence
  derived and/or modified sequence
atgcagtggaccaaggtgctgggcctgggcctgggcgccgccgccctgctgggcctgggcatcatcctgggccacttcgccatccccaagaaggccaacagcctggccccccaggacctggacctggagatcctggagaccgtgatgggccagctggacgcccacagaatcagagagaacctgagagagctgagcagagagccccacctggccagcagccccagagacgaggacctggtgcagctgctgctgcagagatggaaggaccccgagagcggcctggacagcgccgaggccagcacctacgaggtgctgctgagcttccccagccaggagcagcccaacgtggtggacatcgtgggccccaccggcggcatcatccacagctgccacagaaccgaggagaacgtgaccggcgagcagggcggccccgacgtggtgcagccctacgccgcctacgcccccagcggcaccccccagggcctgctggtgtacgccaacagaggcgccgaggaggacttcaaggagctgcagacccagggcatcaagctggagggcaccatcgccctgaccagatacggcggcgtgggcagaggcgccaaggccgtgaacgccgccaagcacggcgtggccggcgtgctggtgtacaccgaccccgccgacatcaacgacggcctgagcagccccgacgagaccttccccaacagctggtacctgccccccagcggcgtggagagaggcagctactacgagtacttcggcgaccccctgaccccctacctgcccgccgtgcccagcagcttcagagtggacctggccaacgtgagcggcttcccccccatccccacccagcccatcggcttccaggacgccagagacctgctgtgcaacctgaacggcaccctggcccccgccacctggcagggcgccctgggctgccactacagactgggccccggcttcagacccgacggcgacttccccgccgacagccaggtgaacgtgagcgtgtacaacagactggagctgagaaacagcagcaacgtgctgggcatcatcagaggcgccgtggagcccgacagatacgtgctgtacggcaaccacagagacagctgggtgcacggcgccgtggaccccagcagcggcaccgccgtgctgctggagctgagcagagtgctgggcaccctgctgaagaagggcacctggagacccagaagaagcatcgtgttcgccagctggggcgccgaggagttcggcctgatcggcagcaccgagttcaccgaggagttcttcaacaagctgcaggagagaaccgtggcctacatcaacgtggacatcagcgtgttcgccaacgccaccctgagagtgcagggcaccccccccgtgcagagcgtggtgttcagcgccaccaaggagatcagaagccccggccccggcgacctgagcatctacgacaactggatcagatacttcaacagaagcagccccgtgtacggcctggtgcccagactgcagcagcccagcggctgcggccccgacagcggcgagtgcgacagccccgcccagtag

SEQ ID NO: 341706 - protein, 103 aa, Artificial Sequence
  derived and/or modified sequence
METTNGTETWYESLHAVLKALNATLHSNLLCRPGPGLGPDNQTEERRASLPGRDDNSYMYILFVMFLFAVTVGSLILGYTRSRKVDKRSDPYHVYIKNRVSMI

SEQ ID NO: 341707 - protein, 12 aa, Artificial Sequence
  derived and/or modified sequence
METTNGTETWYE

SEQ ID NO: 341708 - protein, 99 aa, Artificial Sequence
  derived and/or modified sequence
METTNGTETWYESLHAVLKALNATLHSNLLCRPGPGLGPDNQTEERRASLPGRDDNSYMYILFVMFLFAVTVGSLILGYTRSRKVDKRSDPYHVYIKNR

SEQ ID NO: 341709 - DNA, 3070 bp, Artificial Sequence
  derived and/or modified sequence
gagcccagagccagagagcgcgctgggcggtgctgggcacccgcggagtggaacggggctggtggaatgcacagggtcgcagcgcttgggccaccctcggtcagagggcgccgtgtccagcgagcaaacgggcgccccggagccttgctgagaggcagctctgggctttcccagctccgaagtcaatactgagatcccagatgtgtccagagacatcctgaagaggctcgggggtggaggagccttagtgtgtccacaaagggactcctgaaactgactgagagccagtggatttgccagcagtctgagcttctaccgagtcttcccccacctcaatccctgttgctatggagactaccaatggaacggagacctggtatgagagcctgcatgccgtgctgaaggctctaaatgccactcttcacagcaatttgctctgccggccagggccagggctggggccagacaaccagactgaagagaggcgggccagcctacctggccgtgatgacaactcctacatgtacattctctttgtcatgtttctatttgctgtaactgtgggcagcctcatcctgggatacacccgctcccgcaaagtggacaagcgtagtgacccctatcatgtgtatatcaagaaccgtgtgtctatgatctaacacgagagggctgggacggtggaagaccaagacacctggggattgcgtctggggcctccagaactctgctgtggactgcatcaggtctcagtgtccctatctgtaagatcaacaagaaacacggttaagggaggtcgtcactggggtgggagaagaggggctggtagaccgaagccttgtgcataaggattttttcccaggaaaagatagactttataaacagtgggagcccatgaacaaacatataaaagtagcaacagataatgaccaataactggttcagtggctggagtattaggggcctggggattggagaacggagaagaagttgtagcagagggaaatgagacaggaagatgctctggggacacattttttatgtgttatcttcagccatgagaagcagtgatgactatcccatatcacagatatgatttaccaccaccaccctgcccccgctcccgtgaagaaagcagggcaagtgctgtgctgcccatttgggcctgcatagtgccatgattggaacccaggaactctggtctccttgcctagtgcttttcaaaactctgtgctacacaggagtggatccaggcctgaaggtcatacaattctggggactctctttaagaaaaagaattctaaaatatcttacttttgcaaacattatgaaaatatactgccacattaatatgttgctagggcccctgctaggaccttaagaaggagctcatgtgagtcaggaccctgaatgttaggcctcgttagctctatggttcatatgcttcttgaaccaagtcacagggcacttcccagccacattgccaggcaacaggactaaactacctccaaagcaagcagtcttttcagttttgactgagtgatgtgagaaacttcttttcttttcttttctttttttttttttgagacagtctccctatgtcacccaggctgtggtgcagcaacccaatcttggctcactgcaacccccacctcccgggttcaagcaattatcctgcctcagccacctgagtagctgggattacaggttcctgtcaccacacccagttaatttatatatatatatatatatatatatttaagtagagacagggtttcacatgttgcccaggctggtctcgaactcctgtcctcaagttatctgcccattttggtctcccaaagtgctgggattacaagtgtaagccaccacgactatctgagagaagttttctgatgtcatgttgaatctgcttctaaaagactgatactgccaaggtgggcggatcacctgaggtcaggagttcgagaccagcctggccaacatggtgaaaccccatctactaaaaaaatacaaaaattagccagacctggtggcgggtgcccgtattcccagctacttgggaggctgaggcaggagaattgtttgaacccgggaggtggaggttgcagtaagccaagatcacgccactgcactccagcctgggtgacagagcaaggctctgtctcaaaaaaaaacaaaaacaaaaacaaaaaagactgatatcgcacctaaattattattatattaaaagaagcagagtatgagagacaggtacatggtccagtaggaagagaagcagccctgattctaccacttaaggtgatgtatgatcttaggctggacacttctctccctcatccgttttcctcttcaacataatgaaatagacttgaaagtctctaaggctctatcagttctgacattctaggcttcatatacattaagttgagccatatgtaatcactgtgtttgtaggttagaaacagctgagtatcgtagtttcatatatggttccagctaatacatgcaatgtggctggtgaacacttctgaattcagaaactatcccagatctcagctagaaccatccactgttctgtttgtccagtttcaacttaagggatctccatgcggtccctggaagtacccattgaaacatgcgtatttgtgtatagcagaactctgaaataatattctgacagcagttatctctgaggaattgggttataggtgattttccctttccgcatgataaatttatgtaatatttgactgacttgaccgtaagtatgttacttgtataataaaaggaaaaaaggtacttctattttgaaaaaataaaaataaaagcctttgggttcttgaatggaggatcatggaacacatttgctgccatatgcagttatgttgatgctctgcaaacctgtgctgagccctgttgctcaagcccttcctcatctcttcttgagggagaaggtggagacttccttaaggagatgtgacatatgggaagacaacagattcagaaatttacgtggataggactttagacaccacccagcccaaacttccaaataaaatatggaacgcaa

SEQ ID NO: 341710 - DNA, 3143 bp, Artificial Sequence
  derived and/or modified sequence
ggtgtgctggggcccgggcggggcagggggaggggacgcccgggggagggaaaagggagccgagcgcgggtgggagcccagagccagagagcgcgctgggcggtgctgggcacccgcggagtggaacggggctggtggaatgcacagggtcgcagcgcttgggccaccctcggtcagagggcgccgtgtccagcgagcaaacgggcgccccggagccttgctgagaggcagctctgggctttcccagctccgaagtcaatactgagatcccagatgtgtccagagacatcctgaagaggctcgggggtggaggagccttagtgtgtccacaaagggactcctgaaactgactgagagccagtggatttgccagcagtctgagcttctaccgagtcttcccccacctcaatccctgttgctatggagactaccaatggaacggagacctggtatgagagcctgcatgccgtgctgaaggctctaaatgccactcttcacagcaatttgctctgccggccagggccagggctggggccagacaaccagactgaagagaggcgggccagcctacctggccgtgatgacaactcctacatgtacattctctttgtcatgtttctatttgctgtaactgtgggcagcctcatcctgggatacacccgctcccgcaaagtggacaagcgtagtgacccctatcatgtgtatatcaagaaccgtgtgtctatgatctaacacgagagggctgggacggtggaagaccaagacacctggggattgcgtctggggcctccagaactctgctgtggactgcatcaggtctcagtgtccctatctgtaagatcaacaagaaacacggttaagggaggtcgtcactggggtgggagaagaggggctggtagaccgaagccttgtgcataaggattttttcccaggaaaagatagactttataaacagtgggagcccatgaacaaacatataaaagtagcaacagataatgaccaataactggttcagtggctggagtattaggggcctggggattggagaacggagaagaagttgtagcagagggaaatgagacaggaagatgctctggggacacattttttatgtgttatcttcagccatgagaagcagtgatgactatcccatatcacagatatgatttaccaccaccaccctgcccccgctcccgtgaagaaagcagggcaagtgctgtgctgcccatttgggcctgcatagtgccatgattggaacccaggaactctggtctccttgcctagtgcttttcaaaactctgtgctacacaggagtggatccaggcctgaaggtcatacaattctggggactctctttaagaaaaagaattctaaaatatcttacttttgcaaacattatgaaaatatactgccacattaatatgttgctagggcccctgctaggaccttaagaaggagctcatgtgagtcaggaccctgaatgttaggcctcgttagctctatggttcatatgcttcttgaaccaagtcacagggcacttcccagccacattgccaggcaacaggactaaactacctccaaagcaagcagtcttttcagttttgactgagtgatgtgagaaacttcttttcttttcttttctttttttttttttgagacagtctccctatgtcacccaggctgtggtgcagcaacccaatcttggctcactgcaacccccacctcccgggttcaagcaattatcctgcctcagccacctgagtagctgggattacaggttcctgtcaccacacccagttaatttatatatatatatatatatatatatttaagtagagacagggtttcacatgttgcccaggctggtctcgaactcctgtcctcaagttatctgcccattttggtctcccaaagtgctgggattacaagtgtaagccaccacgactatctgagagaagttttctgatgtcatgttgaatctgcttctaaaagactgatactgccaaggtgggcggatcacctgaggtcaggagttcgagaccagcctggccaacatggtgaaaccccatctactaaaaaaatacaaaaattagccagacctggtggcgggtgcccgtattcccagctacttgggaggctgaggcaggagaattgtttgaacccgggaggtggaggttgcagtaagccaagatcacgccactgcactccagcctgggtgacagagcaaggctctgtctcaaaaaaaaacaaaaacaaaaacaaaaaagactgatatcgcacctaaattattattatattaaaagaagcagagtatgagagacaggtacatggtccagtaggaagagaagcagccctgattctaccacttaaggtgatgtatgatcttaggctggacacttctctccctcatccgttttcctcttcaacataatgaaatagacttgaaagtctctaaggctctatcagttctgacattctaggcttcatatacattaagttgagccatatgtaatcactgtgtttgtaggttagaaacagctgagtatcgtagtttcatatatggttccagctaatacatgcaatgtggctggtgaacacttctgaattcagaaactatcccagatctcagctagaaccatccactgttctgtttgtccagtttcaacttaagggatctccatgcggtccctggaagtacccattgaaacatgcgtatttgtgtatagcagaactctgaaataatattctgacagcagttatctctgaggaattgggttataggtgattttccctttccgcatgataaatttatgtaatatttgactgacttgaccgtaagtatgttacttgtataataaaaggaaaaaaggtacttctattttgaaaaaataaaaataaaagcctttgggttcttgaatggaggatcatggaacacatttgctgccatatgcagttatgttgatgctctgcaaacctgtgctgagccctgttgctcaagcccttcctcatctcttcttgagggagaaggtggagacttccttaaggagatgtgacatatgggaagacaacagattcagaaatttacgtggataggactttagacaccacccagcccaaacttccaaataaaatatggaacgcaa

SEQ ID NO: 341711 - DNA, 935 bp, Artificial Sequence
  derived and/or modified sequence
tcacccagtgaagacactgtaagtctggaggtaggggacagcaatcagaggccctttggtcactgcacagttcctttaactgcaaccctaggctggcctgacccagctgctgcaggaaggggaggggccatgggagggggtcagagcccacagcaggactgttgcataatccttggggcctggccttgggcaatccaccctggttctgaagtttgtgctttgtgtctggttccttccttttctgccttctctcctgctttctagctctgggctttcccagctccgaagtcaatactgagatcccagatgtgtccagagacatcctgaagaggctcgggggtggaggagccttagtgtgtccacaaagggactcctgaaactgactgagagccagtggatttgccagcagtctgagcttctaccgagtcttcccccacctcaatccctgttgctatggagactaccaatggaacggagacctggtatgagagcctgcatgccgtgctgaaggctctaaatgccactcttcacagcaatttgctctgccggccagggccagggctggggccagacaaccagactgaagagaggcgggccagcctacctggccgtgatgacaactcctacatgtacattctctttgtcatgtttctatttgctgtaactgtgggcagcctcatcctgggatacacccgctcccgcaaagtggacaagcgtagtgacccctatcatgtgtatatcaagaaccgtgtgtctatgatctaacacgagagggctgggacggtggaagaccaagacacctggggattgcgtctggggcctccagaactctgctgtggactgcatcaggtctcagtgtccctatctgtaagatcaacaagaaacacggttaagggaggtcgtcactggggtgggagaagaggggctggtagacc

SEQ ID NO: 341712 - DNA, 550 bp, Artificial Sequence
  derived and/or modified sequence
agagccagagagcgcgctgggcggtgctgggcacccgcggagtggaacggggctggtggaatgcacagggtcgcagcgcttgggccaccctcggtcagagggcgccgtgtccagcgagcaaacgggcgccccggagccttgctgagaggcagacactgaagacgctcattctgaaagagtagctgaaacggagtgacgggaaagaaagacccaaggatgcggacagaagctgaggcccagaaaagggaagtcttatgtccaaagtcacacaaggagcagctgagctgggacaactcccctggtttccatttccttcaccgtaaactctgggctttcccagctccgaagtcaatactgagatcccagatgtgtccagagacatcctgaagaggctcgggggtggaggagccttagtgtgtccacaaagggactcctgaaactgactgagagccagtggatttgccagcagtctgagcttctaccgagtcttcccccacctcaatccctgttgctatggagactaccaatggaacggagacctggtatgaga

SEQ ID NO: 341713 - DNA, 555 bp, Artificial Sequence
  derived and/or modified sequence
cagagccagagagcgcgctgggcggtgctgggcacccgcggagtggaacggggctggtggaatgcacagggtcgcagcgcttgggccaccctcggtcagagggcgccgtgtccagcgagcaaacgggcgccccggagccttgctgagaggcagacactgaagacgctcattctgaaagagtagctgaaacggagtgacgggaaagaaagacccaaggctctgggctttcccagctccgaagtcaatactgagatcccagatgtgtccagagacatcctgaagaggctcgggggtggaggagccttagtgtgtccacaaagggactcctgaaactgactgagagccagtggatttgccagcagtctgagcttctaccgagtcttcccccacctcaatccctgttgctatggagactaccaatggaacggagacctggtatgagagcctgcatgccgtgctgaaggctctaaatgccactcttcacagcaatttgctctgccggccagggccagggctggggccagacaaccagactgaagagaggcgggccagcct

SEQ ID NO: 341714 - DNA, 607 bp, Artificial Sequence
  derived and/or modified sequence
agagccagagagcgcgctgggcggtgctgggcacccgcggagtggaacggggctggtggaatgcacagggtcgcagcgcttgggccaccctcggtcagagggcgccgtgtccagcgagcaaacgggcgccccggagccttgctgagaggcagatgcggacagaagctgaggcccagaaaagggaagtcttatgtccaaagtcacacaaggagcagctgagctgggacaactcccctggtttccatttccttcaccgtaaactctgggctttcccagctccgaagtcaatactgagatcccagatgtgtccagagacatcctgaagaggctcgggggtggaggagccttagtgtgtccacaaagggactcctgaaactgactgagagccagtggatttgccagcagtctgagcttctaccgagtcttcccccacctcaatccctgttgctatggagactaccaatggaacggagacctggtatgagagcctgcatgccgtgctgaaggctctaaatgccactcttcacagcaatttgctctgccggccagggccagggctggggccagacaaccagactgaagagaggcgggccagcctacctggccg

SEQ ID NO: 341715 - DNA, 585 bp, Artificial Sequence
  derived and/or modified sequence
ccaggaagcaggcgctgcaggggacggaagggtcggagcccacagccgggggaggccaaggagctgggcggaggcactccaggccagcccggggagaactctgggctttcccagctccgaagtcaatactgagatcccagatgtgtccagagacatcctgaagaggctcgggggtggaggagccttagtgtgtccacaaagggactcctgaaactgactgagagccagtggatttgccagcagtctgagcttctaccgagtcttcccccacctcaatccctgttgctatggagactaccaatggaacggagacctggtatgagagcctgcatgccgtgctgaaggctctaaatgccactcttcacagcaatttgctctgccggccagggccagggctggggccagacaaccagactgaagagaggcgggccagcctacctggccgtgatgacaactcctacatgtacattctctttgtcatgtttctatttgctgtaactgtgggcagcctcatcctgggatacacccgctcccgcaaagtggacaagcgtagtgacccctatcatgtgtatatcaagaaccgtg

SEQ ID NO: 341716 - protein, 163 aa, Artificial Sequence
  derived and/or modified sequence
MTMRHNWTPDLSPLWVLLLCAHVVTLLVRATPVSQTTTAATASVRSTKDPCPSQPPVFPAAKQCPALEVTWPEVEVPLNGTLSLSCVACSRFPNFSILYWLGNGSFIEHLPGRLWEGSTSRERGSTGWAEGNLAPHPRSPALQPQQSTAAGLRLSTGPAAAQP

SEQ ID NO: 341717 - DNA, 492 bp, Artificial Sequence
  derived and/or modified sequence
atgactatgcggcacaactggacccctgacttgtcccccctttgggtcctcctcctgtgcgcacacgtggtgaccctcttggttcgcgctaccccagtctcccagactacaacggcggctacagcatcagttcggtctaccaaagatccttgtccctcacagcctccagtgttccctgccgcaaagcagtgcccagcgctagaggtgacctggcccgaggtggaggtccctcttaatgggacattatcactgtcgtgcgttgcctgttcaagatttcccaacttcagcatactctattggcttggaaacggctcctttattgaacatctccctggcaggctgtgggaggggagcacctctagggaacggggaagcaccgggtgggctgaaggaaatttggctccgcatcctcgatcaccagcgctgcagccacagcagtccaccgctgcaggactgaggctcagcacaggtccagctgctgcccaaccctag

SEQ ID NO: 341718 - DNA, 492 bp, Artificial Sequence
  derived and/or modified sequence
atgactatgcgacataactggacccctgacctatcccccctctgggtcttacttttgtgcgcccatgtggtgaccttgctggtaagggccaccccagtttctcagacgacgaccgctgctacggcctcagtgcgctcaacaaaggatccatgcccatcccaaccccctgtcttccctgctgccaagcaatgtcccgccttggaggtgacgtggccagaagtggaagtacctcttaacggaactctgtccctctcgtgcgtggcgtgttctcggtttccaaattttagcattctgtattggctaggaaatggaagttttatcgagcatctgcccgggaggctctgggaagggagtacatcacgagagagaggatccacaggctgggccgaaggcaacctggcaccccacccccggtcaccagccctacagcctcagcagtctaccgcggcaggactgcgtctgtctacaggccccgctgcagctcagccctag

SEQ ID NO: 341719 - DNA, 492 bp, Artificial Sequence
  derived and/or modified sequence
atgactatgaggcacaactggacccccgatcttagcccactgtgggttctgctgttgtgcgcacacgtggtgaccctcctggtgagagctacccccgtatctcaaacaaccacggccgccacagcttccgttcgctccacaaaggatccctgcccttctcaaccccccgtcttccctgccgccaaacagtgcccagccctggaagtgacttggccagaagtcgaggtccctttaaatggcaccctgtccctatcctgtgtcgcgtgctcccggttccctaacttctccatactctactggctgggtaatgggtcattcatagagcacctgcccggtcggttatgggaaggatcgacttctagggaacggggttctactggctgggcagagggaaatctggccccccacccccgctcacctgcgcttcaaccgcaacagagtacagccgccggtctacgcctatctaccggtcccgcagcagcacagccatag

SEQ ID NO: 341720 - DNA, 492 bp, Artificial Sequence
  derived and/or modified sequence
atgaccatgagacacaactggacccccgacctgagccccctgtgggtgctgctgctgtgcgcccacgtggtgaccctgctggtgagagccacccccgtgagccagaccaccaccgccgccaccgccagcgtgagaagcaccaaggacccctgccccagccagccccccgtgttccccgccgccaagcagtgccccgccctggaggtgacctggcccgaggtggaggtgcccctgaacggcaccctgagcctgagctgcgtggcctgcagcagattccccaacttcagcatcctgtactggctgggcaacggcagcttcatcgagcacctgcccggcagactgtgggagggcagcaccagcagagagagaggcagcaccggctgggccgagggcaacctggccccccaccccagaagccccgccctgcagccccagcagagcaccgccgccggcctgagactgagcaccggccccgccgccgcccagccctag

SEQ ID NO: 341721 - DNA, 492 bp, Artificial Sequence
  derived and/or modified sequence
atgaccatgaggcataattggactcccgacctgagcccattatgggttttgcttctctgtgcgcacgtggtaaccctgctcgtaagagcaacacctgtcagccagacaaccaccgctgctacagcatctgtccgctccacaaaggacccctgtccatctcaaccaccagtgtttcccgctgctaagcaatgcccggccctggaggtgacatggccagaagttgaggtgccactaaatggcactctgtcgctatcatgtgtcgcgtgctcaaggtttccaaactttagcattttgtattggttaggtaacggaagtttcatcgagcaccttcctggccggttatgggagggttcaaccagtcgggagaggggaagcactgggtgggccgagggtaacctggccccccacccaaggagccctgctctccagcctcagcagagcacggcagcgggcctgcgattgtccacaggccccgcggccgcgcaaccatag

SEQ ID NO: 341722 - DNA, 1720 bp, Artificial Sequence
  derived and/or modified sequence
acacgcagctagacacagctaacttgagtcttggagctcctagagggaagcttctggaaaggaaggctcttcaggacctcttaggagccagagaagaggacgttgtcacagataaagagccaggctcaccagctcctgacgcatgcatcatgaccatgagacacaactggacaccagacctcagccctttgtgggtcctgctcctgtgtgcccacgtcgtcactctcctggtcagagccacacctgtctcgcagaccaccacagctgccactgcctcagttagaagcacaaaggacccctgcccctcccagcccccagtgttcccagcagctaagcagtgtccagcattggaagtgacctggccagaggtggaagtgccactgaatggaacgctgagcttatcctgtgtggcctgcagccgcttccccaacttcagcatcctctactggctgggcaatggttccttcattgagcacctcccaggccgactgtgggaggggagcaccagccgggaacgtgggagcacaggctgggctgagggcaaccttgccccccacccaagaagccctgccctccagccacagcagtccacagcagcagggttaagactcagcacagggccagcagcagcacaaccttgaccagagcttgggtcctacctgtctacctggagtgaacagtccctgactgcctgtaggctgcgtggatgcgcaacacaccccctccttctctgctttgggtcccttctctcaccaaattcaaactccattcccacctacctagaaaatcacagcctccttataatgcctcctcctcctgccattctctctccacctatccattagccttcctaacgtcctactcctcacactgctctactgctcagaaaccaccaagactgttgatgccttagccttgcactccagggccctacctgcatttcccacatgactttctggaagcctcccaactattcttgcttttcccagacagctcccactcccatgtctctgctcatttagtcccgtcttcctcaccgccccagcaggggaacgctcaagcctggttgaaatgctgcctcttcagtgaagtcatcctctttcagctctggccgcattctgcagacttcctatcttcgtgctgtatgttttttttttcccccttcactctaatggactgttccagggaagggatgggggcagcagctgcttcggatccacactgtatctgtgtcatccccacatgggtcctcataaaggattattcaatggaggcatcctgacatctgttcatttaggcttcagttccactcccaggaactttgcctgtcccacgagggagtatgggagagagggactgccacacagaagctgaagacaacacctgcttcaggggaacacaggcgcttgaaaaagaaaagagagaacagcccataatgctccccgggagcagaggccactaatggagagtgggaagagcctggaaagatgtggcctcaggaaaagggatgagagaaaggaggtggtatggaagactcagcaggaacaaggggcttgctcaccaccttctccctggagagggcagaagaggtcacacgcagagactgctactacatcttactcacctgccaaggcttggtggccaacacccagaggaacaaattaaggaccgggaattaattcccaggggctccctggtgcccaaaggacaagagcttcca

SEQ ID NO: 341723 - DNA, 492 bp, Artificial Sequence
  derived and/or modified sequence
atgaccatgaggcacaactggaccccagacctgagccccctgtgggtgctgctgctgtgtgcccacgtggtgaccctgctggtgcgggccacccctgtgtcccagaccaccacagctgccacagcctctgtgcgcagcaccaaggacccctgccccagccagccccctgtgtttcctgctgccaagcagtgcccagccctggaggtgacctggccagaggtggaggtgcccctgaatggcaccctgagcctgagctgtgtggcctgcagccgcttccccaacttcagcatcctgtactggctgggcaatggcagcttcatcgagcacctgcccggccgcctgtgggagggcagcaccagccgggagcggggcagcacaggctgggccgagggcaacctggccccccaccccaggagccctgccctgcagccccagcagagcacagctgctggcctgcggctgagcacaggccctgctgctgcccagccctag

SEQ ID NO: 341724 - DNA, 492 bp, Artificial Sequence
  derived and/or modified sequence
atgaccatgcggcacaactggacccccgacctgagccccctgtgggtcctcctcttatgtgcccacgttgtgactctcttggttcgcgctacacctgtgtcccagaccactactgccgcaaccgcctctgtacgaagcactaaggatccgtgcccatcccagccccctgtttttcccgctgcgaaacagtgtccggcactggaagttacctggcccgaggtggaagtccccctgaacggaaccctaagcctgtcatgcgtcgcctgtagtagattcccaaatttctcaatcctgtattggctgggcaacgggtccttcatcgaacacctgcccggtcgattgtgggaaggatctacatcacgcgaaagaggcagtactggatgggccgaggggaatctcgcacctcacccacgtagccctgccctgcagccacaacagagtactgccgcaggtctgcggctgtcaactggccctgctgcagcccaaccttag

SEQ ID NO: 341725 - RNA, 492 nt, Artificial Sequence
  derived and/or modified sequence
augacuaugcgacauaacuggaccccugaccuauccccccucugggucuuacuuuugugcgcccauguggugaccuugcugguaagggccaccccaguuucucagacgacgaccgcugcuacggccucagugcgcucaacaaaggauccaugcccaucccaacccccugucuucccugcugccaagcaaugucccgccuuggaggugacguggccagaaguggaaguaccucuuaacggaacucugucccucucgugcguggcguguucucgguuuccaaauuuuagcauucuguauuggcuaggaaauggaaguuuuaucgagcaucugcccgggaggcucugggaagggaguacaucacgagagagaggauccacaggcugggccgaaggcaaccuggcaccccacccccggucaccagcccuacagccucagcagucuaccgcggcaggacugcgucugucuacaggccccgcugcagcucagcccuag

SEQ ID NO: 341726 - RNA, 492 nt, Artificial Sequence
  derived and/or modified sequence
augacuaugaggcacaacuggacccccgaucuuagcccacuguggguucugcuguugugcgcacacguggugacccuccuggugagagcuacccccguaucucaaacaaccacggccgccacagcuuccguucgcuccacaaaggaucccugcccuucucaaccccccgucuucccugccgccaaacagugcccagcccuggaagugacuuggccagaagucgaggucccuuuaaauggcacccugucccuauccugugucgcgugcucccgguucccuaacuucuccauacucuacuggcuggguaaugggucauucauagagcaccugcccggucgguuaugggaaggaucgacuucuagggaacgggguucuacuggcugggcagagggaaaucuggccccccacccccgcucaccugcgcuucaaccgcaacagaguacagccgccggucuacgccuaucuaccggucccgcagcagcacagccauag

SEQ ID NO: 341727 - DNA, 659 bp, Artificial Sequence
  derived and/or modified sequence
acatgcgtggagaggcactgccttgcgtgtgtgcacacgtgtgaggatgtcagcgcctgtgtggccgcgggactcaaggctggcctggctcaagtgaacagcacgtccaggaggcgacctcgtccgcgggtttgcattctggggtggacgagctgggggttcggtccgagcccggtgggaggctcccggagcgcagcctgggcccagcccaccccgcgccggcggccatggcaggcaccctggacctggacaagggctgcacggtggaggagctgctccgcgggtgcatcgaagccttcgatgactccgggaaggtgcgggacccgcagctggtgcgcatgttcctcatgatgcacccctggtacatcccctcctctcagctggcggccaagctgctccacatctaccaacaatcccggaaggacaactccaattccctgcaggtgaaaacgtgccacctggtcaggtactggatctccgccttcccagcggagtttgacttgaacccggagttggctgagcagatcaaggagctgaaggctctgctagaccaagaagggaaccgacggcacagcagcctaatcgacatagacagcgtgtgcgtgggggagcacagagggctgggggggcactcagtatcctataccatctgtgcttaa

SEQ ID NO: 341728 - protein, 610 aa, Artificial Sequence
  derived and/or modified sequence
MAGTLDLDKGCTVEELLRGCIEAFDDSGKVRDPQLVRMFLMMHPWYIPSSQLAAKLLHIYQQSRKDNSNSLQVKTCHLVRYWISAFPAEFDLNPELAEQIKELKALLDQEGNRRHSSLIDIDSVPTYKWKRQVTQRNPVGQKKRKMSLLFDHLEPMELAEHLTYLEYRSFCKILFQDYHSFVTHGCTVDNPVLERFISLFNSVSQWVQLMILSKPTAPQRALVITHFVHVAEKLLQLQNFNTLMAVVGGLSHSSISRLKETHSHVSPETIKLWEGLTELVTATGNYGNYRRRLAACVGFRFPILGVHLKDLVALQLALPDWLDPARTRLNGAKMKQLFSILEELAMVTSLRPPVQANPDLLSLLTVSLDQYQTEDELYQLSLQREPRSKSSPTSPTSCTPPPRPPVLEEWTSAAKPKLDQALVVEHIEKMVESVFRNFDVDGDGHISQEEFQIIRGNFPYLSAFGDLDQNQDGCISREEMVSYFLRSSSVLGGRMGFVHNFQESNSLRPVACRHCKALILGIYKQGLKCRACGVNCHKQCKDRLSVECRRRAQSVSLEGSAPSPSPMHSHHHRAFSFSLPRPGRRGSRPPAEIREEEVQTVEDGVFDIHL

SEQ ID NO: 341729 - DNA, 1833 bp, Artificial Sequence
  derived and/or modified sequence
atggccggcactctcgacctggataaaggctgtactgttgaagaacttttgcggggctgcattgaggctttcgatgatagcggaaaagtgagggatccccaactcgtgcgtatgttcctaatgatgcatccttggtacatccccagcagtcagctggcagctaagctactgcacatttatcaacagtcccgcaaggataacagcaattcccttcaagtgaaaacatgccatctggtgcgctattggatctccgccttcccagccgaattcgatctgaatcccgaactggccgagcaaataaaagagcttaaggccttgctagaccaggaggggaaccgccggcactcgtctctgattgatattgatagtgtccccacctacaagtggaagcgacaagtgacccagaggaatccggtcggacagaaaaaaagaaagatgtcgctgttgtttgatcacctcgaaccaatggaactcgccgaacatctgacatacctggagtaccggtccttttgtaaaatcttatttcaagactatcactcctttgttacgcacggctgtacagtggacaaccctgtcctggagcgcttcatttcactgttcaatagcgtttctcaatgggtgcagctgatgattctcagcaaaccaacagcaccccagcgtgccctcgtgatcactcatttcgtgcacgttgccgagaagttgcttcagcttcaaaactttaacaccctgatggcagtcgtaggcggcctgtcccactcctccatcagcaggctcaaggaaacccatagtcatgtgtctcccgaaaccattaaactctgggaggggcttacagagcttgttacagcaaccggcaactatggaaactatcggcgccgactcgcagcctgtgttgggtttcgctttcccatactgggtgtgcatctgaaggatcttgtggccttgcaacttgcacttccagattggctggaccccgcaagaacccggctgaatggcgccaagatgaagcaactgttctccatcctggaagaactcgctatggtgacgtctctgagacctcccgtccaggccaatccagacctgctctccctcctaactgtgagcctcgatcaataccagaccgaagatgagctctatcagctgtctcttcagcgggaacctcggtctaagagctctccaacatcgccgaccagctgcaccccaccccccaggccccccgtgctggaagaatggacatcggctgcaaaaccaaagctggaccaagccctggtggtcgaacatatcgaaaaaatggtggaatccgtatttcggaattttgacgtggatggggacgggcatatttcccaggaagagtttcagattatcaggggcaatttcccctatttaagcgcttttggggacctggatcagaatcaagacggctgcatatcccgagaggagatggtctcttacttcctccggtcttcgtctgtccttggagggagaatgggctttgtccacaactttcaggagtccaattcactcagacctgttgcttgcaggcactgcaaggctctcatcctcggcatatacaaacagggactgaagtgtcgtgcttgcggagttaactgccataagcagtgcaaagaccggctgtcagtcgagtgtaggcgcagagcccagtctgtgagtttggaggggagcgcccccagtccttctcccatgcactcacaccatcacagagcttttagtttttccttgccacgtccgggtcgacgcgggagtcgcccacccgcagaaatacgggaagaggaggtgcagacagtcgaagatggtgtgttcgatattcacctctag

SEQ ID NO: 341730 - DNA, 1833 bp, Artificial Sequence
  derived and/or modified sequence
atggccggcaccctggacctggacaagggctgcaccgtggaggagctgctgcggggctgcatcgaggcctttgatgattctgggaaggtgcgggacccccagctggtgaggatgttcctgatgatgcacccctggtacatccccagcagccagctggccgccaagctgctgcacatctaccagcagagcaggaaggacaacagcaacagcctgcaggtgaagacctgccacctggtgcgctactggatcagcgccttccctgctgagtttgacctgaaccctgagctggccgagcagatcaaggagctgaaggccctgctggaccaggagggcaacagaagacacagcagcctgattgatattgattctgtgcccacctacaagtggaagaggcaggtgacccagaggaaccctgtgggccagaagaagaggaagatgagcctgctgtttgaccacctggagcccatggagctggccgagcacctgacctacctggagtaccgctccttctgcaagatcctcttccaggactaccacagctttgtgacccacggctgcaccgtggacaaccctgtgctggagcgcttcatcagcctcttcaacagcgtgtcccagtgggtgcagctgatgatcctgagcaagcccacagccccccagagggccctggtgatcacccactttgtgcacgtggccgagaagctgctgcagctgcagaacttcaacaccctgatggctgtggtgggcggcctgagccacagcagcatcagccggctgaaggagacccacagccacgtgtccccagagaccatcaagctgtgggagggcctgacagagctggtgacagccactggaaactacggcaactacagaagaaggctggccgcctgtgtgggcttccgcttccccatcctgggcgtgcacctgaaggacctggtggccctgcagctggccctgcctgactggctggaccctgcccggacccggctgaatggagccaagatgaagcagctgttcagcatcctggaggagctggccatggtgaccagcctgcggccccctgtgcaggccaacccagacctgctgagcctgctgactgtgtccctggaccagtaccagacagaagatgagctgtaccagctgagcctgcagcgggagcccaggagcaagagcagccccaccagccccaccagctgcaccccaccaccccggccccctgtgctggaggagtggaccagcgctgccaagcccaagctggaccaggccctggtggtggagcacatcgagaagatggtggagagcgtcttcaggaactttgatgtggatggagatggccacatcagccaggaggagttccagatcatccggggcaacttcccctacctgagcgccttcggggacctggaccagaaccaggacggctgcatcagccgggaggagatggtgtcctacttcctgcggagcagctctgtgctgggcggccgcatgggctttgtgcacaacttccaggagagcaacagcctgcggcctgtggcctgccgccactgcaaggccctgatcctgggcatctacaagcagggcctgaagtgccgggcctgtggggtgaactgccacaagcagtgcaaggaccggctgtctgtggagtgcagaagaagagcccagagcgtgtccctggagggcagcgcccccagccccagccccatgcacagccaccaccaccgggccttctccttcagcctgccccggcccggccggcggggcagcaggcctcctgctgagatccgggaggaggaggtgcagacagtggaggatggagtgtttgacatccacctgtag

SEQ ID NO: 341731 - DNA, 1833 bp, Artificial Sequence
  derived and/or modified sequence
atggccggcaccctggacctggacaagggctgcaccgtggaggagcttcttagaggctgcatagaggcttttgatgacagcgggaaagttcgcgatccacagctcgttcgcatgtttctcatgatgcatccttggtacattcccagctctcagctcgcggccaagctcttgcacatctaccagcaaagccgcaaggacaatagcaattccttacaggtgaaaacatgccacctggtacgttactggatatccgcattcccagcggagttcgaccttaaccccgagcttgccgagcaaattaaggaattgaaggctcttttggaccaagaagggaataggcgccactcctccttgatcgatatcgattcagtgcctacctacaagtggaagcggcaagtcacacagaggaaccctgtcgggcagaaaaaaagaaagatgagcctgctgttcgatcaccttgagcctatggaactggccgagcacctgacctatttggaatatcgatccttctgtaagatcctgttccaggactaccactccttcgtcactcacggctgcacagtcgataatccagttctagaacgttttatttccctcttcaactctgtgtcacagtgggtgcaactcatgatcttgagcaaacctaccgctcctcagagggcactggtaatcacgcactttgttcacgtggccgaaaagctcctacaactgcagaatttcaacaccctgatggccgtcgtgggcgggctgtcccattcatccatctctcggctgaaggagactcattcgcacgtttcacctgaaacaatcaaactctgggagggattgactgagctggtcaccgccaccgggaactatggcaactaccgaaggcggttggccgcgtgcgtgggatttaggtttcccatcctcggcgtgcacctgaaagacttagtggccctccaactagctctgccagactggctggatcctgctaggacaagactcaacggggccaaaatgaaacagcttttttcgatactggaggagctggccatggtcaccagtctgaggccccccgtacaggctaatccggacttattgagcctcctcactgtctctttggaccagtatcagaccgaggacgaattgtatcagctctcactgcagagagagcctaggagcaagagcagccctacatctcctacatcctgtacccctcccccgcgaccaccagtgctggaagaatggacctccgctgctaagcctaagctagaccaggccctcgttgttgagcatatcgagaaaatggtggagtcggtgtttagaaactttgatgtggatggggacggccacatctcacaggaagagttccagataatccgcggtaatttcccatatctaagtgccttcggagatcttgatcagaatcaggacgggtgcatttcccgtgaagaaatggtgagctactttctacgcagttccagtgtcctaggaggtcgaatgggcttcgttcacaacttccaagagagcaactcccttcgaccagtcgcatgccggcactgcaaggctcttattcttgggatttataaacaaggccttaagtgtagagcctgcggagtcaattgtcacaagcagtgcaaggaccggctgtctgtggaatgccgccgaagggcgcagtcggtgtcattagagggaagcgccccctctcctagtcctatgcatagtcatcatcatcgagccttctctttctctctaccaaggcctggcagacggggctctaggccacctgcagaaattagggaggaggaagtgcaaacggtggaggacggggtctttgatattcacctgtag

SEQ ID NO: 341732 - DNA, 1833 bp, Artificial Sequence
  derived and/or modified sequence
atggctggaaccctggacctggacaaaggctgcaccgtagaagaacttctaaggggctgcatcgaagcctttgacgacagtggcaaggtccgagatcctcagttggtacggatgttcctcatgatgcatccttggtatattccatcatcgcaattggccgctaaactgctgcacatttatcaacagtcgaggaaggacaactcgaatagcctccaggtgaagacttgtcatctggtccgatattggatatcagcattcccagcggagtttgatctcaatccagagttggccgagcagattaaagagctaaaagccctccttgatcaggagggtaatcgtagacactccagtttaatagacattgacagtgttcccacctacaagtggaaaagacaggtgacccagcggaatccggtgggacagaaaaagcgtaaaatgagtcttctgttcgaccacctagaacccatggagctcgcggagcatctcacttatctggagtaccggtctttctgtaagattctctttcaagattaccatagtttcgtcacacatggctgcacagtcgataatcctgtgcttgaacgcttcatcagcctgtttaactcagtgtcgcagtgggtccaactgatgatcctgtccaagcctacggcccctcaacgagccctggttatcacccactttgtgcatgttgccgagaagcttctccagctgcagaattttaacaccttgatggccgtggtcggaggtctcagccattcatcgataagtagactgaaggagacacactcccacgtttccccggaaaccattaaactgtgggaaggactcactgagctggttaccgccactgggaattacggaaattatcggaggagactggcagcttgtgtgggtttccgttttccaattctcggggtgcatctgaaagatcttgtagcattgcagctcgcgttgcctgattggctggaccctgctcggacccgcctgaatggtgcaaagatgaagcaattattcagcatccttgaggagctagccatggtaacctcgctccgcccacccgtccaagcaaatcccgacctcctgtcccttctgaccgtgagccttgatcaataccagacggaggacgaactataccaactctcccttcagagggagcccaggtcaaaatcctcacctacatcaccaacaagctgtaccccccctccccgtccacccgtgctggaggaatggacaagcgcagcgaaacccaaattggaccaagctctcgtggtggaacacattgagaagatggtagagagtgtgttccgtaatttcgatgtggatggggacggccacatctcacaggaagaatttcagattatccgcggtaactttccgtacctctcagcgtttggcgatctagaccaaaatcaggacggctgtatttctcgagaagaaatggtgtcctactttctccgatcctccagtgttctcggtggtagaatgggtttcgtgcataatttccaagaatccaattctcttaggcctgtcgcctgtcggcactgtaaagctttgattctgggtatctacaagcagggacttaaatgtagagcctgcggtgtgaactgtcacaaacagtgtaaggaccgactctcagtcgagtgccggagacgtgcacagagcgtttcccttgaaggttcagctcctagcccgtcgccaatgcactcccaccaccaccgggctttttcgttctctctgccaagacctggtcggaggggcagccggccacccgctgagattagagaagaggaagtccaaaccgttgaggacggcgtattcgatatccacttgtag

SEQ ID NO: 341733 - DNA, 2983 bp, Artificial Sequence
  derived and/or modified sequence
gttgctaatggtgtcatgcacccaccggccacccttggcgcgagcgcccccctctggacaccctgctccgtgcgcgctcacagttcgcctgtgcggggccggggccagggtcaggagccggggatagggaggaagagggcctgtggacaagctgagccgggacccctgggacctttgcggaggtggcctgggagcgctcagttcccaggctcaggcttcccgctgacgcctcctggccgcagcgggctccccccgccccaggaatgttcctctcccatccagtccgcctcccctagggcaggccccctgggggctgccgcagccccgcctcgccttcctgggctcccgggagggggcgaggcgggcaggacgcctgggttctctccccccacctcccataccagggagaaattcctccgaggtcccctcaggctctgggttcccaaaataaccctgcgggggaagggaggctgtggagggagggaagcgggaggggcgcagagccgagctgcggggtgctgcaggtgcctctggggagagggcgcgaggagaaggcgccctgcggggggctgggcgccagccagtcctgggatcttggttcgtccccatcctcgtgaagcccctcggccttcccgcgactccgagggtgggccggaagcctctctgcgggtccgtttcccaactggcgggttgcaccatcccgggccagaccgtttaaccccgggagtggccgcgggggacaactccgcccctgtccagcagggggcgtgcccgccccgccccgtttctgcccgcggggccgctcccccgcccgcgactccgcagactcccgctctgcctctcccgggacaggggttcggtccgagcccggtgggaggctcccggagcgcagcctgggcccagcccaccccgcgccggcggccatggcaggcaccctggacctggacaagggctgcacggtggaggagctgctccgcgggtgcatcgaagccttcgatgactccgggaaggtgcgggacccgcagctggtgcgcatgttcctcatgatgcacccctggtacatcccctcctctcagctggcggccaagctgctccacatctaccaacaatcccggaaggacaactccaattccctgcaggtgaaaacgtgccacctggtcaggtactggatctccgccttcccagcggagtttgacttgaacccggagttggctgagcagatcaaggagctgaaggctctgctagaccaagaagggaaccgacggcacagcagcctaatcgacatagacagcgtccctacctacaagtggaagcggcaggtgactcagcggaaccctgtgggacagaaaaagcgcaagatgtccctgttgtttgaccacctggagcccatggagctggcggagcatctcacctacttggagtatcgctccttctgcaagatcctgtttcaggactatcacagtttcgtgactcatggctgcactgtggacaaccccgtcctggagcggttcatctccctcttcaacagcgtctcacagtgggtgcagctcatgatcctcagcaaacccacagccccgcagcgggccctggtcatcacacactttgtccacgtggcggagaagctgctacagctgcagaacttcaacacgctgatggcagtggtcgggggcctgagccacagctccatctcccgcctcaaggagacccacagccacgttagccctgagaccatcaagctctgggagggtctcacggaactagtgacggcgacaggcaactatggcaactaccggcgtcggctggcagcctgtgtgggcttccgcttcccgatcctgggtgtgcacctcaaggacctggtggccctgcagctggcactgcctgactggctggacccagcccggacccggctcaacggggccaagatgaagcagctctttagcatcctggaggagctggccatggtgaccagcctgcggccaccagtacaggccaaccccgacctgctgagcctgctcacggtgtctctggatcagtatcagacggaggatgagctgtaccagctgtccctgcagcgggagccgcgctccaagtcctcgccaaccagccccacgagttgcaccccaccaccccggcccccggtactggaggagtggacctcggctgccaaacccaagctggatcaggccctcgtggtggagcacatcgagaagatggtggagtctgtgttccggaactttgacgtcgatggggatggccacatctcacaggaagaattccagatcatccgtgggaacttcccttacctcagcgcctttggggacctcgaccagaaccaggatggctgcatcagcagggaggagatggtttcctatttcctgcgctccagctctgtgttgggggggcgcatgggcttcgtacacaacttccaggagagcaactccttgcgccccgtcgcctgccgccactgcaaagccctgatcctgggcatctacaagcagggcctcaaatgccgagcctgtggagtgaactgccacaagcagtgcaaggatcgcctgtcagttgagtgtcggcgcagggcccagagtgtgagcctggaggggtctgcaccctcaccctcacccatgcacagccaccatcaccgcgccttcagcttctctctgccccgccctggcaggcgaggctccaggcctccagcagagatccgtgaggaggaggtacagacggtggaggatggggtgtttgacatccacttgtaatagatgctgtggttggatcaaggactcattcctgccttggagaaaatacttcaaccagagcagggagcctgggggtgtcggggcaggaggctggggatgggggtgggatatgagggtggcatgcagctgagggcagggccagggctggtgtccctaaggttgtacagactcttgtgaatatttgtattttccagatggaataaaaaggcccgtgtaattaaccttca

SEQ ID NO: 341734 - DNA, 1833 bp, Artificial Sequence
  derived and/or modified sequence
atggccggcaccctggacctggacaagggctgcaccgtggaggagctgctgagaggctgcatcgaggccttcgacgacagcggcaaggtgagagacccccagctggtgagaatgttcctgatgatgcacccctggtacatccccagcagccagctggccgccaagctgctgcacatctaccagcagagcagaaaggacaacagcaacagcctgcaggtgaagacctgccacctggtgagatactggatcagcgccttccccgccgagttcgacctgaaccccgagctggccgagcagatcaaggagctgaaggccctgctggaccaggagggcaacagaagacacagcagcctgatcgacatcgacagcgtgcccacctacaagtggaagagacaggtgacccagagaaaccccgtgggccagaagaagagaaagatgagcctgctgttcgaccacctggagcccatggagctggccgagcacctgacctacctggagtacagaagcttctgcaagatcctgttccaggactaccacagcttcgtgacccacggctgcaccgtggacaaccccgtgctggagagattcatcagcctgttcaacagcgtgagccagtgggtgcagctgatgatcctgagcaagcccaccgccccccagagagccctggtgatcacccacttcgtgcacgtggccgagaagctgctgcagctgcagaacttcaacaccctgatggccgtggtgggcggcctgagccacagcagcatcagcagactgaaggagacccacagccacgtgagccccgagaccatcaagctgtgggagggcctgaccgagctggtgaccgccaccggcaactacggcaactacagaagaagactggccgcctgcgtgggcttcagattccccatcctgggcgtgcacctgaaggacctggtggccctgcagctggccctgcccgactggctggaccccgccagaaccagactgaacggcgccaagatgaagcagctgttcagcatcctggaggagctggccatggtgaccagcctgagaccccccgtgcaggccaaccccgacctgctgagcctgctgaccgtgagcctggaccagtaccagaccgaggacgagctgtaccagctgagcctgcagagagagcccagaagcaagagcagccccaccagccccaccagctgcacccccccccccagaccccccgtgctggaggagtggaccagcgccgccaagcccaagctggaccaggccctggtggtggagcacatcgagaagatggtggagagcgtgttcagaaacttcgacgtggacggcgacggccacatcagccaggaggagttccagatcatcagaggcaacttcccctacctgagcgccttcggcgacctggaccagaaccaggacggctgcatcagcagagaggagatggtgagctacttcctgagaagcagcagcgtgctgggcggcagaatgggcttcgtgcacaacttccaggagagcaacagcctgagacccgtggcctgcagacactgcaaggccctgatcctgggcatctacaagcagggcctgaagtgcagagcctgcggcgtgaactgccacaagcagtgcaaggacagactgagcgtggagtgcagaagaagagcccagagcgtgagcctggagggcagcgcccccagccccagccccatgcacagccaccaccacagagccttcagcttcagcctgcccagacccggcagaagaggcagcagaccccccgccgagatcagagaggaggaggtgcagaccgtggaggacggcgtgttcgacatccacctgtag

SEQ ID NO: 341735 - protein, 830 aa, Artificial Sequence
  derived and/or modified sequence
MGSMFRSEEVALVQLFLPTAAAYTCVSRLGELGLVEFRDLNASVSAFQRRFVVDVRRCEELEKTFTFLQEEVRRAGLVLPPPKGRLPAPPPRDLLRIQEETERLAQELRDVRGNQQALRAQLHQLQLHAAVLRQGHEPQLAAAHTDGASERTPLLQAPGGPHQDLRVNFVAGAVEPHKAPALERLLWRACRGFLIASFRELEQPLEHPVTGEPATWMTFLISYWGEQIGQKIRKITDCFHCHVFPFLQQEEARLGALQQLQQQSQELQEVLGETERFLSQVLGRVLQLLPPGQVQVHKMKAVYLALNQCSVSTTHKCLIAEAWCSVRDLPALQEALRDSSMEEGVSAVAHRIPCRDMPPTLIRTNRFTASFQGIVDAYGVGRYQEVNPAPYTIITFPFLFAVMFGDVGHGLLMFLFALAMVLAENRPAVKAAQNEIWQTFFRGRYLLLLMGLFSIYTGFIYNECFSRATSIFPSGWSVAAMANQSGWSDAFLAQHTMLTLDPNVTGVFLGPYPFGIDPIWSLAANHLSFLNSFKMKMSVILGVVHMAFGVVLGVFNHVHFGQRHRLLLETLPELTFLLGLFGYLVFLVIYKWLCVWAARAASAPSILIHFINMFLFSHSPSNRLLYPRQEVVQATLVVLALAMVPILLLGTPLHLLHRHRRRLRRRPADRQEENKAGLLDLPDASVNGWSSDEEKAGGLDDEEEAELVPSEVLMHQAIHTIEFCLGCVSNTASYLRLWALSLAHAQLSEVLWAMVMRIGLGLGREVGVAAVVLVPIFAAFAVMTVAILLVMEGLSAFLHALRLHWVEFQNKFYSGTGYKLSPFTFAATDD

SEQ ID NO: 341736 - protein, 218 aa, Artificial Sequence
  derived and/or modified sequence
MGSMFRSEEVALVQLFLPTAAAYTCVSRLGELGLVEFRDLNASVSAFQRRFVVDVRRCEELEKTFTFLQEEVRRAGLVLPPPKGRLPAPPPRDLLRIQEETERLAQELRDVRGNQQALRAQLHQLQLHAAVLRQGHEPQLAAAHTDGASERTPLLQAPGGPHQDLRVNFVAGAVEPHKAPALERLLWRACRGFLIASFRELEQPLEHPVTGEPATWMT

SEQ ID NO: 341737 - DNA, 2493 bp, Artificial Sequence
  derived and/or modified sequence
atgggcagcatgttcagaagcgaggaggtggccctggtgcagctgttcctgcccaccgccgccgcctacacctgcgtgagcagactgggcgagctgggcctggtggagttcagagacctgaacgccagcgtgagcgccttccagagaagattcgtggtggacgtgagaagatgcgaggagctggagaagaccttcaccttcctgcaggaggaggtgagaagagccggcctggtgctgcccccccccaagggcagactgcccgcccccccccccagagacctgctgagaatccaggaggagaccgagagactggcccaggagctgagagacgtgagaggcaaccagcaggccctgagagcccagctgcaccagctgcagctgcacgccgccgtgctgagacagggccacgagccccagctggccgccgcccacaccgacggcgccagcgagagaacccccctgctgcaggcccccggcggcccccaccaggacctgagagtgaacttcgtggccggcgccgtggagccccacaaggcccccgccctggagagactgctgtggagagcctgcagaggcttcctgatcgccagcttcagagagctggagcagcccctggagcaccccgtgaccggcgagcccgccacctggatgaccttcctgatcagctactggggcgagcagatcggccagaagatcagaaagatcaccgactgcttccactgccacgtgttccccttcctgcagcaggaggaggccagactgggcgccctgcagcagctgcagcagcagagccaggagctgcaggaggtgctgggcgagaccgagagattcctgagccaggtgctgggcagagtgctgcagctgctgccccccggccaggtgcaggtgcacaagatgaaggccgtgtacctggccctgaaccagtgcagcgtgagcaccacccacaagtgcctgatcgccgaggcctggtgcagcgtgagagacctgcccgccctgcaggaggccctgagagacagcagcatggaggagggcgtgagcgccgtggcccacagaatcccctgcagagacatgccccccaccctgatcagaaccaacagattcaccgccagcttccagggcatcgtggacgcctacggcgtgggcagataccaggaggtgaaccccgccccctacaccatcatcaccttccccttcctgttcgccgtgatgttcggcgacgtgggccacggcctgctgatgttcctgttcgccctggccatggtgctggccgagaacagacccgccgtgaaggccgcccagaacgagatctggcagaccttcttcagaggcagatacctgctgctgctgatgggcctgttcagcatctacaccggcttcatctacaacgagtgcttcagcagagccaccagcatcttccccagcggctggagcgtggccgccatggccaaccagagcggctggagcgacgccttcctggcccagcacaccatgctgaccctggaccccaacgtgaccggcgtgttcctgggcccctaccccttcggcatcgaccccatctggagcctggccgccaaccacctgagcttcctgaacagcttcaagatgaagatgagcgtgatcctgggcgtggtgcacatggccttcggcgtggtgctgggcgtgttcaaccacgtgcacttcggccagagacacagactgctgctggagaccctgcccgagctgaccttcctgctgggcctgttcggctacctggtgttcctggtgatctacaagtggctgtgcgtgtgggccgccagagccgccagcgcccccagcatcctgatccacttcatcaacatgttcctgttcagccacagccccagcaacagactgctgtaccccagacaggaggtggtgcaggccaccctggtggtgctggccctggccatggtgcccatcctgctgctgggcacccccctgcacctgctgcacagacacagaagaagactgagaagaagacccgccgacagacaggaggagaacaaggccggcctgctggacctgcccgacgccagcgtgaacggctggagcagcgacgaggagaaggccggcggcctggacgacgaggaggaggccgagctggtgcccagcgaggtgctgatgcaccaggccatccacaccatcgagttctgcctgggctgcgtgagcaacaccgccagctacctgagactgtgggccctgagcctggcccacgcccagctgagcgaggtgctgtgggccatggtgatgagaatcggcctgggcctgggcagagaggtgggcgtggccgccgtggtgctggtgcccatcttcgccgccttcgccgtgatgaccgtggccatcctgctggtgatggagggcctgagcgccttcctgcacgccctgagactgcactgggtggagttccagaacaagttctacagcggcaccggctacaagctgagccccttcaccttcgccgccaccgacgactag

SEQ ID NO: 341738 - DNA, 1845 bp, Artificial Sequence
  derived and/or modified sequence
atgaccttcctgatcagctactggggcgagcagatcggccagaagatcagaaagatcaccgactgcttccactgccacgtgttccccttcctgcagcaggaggaggccagactgggcgccctgcagcagctgcagcagcagagccaggagctgcaggaggtgctgggcgagaccgagagattcctgagccaggtgctgggcagagtgctgcagctgctgccccccggccaggtgcaggtgcacaagatgaaggccgtgtacctggccctgaaccagtgcagcgtgagcaccacccacaagtgcctgatcgccgaggcctggtgcagcgtgagagacctgcccgccctgcaggaggccctgagagacagcagcatggaggagggcgtgagcgccgtggcccacagaatcccctgcagagacatgccccccaccctgatcagaaccaacagattcaccgccagcttccagggcatcgtggacgcctacggcgtgggcagataccaggaggtgaaccccgccccctacaccatcatcaccttccccttcctgttcgccgtgatgttcggcgacgtgggccacggcctgctgatgttcctgttcgccctggccatggtgctggccgagaacagacccgccgtgaaggccgcccagaacgagatctggcagaccttcttcagaggcagatacctgctgctgctgatgggcctgttcagcatctacaccggcttcatctacaacgagtgcttcagcagagccaccagcatcttccccagcggctggagcgtggccgccatggccaaccagagcggctggagcgacgccttcctggcccagcacaccatgctgaccctggaccccaacgtgaccggcgtgttcctgggcccctaccccttcggcatcgaccccatctggagcctggccgccaaccacctgagcttcctgaacagcttcaagatgaagatgagcgtgatcctgggcgtggtgcacatggccttcggcgtggtgctgggcgtgttcaaccacgtgcacttcggccagagacacagactgctgctggagaccctgcccgagctgaccttcctgctgggcctgttcggctacctggtgttcctggtgatctacaagtggctgtgcgtgtgggccgccagagccgccagcgcccccagcatcctgatccacttcatcaacatgttcctgttcagccacagccccagcaacagactgctgtaccccagacaggaggtggtgcaggccaccctggtggtgctggccctggccatggtgcccatcctgctgctgggcacccccctgcacctgctgcacagacacagaagaagactgagaagaagacccgccgacagacaggaggagaacaaggccggcctgctggacctgcccgacgccagcgtgaacggctggagcagcgacgaggagaaggccggcggcctggacgacgaggaggaggccgagctggtgcccagcgaggtgctgatgcaccaggccatccacaccatcgagttctgcctgggctgcgtgagcaacaccgccagctacctgagactgtgggccctgagcctggcccacgcccagctgagcgaggtgctgtgggccatggtgatgagaatcggcctgggcctgggcagagaggtgggcgtggccgccgtggtgctggtgcccatcttcgccgccttcgccgtgatgaccgtggccatcctgctggtgatggagggcctgagcgccttcctgcacgccctgagactgcactgggtggagttccagaacaagttctacagcggcaccggctacaagctgagccccttcaccttcgccgccaccgacgactag

SEQ ID NO: 341739 - DNA, 2493 bp, Artificial Sequence
  derived and/or modified sequence
atgggtagcatgtttcgctcggaagaagtagccctggttcagctgttcctccccacagcagcggcctacacctgtgtcagccgcttgggcgaactggggctggtggaatttcgggatcttaacgcgtctgtgtccgcttttcagaggagattcgtggttgatgtacggcggtgcgaggaattggagaaaacattcaccttcctgcaggaagaagtacggagagctggtctggtgttgccgccgccaaagggtagactgcccgccccccctcctcgggacctccttcgcatccaggaggagaccgaacgcctggctcaagagcttcgggatgttcgggggaatcaacaagctctgcgcgcccagctccatcaattgcagctccacgccgccgtgctaagacaaggccacgaaccccagctggccgccgcacacaccgatggcgccagtgagaggacccccctgctgcaggccccaggcggaccccaccaggatctcagggtgaatttcgtggcaggagccgtcgaaccacacaaggctccggcactagaacgcctcttgtggagagcttgtaggggtttccttattgcctcgtttcgggagctggaacagcctctcgaacatcccgtgaccggagagcctgcaacttggatgaccttcttgatttcctactggggggaacaaataggccagaagatcagaaaaattaccgactgctttcattgtcatgtattcccattcttacagcaggaggaggcccgccttggcgctctgcagcagctgcaacaacaatcccaggagctgcaggaagtacttggggagaccgaaaggttcctgagtcaagtgttaggtcgagttcttcagctcctcccccctgggcaagtccaggtgcacaaaatgaaggccgtgtatttggccctcaatcagtgttccgtcagcactacacacaagtgcctcattgccgaagcttggtgctctgtgagggacctacccgcccttcaggaggccttgagagattcgagcatggaagagggcgtctccgccgtggcacacaggattccatgcagggatatgccccccaccctaatacgaaccaatagattcaccgcctcttttcaagggatagtggatgcgtacggtgtcgggcgataccaggaggtgaatcccgccccgtacacaattatcacattccctttcctgttcgccgttatgttcggtgatgtcgggcacggcctgcttatgtttctctttgccctagcgatggtactagcagagaacagacccgcagtcaaagcagctcagaacgagatatggcagactttctttcgcggccgttacttacttttattgatgggcctgttttccatttatactggctttatatataatgagtgctttagtcgggccacatcaatctttccgagcggctggtctgtcgctgcgatggcaaaccagtccggttggagcgatgcatttttagcccagcatactatgctaacccttgacccaaatgtcacaggggtcttcttgggaccatacccgttcggtatcgatcccatctggtctctagccgccaaccatctttcgtttctgaatagttttaagatgaaaatgtcagtgatcttgggagtggtccacatggctttcggcgtggtgctgggtgtgttcaatcatgtccatttcgggcaacgccaccgtctgctgctggaaacattgccggaactaaccttcctgctagggctttttggctatttggtgttcctggttatatataaatggctgtgcgtatgggccgcccgagccgcatctgctccctccattctcattcacttcattaacatgttcttattttcccatagccctagcaaccgcttactataccctcgtcaagaagtagtgcaggcaacattagttgtcctggcgctggccatggtcccaattctcttgcttgggacgccactccatctcttgcacaggcaccggcggcgattgcggagacggcccgctgatcgacaggaagaaaacaaagctgggcttctcgacctccccgacgcctcagtgaacggctggtcatccgatgaagagaaggccggtggacttgatgacgaggaagaggccgagctggtcccaagcgaggtgctcatgcaccaggccattcacacaatcgagttctgcttagggtgcgtctcaaacactgctagttacctgaggttgtgggccctttctctggctcacgcccagttgtccgaggtactgtgggctatggtaatgaggatcggcctgggccttggacgggaggtcggggttgccgccgttgttttggtgcctatctttgctgccttcgctgtcatgaccgtggccattttgttggttatggagggtttatctgccttcttgcacgcgctgaggctgcattgggtggagttccaaaataagttctatagcgggaccggttacaagctgagccccttcacattcgctgcgacggacgactag

SEQ ID NO: 341740 - DNA, 1845 bp, Artificial Sequence
  derived and/or modified sequence
atgacttttctgattagctattggggagagcagatcggccagaagataaggaaaatcaccgactgctttcactgccacgtttttccctttttgcagcaggaagaagctcggttgggagcgctgcaacagcttcagcaacagtcacaggaactgcaggaagttctgggagaaacagagcggttcttgagccaggtgctcggcagagtcctacagctgttgccgccgggacaggtgcaagtgcataagatgaaggcagtgtacttggccttgaaccagtgttccgtctccacaacacacaaatgtctgattgctgaggcatggtgttcagttagagaccttccagccctgcaggaggctctaagggatagctcgatggaggaaggcgtatcagctgttgcccatcgaattccgtgcagggacatgcctcccaccctcatcagaacaaatcgttttaccgcttcatttcagggcattgtcgatgcttacggggtcggccgataccaagaggtgaatcccgcaccctacacgattataacgttcccttttcttttcgcagtcatgtttggcgacgtgggtcatggcctgctgatgtttctctttgcattggcgatggtgctggcagagaacaggcccgcggtgaaagccgctcagaatgaaatatggcagacattttttcggggtaggtaccttctcctgctcatgggactttttagtatctacacaggctttatttataacgagtgtttttctcgggccacgtcgatctttccgtccggctggtccgttgctgctatggctaaccagtccgggtggtctgacgcatttctcgcccagcataccatgctgacactggatcccaacgtcaccggtgtcttcctaggaccatatccttttggaatcgatcctatttggagtctcgccgcaaaccacttgtcctttctgaactcttttaagatgaaaatgagcgtgattttgggtgtagtgcacatggcctttggtgtggtgcttggggtgttcaatcacgttcacttcgggcagcgacaccgcttattacttgaaacgcttccggaactaactttcttactgggactcttcggataccttgttttcctggtaatttacaagtggctgtgtgtctgggcggctagggccgcttcagctccaagtattttgatacactttatcaacatgttcctttttagccatagtccttctaatagactcctctatcctagacaggaggtagtgcaggcaacactcgttgtactggcgttggcgatggtacctatcctcctgcttggaacacctcttcacctgcttcatcgccaccggagaaggctgcgacggcgcccggcggaccggcaggaagaaaataaggccggcctgcttgacctgcccgacgcctccgtgaatgggtggagtagcgacgaggaaaaagccgggggcctggatgacgaggaagaagctgagttggttccgagcgaagtcctgatgcaccaggccatccatactatagagttctgcctgggttgtgtgtctaacaccgcatcctacctgcgcttgtgggctctgtctctggcccacgctcagctctctgaggtgctgtgggctatggtgatgcgcatcggcctcgggctgggccgtgaggtgggggtggctgccgtcgtactagtgcccatttttgctgcctttgccgtgatgactgtcgccatattgctcgttatggaaggcctatctgcctttctgcatgcactcagattgcattgggtcgaattccaaaacaagttctactctggtaccggatacaaactgtctccctttacatttgccgctacagacgactag

SEQ ID NO: 341741 - DNA, 2493 bp, Artificial Sequence
  derived and/or modified sequence
atgggctccatgttccgctctgaggaggtggccctggtgcagctgttcctgcccacagctgctgcctacacctgtgtgtcccggctgggggagctgggcctggtggagttccgggacctgaatgcctctgtgtctgccttccagaggagatttgtggtggatgtgcggcgctgtgaggagctggagaagaccttcaccttcctgcaggaggaggtgagaagagctggcctggtgctgcccccacccaagggccgcctgcctgcccccccaccccgggacctgctgcgcatccaggaggagacagagcggctggcccaggagctgagagatgtgcggggcaaccagcaggccctgcgggcccagctgcaccagctgcagctgcatgctgctgtgctgcggcagggccacgagccccagctggccgccgcccacacagatggagccagcgagaggacccccctgctgcaggcccctgggggcccccaccaggacctgcgggtgaactttgtggccggggctgtggagccccacaaggccccagccctggagcggctgctgtggagggcctgccggggcttcctgattgccagcttccgggagctggagcagcccctggagcaccctgtgactggagagcccgccacctggatgaccttcctgatctcctactggggcgagcagatcggccagaagatcaggaagatcacagactgcttccactgccacgtgttccccttcctgcagcaggaggaggcccggctgggcgccctgcagcagctgcagcagcagagccaggagctgcaggaggtgctgggggagacagagcgcttcctgagccaggtgctgggccgggtgctgcagctgctgcccccaggccaggtgcaggtgcacaagatgaaggctgtgtacctggccctgaaccagtgcagcgtgtccaccacccacaagtgcctgattgctgaggcctggtgcagcgtgcgggacctgcctgccctgcaggaggccctgcgggacagctccatggaggagggcgtgtctgctgtggcccaccgcatcccctgccgggacatgccacccaccctcatccgcaccaaccgcttcaccgccagcttccagggcatcgtggatgcctacggcgtgggccgctaccaggaggtgaacccagccccctacaccatcatcaccttccccttcctgtttgctgtgatgtttggagatgtgggccacggcctgctgatgttcctgtttgccctggccatggtgctggccgagaacagacctgctgtgaaggccgcccagaatgagatctggcagaccttcttccggggccgctacctgctgctgctgatgggcctcttcagcatctacacaggcttcatctacaatgaatgcttcagccgggccaccagcatcttccccagcggctggagcgtggccgccatggccaaccagagcggctggagcgatgccttcctggcccagcacaccatgctgaccctggaccccaacgtgactggagtcttcctgggcccctaccccttcggcatcgaccccatctggagcctggccgccaaccacctgtccttcctgaacagcttcaagatgaagatgtctgtcatcctgggcgtggtgcacatggccttcggcgtggtgctgggcgtcttcaaccacgtgcacttcggccagaggcaccggctgctgctggagaccctgcctgagctgaccttcctgctgggcctgtttggctacctggtgttcctggtgatctacaagtggctgtgtgtgtgggccgcccgggccgccagcgcccccagcatcctgatccacttcatcaacatgttcctgttcagccacagccccagcaaccggctgctgtacccccggcaggaggtggtgcaggccaccctggtggtgctggccctggccatggtgcccatcctgctgctgggcacccccctgcacctgctgcaccgccacagaagaaggctgcggcggcggcctgctgaccggcaggaggagaacaaggccggcctgctggacctgcctgatgcctctgtgaatggctggagcagtgatgaggagaaggccggcggcctggatgatgaggaggaggccgagctggtgcccagcgaggtgctgatgcaccaggccatccacaccatcgagttctgcctgggctgtgtgagcaacacagccagctacctgcggctgtgggccctgagcctggcccacgcccagctgtctgaggtgctgtgggccatggtgatgagaattggcctgggcctgggccgggaggtgggcgtggccgctgtggtgctggtgcccatctttgctgcctttgctgtgatgacagtggccatcctgctggtgatggagggcctgagcgccttcctgcacgccctgcggctgcactgggtggagttccagaacaagttctacagcggcaccggctacaagctgagccccttcacctttgctgccacagatgactag

SEQ ID NO: 341742 - DNA, 1845 bp, Artificial Sequence
  derived and/or modified sequence
atgaccttcctgatctcctactggggcgagcagatcggccagaagatcaggaagatcacagactgcttccactgccacgtgttccccttcctgcagcaggaggaggcccggctgggcgccctgcagcagctgcagcagcagagccaggagctgcaggaggtgctgggggagacagagcgcttcctgagccaggtgctgggccgggtgctgcagctgctgcccccaggccaggtgcaggtgcacaagatgaaggctgtgtacctggccctgaaccagtgcagcgtgtccaccacccacaagtgcctgattgctgaggcctggtgcagcgtgcgggacctgcctgccctgcaggaggccctgcgggacagctccatggaggagggcgtgtctgctgtggcccaccgcatcccctgccgggacatgccacccaccctcatccgcaccaaccgcttcaccgccagcttccagggcatcgtggatgcctacggcgtgggccgctaccaggaggtgaacccagccccctacaccatcatcaccttccccttcctgtttgctgtgatgtttggagatgtgggccacggcctgctgatgttcctgtttgccctggccatggtgctggccgagaacagacctgctgtgaaggccgcccagaatgagatctggcagaccttcttccggggccgctacctgctgctgctgatgggcctcttcagcatctacacaggcttcatctacaatgaatgcttcagccgggccaccagcatcttccccagcggctggagcgtggccgccatggccaaccagagcggctggagcgatgccttcctggcccagcacaccatgctgaccctggaccccaacgtgactggagtcttcctgggcccctaccccttcggcatcgaccccatctggagcctggccgccaaccacctgtccttcctgaacagcttcaagatgaagatgtctgtcatcctgggcgtggtgcacatggccttcggcgtggtgctgggcgtcttcaaccacgtgcacttcggccagaggcaccggctgctgctggagaccctgcctgagctgaccttcctgctgggcctgtttggctacctggtgttcctggtgatctacaagtggctgtgtgtgtgggccgcccgggccgccagcgcccccagcatcctgatccacttcatcaacatgttcctgttcagccacagccccagcaaccggctgctgtacccccggcaggaggtggtgcaggccaccctggtggtgctggccctggccatggtgcccatcctgctgctgggcacccccctgcacctgctgcaccgccacagaagaaggctgcggcggcggcctgctgaccggcaggaggagaacaaggccggcctgctggacctgcctgatgcctctgtgaatggctggagcagtgatgaggagaaggccggcggcctggatgatgaggaggaggccgagctggtgcccagcgaggtgctgatgcaccaggccatccacaccatcgagttctgcctgggctgtgtgagcaacacagccagctacctgcggctgtgggccctgagcctggcccacgcccagctgtctgaggtgctgtgggccatggtgatgagaattggcctgggcctgggccgggaggtgggcgtggccgctgtggtgctggtgcccatctttgctgcctttgctgtgatgacagtggccatcctgctggtgatggagggcctgagcgccttcctgcacgccctgcggctgcactgggtggagttccagaacaagttctacagcggcaccggctacaagctgagccccttcacctttgctgccacagatgactag

SEQ ID NO: 341743 - DNA, 2493 bp, Artificial Sequence
  derived and/or modified sequence
atgggcagcatgttccggagcgaggaggtggccctggtgcagctgtttcttcccacagcggctgcttatacctgtgtcagccggctgggggagctcggacttgtcgagtttcgcgatctaaatgcgtctgtctccgctttccaaagaaggtttgtggtcgacgtgagacgctgcgaggagttggaaaaaacgttcaccttcctgcaagaagaagtgcggcgtgccgggctggttctgcctcctcctaagggcagattgccagctccacctccaagggacttgctgcggatacaggaagaaacagagcggctggcccaagaactgcgcgacgttagagggaaccagcaagccctgagagctcagctgcatcagctacagcttcatgccgcggtgctgcgccagggccatgagccccagctggccgcggcacacactgacggcgcgtctgagcgaacacccctactgcaggcccccggagggccacatcaggacctcagagttaatttcgtggcaggggctgttgagcctcacaaagctccagcgctggaaaggctcctctggagggcctgtagaggattcctgatcgccagctttcgtgaattggaacagccgctggagcacccggtcactggagaacctgcaacctggatgactttcctaatctcgtattggggtgagcaaattggccagaagatccggaaaataacagattgttttcactgtcacgtcttcccgttccttcaacaggaagaagcgcgcctgggtgctctacagcaactgcaacagcagagccaggaactgcaggaggtgctaggcgaaactgagagatttctgtcccaggtgcttggacgcgtgttacagctgctgcctcccggccaggtccaagtgcataaaatgaaggctgtgtacctggcactgaaccagtgctctgtgtcgactactcacaagtgcctgattgccgaagcttggtgctcagtaagagacctgcccgctcttcaagaggctctccgggactcctcaatggaggagggagtgagcgctgtggcccatcggataccctgtcgcgacatgcctccaacgttaatcagaactaaccgctttaccgcctcctttcaggggatagttgacgcttatggagttggcaggtatcaggaggttaatccagcaccatatactatcatcactttccctttcctgtttgccgttatgttcggcgatgtgggacacggattactgatgtttttattcgctctggccatggtgctggccgaaaatcggcctgcagtgaaggctgcacagaatgaaatttggcaaaccttcttcagggggcgctatctgctgcttctgatgggactgttttctatatacacagggtttatctataacgagtgtttcagtcgagctacaagcatttttccttctggatggtctgtggcggccatggcaaatcagtctggatggtctgatgcctttctggcccagcacaccatgcttaccctcgatcctaatgtaacgggagtttttctggggccttaccccttcggcattgatcccatttggtccctggcggcgaaccacctctcattcctgaattcattcaaaatgaaaatgtcggtgattctgggggtggtgcatatggcttttggggtggtgttgggagtatttaaccacgtccactttgggcagaggcatcgactgcttctggaaactctccccgagttgaccttccttctggggctgttcgggtacttagtgttcctcgtaatttacaaatggctgtgcgtctgggccgcccgtgcagcttccgccccatctattttaatccactttatcaacatgtttcttttctctcattcaccgagcaacagactactctaccccagacaagaagtcgtccaggccacactggtggttctggctcttgcaatggtccccattctcctgcttggtactcccctgcatcttctgcacagacacaggcggcggttaagacgtcgaccagcagataggcaggaggagaataaggcaggactcctggacttgccagatgccagtgtgaatggatggagctcggacgaggagaaggctggcggccttgacgacgaggaggaggcggagctcgtgccgagcgaggtcctgatgcaccaggccatccacaccattgaattttgtttagggtgcgtcagtaataccgctagttacctacggctgtgggcgctgagtctggctcacgcccaattgtcagaagtgctgtgggcaatggtgatgcgcataggcctgggcctgggacgcgaagtcggagtggcagccgtggttctggtgccaatttttgccgcttttgccgttatgactgtggctattctcctagtcatggagggattgtcagcctttcttcacgcccttagattgcattgggtggagttccaaaacaagttttatagcggtacgggatacaagctgtctccctttacctttgcggcaacagacgactag

SEQ ID NO: 341744 - DNA, 1845 bp, Artificial Sequence
  derived and/or modified sequence
atgaccttcctgatcagctactggggcgagcagatcggccagaagattcgcaagatcacagactgcttccactgtcacgtcttccccttcctccagcaggaggaggccagacttggagccctgcagcaacttcagcagcagtcacaggaactccaggaagttctgggagagactgaacggtttctctcccaggtattaggccgcgttctgcagctgctcccacccggtcaggtgcaggttcataaaatgaaagcagtgtacctagcactgaaccagtgcagcgttagcacgacccataagtgtcttattgccgaggcatggtgctctgtgcgggacttacccgccctccaggaagctcttcgtgatagcagtatggaagaaggggtatctgcagttgcccaccggattccgtgcagggatatgcccccaacactgatccgaacaaatagatttaccgccagtttccaaggcatcgtggacgcatacggcgtagggagataccaggaggtcaatccagctccgtacacgatcatcaccttccctttcttgtttgcagtcatgttcggagatgtgggacacggcctgctgatgtttctattcgccttagccatggtgcttgcggaaaatcgaccggcagtgaaggccgcgcaaaacgagatttggcagacctttttcaggggcaggtatctacttctgctgatgggacttttcagtatttataccggtttcatctataatgagtgttttagtcgggctacaagcatcttcccctccgggtggtctgttgccgccatggccaaccagagtggatggagcgacgcatttctggctcagcataccatgctgactttagaccccaatgtaaccggcgtgttcttaggcccatatccgttcggaatagatcctatctggagtctcgcggcaaatcatctttcttttctcaattcctttaagatgaaaatgagtgtgattcttggggtggtgcacatggccttcggcgttgtccttggtgttttcaaccatgtccacttcggccagagacacagactgctccttgagacacttcccgagctaaccttcctccttggactgttcggttacttagtgtttttggttatatataagtggctttgcgtgtgggcagccagagccgcctctgcccctagcatcctgatccattttattaatatgtttctgttctctcattcacctagtaatagactgttatatcctcggcaagaggtggtgcaagccacactcgtagtgcttgctctggctatggtgcctatattgctactcggcacacctctgcacctgcttcacagacatcgcaggagattgcgaagacggcctgcagataggcaggaggaaaacaaggccggattgctcgacttgcctgatgcaagcgtgaacggttggagctcagacgaagagaaggctggcggtcttgacgatgaggaggaagctgagctggtgccctctgaagttctgatgcaccaggccatacacaccatcgagttctgccttgggtgcgttagtaataccgccagctatctgagactgtgggcgctttctttggcccacgcccagctttccgaagtgctgtgggccatggtgatgcggataggccttgggctgggcagggaggtgggcgtagccgccgtggtgttagtacctattttcgccgcctttgccgtcatgactgttgccatcctcttggtgatggagggcctgagcgctttcctgcatgccttgcgcctgcactgggtggagtttcaaaacaaattttacagtggaacaggctataaactgtccccgttcaccttcgccgcgacggacgattag

SEQ ID NO: 341745 - DNA, 2493 bp, Artificial Sequence
  derived and/or modified sequence
atgggcagcatgtttcggagcgaggaggtggccctggtgcagctgttcctgcccacagcagcagcttacacttgtgtttctcgactcggcgaactggggctcgttgagttcagggatttgaatgcttccgtctccgcctttcaaagacggtttgtcgttgatgtacgcaggtgcgaggagctcgaaaagaccttcaccttcctgcaggaggaggtgcgtcgggctggtctggtgcttccacccccaaaaggcaggttgccagcccctcccccaagagacctgctaaggattcaggaagaaaccgaaagactggctcaggagctccgcgatgtccggggaaaccagcaagccctgcgagcccagctccaccagctgcagctgcatgccgcagtgctacgccagggccatgagccacagttggctgcggcacacacagacggcgctagtgagaggactcctctgttgcaagccccagggggaccgcatcaagatcttcgggtgaacttcgttgccggagccgtcgagccgcacaaagcacccgctttggaaaggctgttgtggcgggcatgccggggtttcctaattgcttctttccgagagttggaacagcctctcgaacatcctgtgacaggggagccagcgacatggatgactttcttgattagctattggggggaacaaattggacagaagatccgaaagattaccgactgcttccactgccacgtctttccatttctccagcaggaagaagcccgactaggagcacttcagcagttgcagcagcaatcccaggagcttcaagaagtgttgggagaaaccgaacgatttctctcacaggtcctgggacgcgttctgcagcttttgccgccaggtcaagtccaggtccataaaatgaaggcagtatacttggcgctaaaccagtgttccgtgtcgacaacacacaaatgtttgatcgctgaagcttggtgtagtgtgcgcgacttgcctgccctgcaagaggccctcagggacagttcaatggaagaaggggtgtccgctgttgctcacagaatcccctgccgagatatgccccctactctcataaggaccaataggtttaccgcctctttccaaggaattgttgacgcgtacggggtaggccgataccaggaggtgaatccagctccctataccatcatcaccttcccttttcttttcgctgtcatgttcggcgatgtcggccacggcctgcttatgtttctgttcgcactggccatggtcttagctgagaatagaccagccgtgaaagcagcacaaaatgagatctggcagacttttttccgaggacggtacctcttgctgctgatgggattgttttcaatctacacaggcttcatctacaatgaatgcttttccagagccacgagtatcttcccatctggctggagcgtggctgccatggcaaatcagtccggatggtccgatgcattcttggctcagcacactatgctgacgctcgaccctaatgtgacgggtgtcttcctcggcccatatccttttggtattgacccaatctggtccctggcagcaaatcatctgagctttcttaattccttcaagatgaagatgtccgtgatactaggagtggttcacatggcctttggggtggtgctgggcgtgttcaaccacgttcacttcggtcaacggcaccggctgttgctggagaccttgccggagctgacctttctcctaggtctgtttggctacctagtgttcctggtgatctataaatggctttgcgtgtgggcggctagagccgcttcagccccttccattttgattcatttcataaacatgttcttgttcagtcactcacctagtaacagactgttgtatccgagacaggaagtagtacaagccaccctagtggtactcgccctcgctatggtgcctattcttctgcttggtacccccttgcacctgctgcatcggcatagaagaagactaaggcggaggccagctgataggcaagaggagaacaaggcgggtctcttggacctccctgacgcgtccgtgaatggctggtcctcggatgaggaaaaggctggcggtctggatgatgaggaagaggctgaactagtgccaagcgaggtgttgatgcatcaggccattcacactattgagttctgcctcgggtgcgtgtccaataccgcttcctacttaagattatgggcactgtcactcgcccacgcccagctcagtgaagtgctgtgggctatggtcatgcgcatcgggctcggactgggcagggaagtgggggttgccgctgtggtgctggtgccaattttcgccgctttcgcagtaatgaccgtggctattttgcttgtgatggagggcctgtctgccttcctccacgcactgcggctgcactgggtagaattccaaaacaagttttactccggcaccggatacaaattgtcacctttcaccttcgcggcaacagacgattag

SEQ ID NO: 341746 - DNA, 1845 bp, Artificial Sequence
  derived and/or modified sequence
atgacgtttctgatatcatactggggggaacagattggccagaaaatccggaaaattaccgactgcttccattgccacgtgttccctttcctgcagcaggaggaggccagactgggggcattacagcagctgcagcagcaaagtcaagaactgcaggaggttttaggtgaaacagagcgatttttgagccaggtcctcggcagagtcctacaactgttgcctcctggccaggtacaggtccacaagatgaaagctgtgtatcttgcattaaatcagtgcagcgtgtctactactcacaagtgtctgatcgcagaggcatggtgttctgttcgtgacttgccggcattgcaggaagcactacgggatagtagcatggaagaaggggtgagcgccgtcgcccacaggattccctgtcgggacatgccgcctacccttatccggactaatcgttttactgcttcgtttcagggtatcgttgatgcatacggagtgggtcggtatcaggaggtcaatccggctccgtacaccatcataaccttcccattcttgtttgctgtgatgttcggcgatgttggccacggactgctgatgtttctcttcgcccttgctatggtgctagctgagaaccggcctgccgtgaaggctgcacaaaacgagatatggcagacttttttccggggaaggtatttacttctgctgatggggctgttcagtatctataccggtttcatatataacgaatgcttctcccgcgctacatctatatttccaagcgggtggtcagtggccgcaatggcaaaccagtcgggctggagcgacgcctttctggcacagcataccatgctgaccctcgatcctaacgtgaccggcgtgtttctcgggccatacccctttgggatagaccctatctggtctctcgccgctaaccatctgtcttttcttaactctttcaagatgaagatgtccgtgatccttggggtagtgcacatggccttcggagtggtccttggtgtgttcaaccacgttcattttgggcaaagacacagacttctcctcgagactctgccggaactgacctttctgttgggcctgttcggctatcttgtgtttttggtgatttataaatggctttgtgtctgggcagccagggccgcttccgccccatctatattgattcatttcatcaacatgtttctgttttcacactcaccctctaatcgactgttgtatcccaggcaggaagtggtgcaggctactctggtggtgctggccttggccatggtccccattctgttgttggggaccccactccacctgcttcacaggcaccgccgtcgtctgcgcaggagacctgcggatcgtcaggaagaaaacaaagccggactgctggaccttcccgatgcatccgtgaatgggtggtcctctgacgaggagaaggcgggtggattagatgatgaagaggaggccgagctggtcccgagtgaggtactgatgcatcaggcgatccacaccattgaattctgcctcggctgcgtatcgaatacagcatcttacctcaggttgtgggcactgagtctggcgcatgcgcagctttccgaggtgctgtgggctatggtaatgcgcattgggctcgggctgggacgtgaagtgggagttgcggctgttgtgcttgtgccaattttcgcagcatttgccgtgatgaccgtggccattcttttggttatggagggattgtctgcctttctccacgcccttagactccattgggtcgaattccagaataaattttattcaggaactggatacaagctgtctcctttcacatttgctgcgactgacgactag

SEQ ID NO: 341747 - DNA, 2677 bp, Artificial Sequence
  derived and/or modified sequence
gcggcgcctagtcccgggctggcgggagtgcagttctgagtcccgcccggcgtgcgcggagcggggcagccagcagcggaggcgcggcgcgcagcacacccggggaccatgggctccatgttccggagcgaggaggtggccctggtccagctctttctgcccacagcggctgcctacacctgcgtgagtcggctgggcgagctgggcctcgtggagttcagagacctcaacgcctcggtgagcgccttccagagacgctttgtggttgatgttcggcgctgtgaggagctggagaagaccttcaccttcctgcaggaggaggtgcggcgggctgggctggtcctgcccccgccaaaggggaggctgccggcacccccaccccgggacctgctgcgcatccaggaggagacggagcgcctggcccaggagctgcgggatgtgcggggcaaccagcaggccctgcgggcccagctgcaccagctgcagctccacgccgccgtgctacgccagggccatgaacctcagctggcagccgcccacacagatggggcctcagagaggacgcccctgctccaggcccccggggggccgcaccaggacctgagggtcaactttgtggcaggtgccgtggagccccacaaggcccctgccctagagcgcctgctctggagggcctgccgcggcttcctcattgccagcttcagggagctggagcagccgctggagcaccccgtgacgggcgagccagccacgtggatgaccttcctcatctcctactggggtgagcagatcggacagaagatccgcaagatcacggactgcttccactgccacgtcttcccgtttctgcagcaggaggaggcccgcctcggggccctgcagcagctgcaacagcagagccaggagctgcaggaggtcctcggggagacagagcggttcctgagccaggtgctaggccgggtgctgcagctgctgccgccagggcaggtgcaggtccacaagatgaaggccgtgtacctggccctgaaccagtgcagcgtgagcaccacgcacaagtgcctcattgccgaggcctggtgctctgtgcgagacctgcccgccctgcaggaggccctgcgggacagctcgatggaggagggagtgagtgccgtggctcaccgcatcccctgccgggacatgccccccacactcatccgcaccaaccgcttcacggccagcttccagggcatcgtggatgcctacggcgtgggccgctaccaggaggtcaaccccgctccctacaccatcatcaccttccccttcctgtttgctgtgatgttcggggatgtgggccacgggctgctcatgttcctgttcgccctggccatggtccttgcggagaaccgaccggctgtgaaggccgcgcagaacgagatctggcagactttcttcaggggccgctacctgctcctgcttatgggcctgttctccatctacaccggcttcatctacaacgagtgcttcagtcgcgccaccagcatcttcccctcgggctggagtgtggccgccatggccaaccagtctggctggagtgatgcattcctggcccagcacacgatgcttaccctggatcccaacgtcaccggtgtcttcctgggaccctacccctttggcatcgatcctatttggagcctggctgccaaccacttgagcttcctcaactccttcaagatgaagatgtccgtcatcctgggcgtcgtgcacatggcctttggggtggtcctcggagtcttcaaccacgtgcactttggccagaggcaccggctgctgctggagacgctgccggagctcaccttcctgctgggactcttcggttacctcgtgttcctagtcatctacaagtggctgtgtgtctgggctgccagggccgcctcggcccccagcatcctcatccacttcatcaacatgttcctcttctcccacagccccagcaacaggctgctctacccccggcaggaggtggtccaggccacgctggtggtcctggccttggccatggtgcccatcctgctgcttggcacacccctgcacctgctgcaccgccaccgccgccgcctgcggaggaggcccgctgaccgacaggaggaaaacaaggccgggttgctggacctgcctgacgcatctgtgaatggctggagctccgatgaggaaaaggcagggggcctggatgatgaagaggaggccgagctcgtcccctccgaggtgctcatgcaccaggccatccacaccatcgagttctgcctgggctgcgtctccaacaccgcctcctacctgcgcctgtgggccctgagcctggcccacgcccagctgtccgaggttctgtgggccatggtgatgcgcataggcctgggcctgggccgggaggtgggcgtggcggctgtggtgctggtccccatctttgccgcctttgccgtgatgaccgtggctatcctgctggtgatggagggactctcagccttcctgcacgccctgcggctgcactgggtggaattccagaacaagttctactcaggcacgggctacaagctgagtcccttcaccttcgctgccacagatgactagggcccactgcaggtcctgccagacctccttcctgacctctgaggcaggagaggaataaagacggtccgccctggca

SEQ ID NO: 341748 - DNA, 2457 bp, Artificial Sequence
  derived and/or modified sequence
ggacgcccctgctccaggcccccggggggccgcaccaggacctgagggtcaagtgagtgagggatgacctcatgccctttctggccagcccagaacccctggccagtcgctgggctgggccaggctgagctccgactccttgtccagtgctctccccaggctggccccgcctcctccttcaggcccggaacttcccacagtcccaagccctagccctagggggttctcctcttctggtcctgcccgggaggcctcctgccttcccctgtgggcagggccagtgtgcccaattgcccgattgcccgtgctgggcagggtcctgcccggggggcctggtgggggaggcagggcaggaggttggagcagccctgcccagccccgtggccgccagctttgtggcaggtgccgtggagccccacaaggcccctgccctagagcgcctgctctggagggcctgccgcggcttcctcattgccagcttcagggagctggagcagccgctggagcaccccgtgacgggcgagccagccacgtggatgaccttcctcatctcctactggggtgagcagatcggacagaagatccgcaagatcacggactgcttccactgccacgtcttcccgtttctgcagcaggaggaggcccgcctcggggccctgcagcagctgcaacagcagagccaggagctgcaggaggtcctcggggagacagagcggttcctgagccaggtgctaggccgggtgctgcagctgctgccgccagggcaggtgcaggtccacaagatgaaggccgtgtacctggccctgaaccagtgcagcgtgagcaccacgcacaagtgcctcattgccgaggcctggtgctctgtgcgagacctgcccgccctgcaggaggccctgcgggacagctcgatggaggagggagtgagtgccgtggctcaccgcatcccctgccgggacatgccccccacactcatccgcaccaaccgcttcacggccagcttccagggcatcgtggatgcctacggcgtgggccgctaccaggaggtcaaccccgctccctacaccatcatcaccttccccttcctgtttgctgtgatgttcggggatgtgggccacgggctgctcatgttcctgttcgccctggccatggtccttgcggagaaccgaccggctgtgaaggccgcgcagaacgagatctggcagactttcttcaggggccgctacctgctcctgcttatgggcctgttctccatctacaccggcttcatctacaacgagtgcttcagtcgcgccaccagcatcttcccctcgggctggagtgtggccgccatggccaaccagtctggctggagtgatgcattcctggcccagcacacgatgcttaccctggatcccaacgtcaccggtgtcttcctgggaccctacccctttggcatcgatcctatttggagcctggctgccaaccacttgagcttcctcaactccttcaagatgaagatgtccgtcatcctgggcgtcgtgcacatggcctttggggtggtcctcggagtcttcaaccacgtgcactttggccagaggcaccggctgctgctggagacgctgccggagctcaccttcctgctgggactcttcggttacctcgtgttcctagtcatctacaagtggctgtgtgtctgggctgccagggccgcctcggcccccagcatcctcatccacttcatcaacatgttcctcttctcccacagccccagcaacaggctgctctacccccggcaggaggtggtccaggccacgctggtggtcctggccttggccatggtgcccatcctgctgcttggcacacccctgcacctgctgcaccgccaccgccgccgcctgcggaggaggcccgctgaccgacaggaggaaaacaaggccgggttgctggacctgcctgacgcatctgtgaatggctggagctccgatgaggaaaaggcagggggcctggatgatgaagaggaggccgagctcgtcccctccgaggtgctcatgcaccaggccatccacaccatcgagttctgcctgggctgcgtctccaacaccgcctcctacctgcgcctgtgggccctgagcctggcccacgcccagctgtccgaggttctgtgggccatggtgatgcgcataggcctgggcctgggccgggaggtgggcgtggcggctgtggtgctggtccccatctttgccgcctttgccgtgatgaccgtggctatcctgctggtgatggagggactctcagccttcctgcacgccctgcggctgcactgggtggaattccagaacaagttctactcaggcacgggctacaagctgagtcccttcaccttcgctgccacagatgactagggcccactgcaggtcctgccagacctccttcctgacctctgaggcaggagaggaataaagacggtccgccctggca

SEQ ID NO: 341749 - protein, 61 aa, Artificial Sequence
  derived and/or modified sequence
DDEEEAELVPSEVLMHQAIHTIEFCLGCVSNTASYLRLWALSLAHARWNSRTSSTQARATS

SEQ ID NO: 341750 - protein, 118 aa, Artificial Sequence
  derived and/or modified sequence
MVPILLLGTPLHLLHRHRRRLRRRPADRQEENKAGLLDLPDASVNGWSSDEEKAGGLDDEEEAELVPSEVLMHQAIHTIEFCLGCVSNTASYLRLWALSLAHARWNSRTSSTQARATS

SEQ ID NO: 341751 - DNA, 186 bp, Artificial Sequence
  derived and/or modified sequence
gacgacgaggaggaggccgagctggtgcccagcgaggtgctgatgcaccaggccatccacaccatcgagttctgcctgggctgcgtgagcaacaccgccagctacctgagactgtgggccctgagcctggcccacgccagatggaacagcagaaccagcagcacccaggccagagccaccagctag

SEQ ID NO: 341752 - DNA, 357 bp, Artificial Sequence
  derived and/or modified sequence
atggtgcccatcctgctgctgggcacccccctgcacctgctgcacagacacagaagaagactgagaagaagacccgccgacagacaggaggagaacaaggccggcctgctggacctgcccgacgccagcgtgaacggctggagcagcgacgaggagaaggccggcggcctggacgacgaggaggaggccgagctggtgcccagcgaggtgctgatgcaccaggccatccacaccatcgagttctgcctgggctgcgtgagcaacaccgccagctacctgagactgtgggccctgagcctggcccacgccagatggaacagcagaaccagcagcacccaggccagagccaccagctag

SEQ ID NO: 341753 - DNA, 186 bp, Artificial Sequence
  derived and/or modified sequence
gacgacgaggaagaagcggagttagtacccagcgaagtgctgatgcaccaggctatccatacaatcgagttctgtctaggttgtgtgtctaacacggcctcttatttacgactctgggcactcagcttggcccacgcgaggtggaattcccgaacatcatcgacacaagccagagccacctcatag

SEQ ID NO: 341754 - DNA, 357 bp, Artificial Sequence
  derived and/or modified sequence
atggtcccaatactcctgctcggaaccccgctgcacttgttgcacaggcatcgccgacgcctgaggaggaggccagccgacagacaggaggagaataaagctgggttgctagacctacccgacgcctcagtgaacgggtggagctccgatgaggagaaggccgggggactcgatgacgaagaggaggcggaactcgttccctccgaagtcctaatgcaccaagccatacataccatcgagttctgtctcgggtgtgtgagtaatacagcgtcctatcttcgactgtgggccctgtcactggctcatgcaagatggaatagcagaacatcttccactcaggccagggctacatcctag

SEQ ID NO: 341755 - DNA, 186 bp, Artificial Sequence
  derived and/or modified sequence
gatgatgaggaggaggccgagctggtgcccagcgaggtgctgatgcaccaggccatccacaccatcgagttctgcctgggctgtgtgagcaacacagccagctacctgcggctgtgggccctgagcctggcccacgcccgctggaacagcaggaccagcagcacccaggcccgggccaccagctag

SEQ ID NO: 341756 - DNA, 357 bp, Artificial Sequence
  derived and/or modified sequence
atggtgcccatcctgctgctgggcacccccctgcacctgctgcaccgccacagaagaaggctgcggcggcggcctgctgaccggcaggaggagaacaaggccggcctgctggacctgcctgatgcctctgtgaatggctggagcagtgatgaggagaaggccggcggcctggatgatgaggaggaggccgagctggtgcccagcgaggtgctgatgcaccaggccatccacaccatcgagttctgcctgggctgtgtgagcaacacagccagctacctgcggctgtgggccctgagcctggcccacgcccgctggaacagcaggaccagcagcacccaggcccgggccaccagctag

SEQ ID NO: 341757 - DNA, 186 bp, Artificial Sequence
  derived and/or modified sequence
gacgacgaggaggaggccgagctggtgcccagcgaggtgctgatgcatcaagcaattcatactattgaattttgcctgggatgtgtgtccaacaccgcttcgtatcttcgcctctgggcgctgtctctcgctcatgccaggtggaattccaggaccagttctactcaggccagggccacctcttag

SEQ ID NO: 341758 - DNA, 357 bp, Artificial Sequence
  derived and/or modified sequence
atggtgcccatcctgctgctgggcacccccctgcacctgctgcaccgccacagacgcaggctccggcgacggcccgcagaccgtcaggaggaaaataaagcgggactgttggacctgcctgacgcgtctgtaaatgggtggtcatccgacgaggagaaggcggggggcctggatgacgaggaggaggctgagctggtaccaagtgaggtactcatgcaccaggccattcacacaattgagttttgtctgggatgtgtgagtaatacagcatcttatctgcgcctgtgggctctctctctcgcacatgcccgatggaactctcgcacctcctccactcaagcccgcgctacgagctag

SEQ ID NO: 341759 - DNA, 186 bp, Artificial Sequence
  derived and/or modified sequence
gacgacgaagaagaggccgagctggtgccaagcgaggtgttaatgcatcaagcgatccacactatcgagttctgcctgggctgcgtatcaaacactgccagttatttgaggctgtgggcattgagcctcgcgcatgccagatggaactcgcgcacttctagtacacaagccagagcaacctcatag

SEQ ID NO: 341760 - DNA, 357 bp, Artificial Sequence
  derived and/or modified sequence
atggtcccaatcttactgctgggcacccccttgcatctgctccatagacatcgcagaaggctgaggaggagaccggctgatcgtcaggaggaaaataaagccggactgctggacctgcctgatgctagcgtgaatggttggagctcggacgaagaaaaagctgggggtctggatgatgaagaggaagccgagctcgtcccaagtgaggtgctcatgcatcaagctatacacactatcgagttttgcctcggttgtgtgtccaacacggcctcttatttacggctctgggcgctgtctttggcacatgcgcgttggaactcccgcacttcttctactcaagctagagctacttcatag

SEQ ID NO: 341761 - DNA, 220 bp, Artificial Sequence
  derived and/or modified sequence
gatgatgaagaggaggccgagctcgtcccctccgaggtgctcatgcaccaggccatccacaccatcgagttctgcctgggctgcgtctccaacaccgcctcctacctgcgcctgtgggccctgagcctggcccacgcccggtggaattccagaacaagttctactcaggcacgggctacaagctgagtcccttcaccttcgctgccacagatgactaggg

SEQ ID NO: 341762 - DNA, 1477 bp, Artificial Sequence
  derived and/or modified sequence
cctggtgctctgtgcgagacctgcccgccctgcaggaggccctgcgggacagctcgatggaggagggagtgagtgccgtggctcaccgcatcccctgccgggacatgccccccacactcatccgcaccaaccgcttcacggccagcttccagggcatcgtggatgcctacggcgtgggccgctaccaggaggtcaaccccgctccctacaccatcatcaccttccccttcctgtttgctgtgatgttcggggatgtgggccacgggctgctcatgttcctgttcgccctggccatggtccttgcggagaaccgaccggctgtgaaggccgcgcagaacgagatctggcagactttcttcaggggccgctacctgctcctgcttatgggcctgttctccatctacaccggcttcatctacaacgagtgcttcagtcgcgccaccagcatcttcccctcgggctggagtgtggccgccatggccaaccagtctggctggaggtgaggcccgggccccagcccggctgggggccccgcagcacccgcagccctgaccgccctcccctgcgttgccgcagtgatgcattcctggcccagcacacgatgcttaccctggatcccaacgtcaccggtgtcttcctgggaccctacccctttggcatcgatcctatttggagcctggctgccaaccacttgagcttcctcaactccttcaagatgaagatgtccgtcatcctgggcgtcgtgcacatggcctttggggtggtcctcggagtcttcaaccacgtgcactttggccagaggcaccggctgctgctggagacgctgccggagctcaccttcctgctgggactcttcggttacctcgtgttcctagtcatctacaagtggctgtgtgtctgggctgccagggccgcctcggcccccagcatcctcatccacttcatcaacatgttcctcttctcccacagccccagcaacaggctgctctacccccggcaggaggtggtccaggccacgctggtggtcctggccttggccatggtgcccatcctgctgcttggcacacccctgcacctgctgcaccgccaccgccgccgcctgcggaggaggcccgctgaccgacaggaggaaaacaaggccgggttgctggacctgcctgacgcatctgtgaatggctggagctccgatgaggaaaaggcagggggcctggatgatgaagaggaggccgagctcgtcccctccgaggtgctcatgcaccaggccatccacaccatcgagttctgcctgggctgcgtctccaacaccgcctcctacctgcgcctgtgggccctgagcctggcccacgcccggtggaattccagaacaagttctactcaggcacgggctacaagctgagtcccttcaccttcgctgccacagatgactagggcccactgcaggtcctgccagacctccttcctgacctctgaggcagga

SEQ ID NO: 341763 - DNA, 189 bp, Artificial Sequence
  derived and/or modified sequence
atgctgcaggtggtgcaggagggcaaccccgcccccttcatcatcaacaccgtgaaacgaggacgtcgtgaccgagagcggcagcgaaccccttgggcacctcacccactggggttccaggagcgtagatacatatatgaatcaccaaatcaccgaggaaaggacagcagcttcttggcccagaagtag

SEQ ID NO: 341764 - DNA, 657 bp, Artificial Sequence
  derived and/or modified sequence
atgggcagcatgttcagaagcgaggaggtggccctggtgcagctgttcctgcccaccgccgccgcctacacctgcgtgagcagactgggcgagctgggcctggtggagttcagagacctgaacgccagcgtgagcgccttccagagaagattcgtggtggacgtgagaagatgcgaggagctggagaagaccttcaccttcctgcaggaggaggtgagaagagccggcctggtgctgcccccccccaagggcagactgcccgcccccccccccagagacctgctgagaatccaggaggagaccgagagactggcccaggagctgagagacgtgagaggcaaccagcaggccctgagagcccagctgcaccagctgcagctgcacgccgccgtgctgagacagggccacgagccccagctggccgccgcccacaccgacggcgccagcgagagaacccccctgctgcaggcccccggcggcccccaccaggacctgagagtgaacttcgtggccggcgccgtggagccccacaaggcccccgccctggagagactgctgtggagagcctgcagaggcttcctgatcgccagcttcagagagctggagcagcccctggagcaccccgtgaccggcgagcccgccacctggatgacctag

SEQ ID NO: 341765 - DNA, 657 bp, Artificial Sequence
  derived and/or modified sequence
atggggtccatgttcagatccgaggaagtggcgctggtgcagctgtttctccccaccgctgcagcctacacctgcgtcagtaggttgggggagttaggccttgtcgaattccgagatctaaacgcaagcgtgtccgcttttcagagacgctttgtggtggacgtaagacgctgcgaagaattagagaagacgtttacgttcctgcaggaggaagtacggagggccggacttgtcctccccccccccaaggggagactgccggcaccgccgccacgggacctcctgcgaatccaggaggaaaccgagcgactggcccaggagctccgagacgtccggggcaaccagcaagccttgcgagcccagctacaccagctgcagctccatgctgcagtgcttcgccaaggccacgagccgcagctggcggcagctcacactgatggcgcatctgaaaggacaccactactgcaagccccaggcgggccgcatcaggatctgcgggttaacttcgtcgccggggcagtggagccccacaaagctcccgccctggagcgactcttatggcgggcctgtcgcgggtttctgattgcctccttcagagaactggagcaacctctggaacaccctgttacaggggaacccgccacctggatgacctag

SEQ ID NO: 341766 - DNA, 657 bp, Artificial Sequence
  derived and/or modified sequence
atgggctccatgttccgctctgaggaggtggccctggtgcagctgttcctgcccacagctgctgcctacacctgtgtgtcccggctgggggagctgggcctggtggagttccgggacctgaatgcctctgtgtctgccttccagaggagatttgtggtggatgtgcggcgctgtgaggagctggagaagaccttcaccttcctgcaggaggaggtgagaagagctggcctggtgctgcccccacccaagggccgcctgcctgcccccccaccccgggacctgctgcgcatccaggaggagacagagcggctggcccaggagctgagagatgtgcggggcaaccagcaggccctgcgggcccagctgcaccagctgcagctgcatgctgctgtgctgcggcagggccacgagccccagctggccgccgcccacacagatggagccagcgagaggacccccctgctgcaggcccctgggggcccccaccaggacctgcgggtgaactttgtggccggggctgtggagccccacaaggccccagccctggagcggctgctgtggagggcctgccggggcttcctgattgccagcttccgggagctggagcagcccctggagcaccctgtgactggagagcccgccacctggatgacctag

SEQ ID NO: 341767 - DNA, 657 bp, Artificial Sequence
  derived and/or modified sequence
atgggcagcatgttccggagcgaggaggtggccctggtgcagctgttcctgccgacagcagctgcctacacttgcgtgtcccgccttggcgaactcggcctggtggagttccgggacctcaacgctagtgtgtcagcttttcagcgtcgcttcgtagtagacgtgagaagatgcgaggaactagagaaaacctttaccttcctgcaggaggaagtgcggagagccgggctggtgttaccgcctcccaaaggaagactgccggcacccccccctcgtgacctcctccggatccaggaggagacagaaaggctcgcccaggagctcagggatgttcgggggaaccagcaggccttaagagcgcagctgcatcaactacaactgcatgcagccgtccttagacaggggcacgagcctcaactggctgcggcccatactgacggcgcatcagagagaactcctctcttgcaggcacccggcggacctcatcaggatcttagggtgaattttgtagcgggggctgtggaaccccacaaagcccccgcactagaaaggctgctgtggagagcctgcagaggcttcctcatagcttcctttagagagctagagcaaccgctcgagcatccagttaccggcgagcctgccacctggatgacctag

SEQ ID NO: 341768 - DNA, 609 bp, Artificial Sequence
  derived and/or modified sequence
atgtctttccctcccttgtggcctacacgccatgtgccggcttcgcaccccacttgcccactgcttcctggcccttgttgttgtccacattgtctctgtgattctgctccacccagcctcccttgtccgaccttagtgcagggcgcttcaagaccaatactgattttgcgagccttcccgggtccttgtcactcagttccttgccatgacttaaagctgcaagtgggagcatctccctttcggcatggttgcccaccaagcgtgcgttgtccatcaagactgatagccggtgtgcccggttgttcagtgttatcatggtcattgggccatagcctgagtggtattgattctagggtgggcgctacccctggtctgggccactccctctcctgggttcgggctcctcccggtctgggacacagcctgagcggtgtgggagccacccctgggcttgggcacctcctatctggggtcggcgcatcaccaggcgaagacaccgaacatgctgccgctctgacaccttgtggcgtgcctcctgttccgggatgtcgctctcatagccagcctctgtctcacttagtgtctagcagccggtgttgtgggccttag

SEQ ID NO: 341769 - DNA, 657 bp, Artificial Sequence
  derived and/or modified sequence
atgggatccatgttcagatctgaggaggtggcccttgttcagctgttcttacccacagccgcagcatacacatgtgtgtctcggctgggcgagctggggctggtggagttcagggatctgaacgccagcgtctccgccttccagaggcggtttgtggttgacgtacggagatgcgaggagctcgagaaaaccttcacgttcttgcaagaggaggtgagacgcgctggcctggtactgccccctccgaagggccgactccctgcaccaccgccacgggatttactgcgcatccaggaggaaacggagcggctggcccaggagctgcgggatgtgcgcggaaatcaacaggcattgagagcccagctccatcagctgcagttgcatgccgcagttttgcggcagggtcacgaaccccagctcgcagccgcacatactgatggagccagcgagcgaactccacttcttcaggctccgggagggccacatcaagatttgagagtgaattttgtcgcaggcgcagttgagccgcacaaagctcctgccttggagcgcctcctttggagggcatgccgcggattcttaatcgctagtttccgcgagctggagcagcccttggagcacccggtgactggagaacccgcaacatggatgacctag

SEQ ID NO: 341770 - DNA, 842 bp, Artificial Sequence
  derived and/or modified sequence
gcagcacacccggggttgttcccccaccccctgggaagtgctggaaggagcccggccctcgagccctcggcatagtggctgtgggagccctgatggccctgagccaggggtgacccctccccagatccccagagctgattccccacacctccttatttggccagcacagccccaaagggagccaggaccatgggctccatgttccggagcgaggaggtggccctggtccagctctttctgcccacagcggctgcctacacctgcgtgagtcggctgggcgagctgggcctcgtggagttcagagacctcaacgcctcggtgagcgccttccagagacgctttgtggttgatgttcggcgctgtgaggagctggagaagaccttcaccttcctgcaggaggaggtgcggcgggctgggctggtcctgcccccgccaaaggggaggctgccggcacccccaccccgggacctgctgcgcatccaggaggagacggagcgcctggcccaggagctgcgggatgtgcggggcaaccagcaggccctgcgggcccagctgcaccagctgcagctccacgccgccgtgctacgccagggccatgaacctcagctggcagccgcccacacagatggggcctcagagaggacgcccctgctccaggcccccggggggccgcaccaggacctgagggtcaactttgtggcaggtgccgtggagccccacaaggcccctgccctagagcgcctgctctggagggcctgccgcggcttcctcattgccagcttcagggagctggagcagccgctggagcaccccgtgacgggcgagccagccacgtggatgac

SEQ ID NO: 341771 - DNA, 1284 bp, Artificial Sequence
  derived and/or modified sequence
atgctgtacgactacgtggagagaaagagaaaggagaacagcggcgcccagctgcacgtgacctacctggtgagcggcagcctgatccagaacggccacagctgccacaaggtggccgtggtgagagaggacaagctggaggccgtgaagagcaagctggccgtgaccgccagcatccacgtgtacagcatccagaaggccatgctgaaggacagcggccccctgttcaacaccgactacgacatcctgaagagcaacctgcagaactgcagcaagttcagcgccatccagtgcgccgccgccgtgcccagagcccccgccgagagcagcagcagcagcaagaagttcgagcagagccacctgcacatgagcagcgagacccaggccaacaacgagctgaccaccaacggccacggcccccccgccagcaagcaggtgagccagcagcccaagggcatcatgggcatgttcgccagcaaggccgccgccaagacccaggagaccaacaaggagaccaagaccgaggccaaggaggtgaccaacgccagcgccgccggcaacaaggcccccggcaagggcaacatgatgagcaacttcttcggcaaggccgccatgaacaagttcaaggtgaacctggacagcgagcaggccgtgaaggaggagaagatcgtggagcagcccaccgtgagcgtgaccgagcccaagctggccacccccgccggcctgaagaagagcagcaagaaggccgagcccgtgaaggtgctgcagaaggagaagaagagaggcaagagagtggccctgagcgacgacgagaccaaggagaccgagaacatgagaaagaagagaagaagaatcaagctgcccgagagcgacagcagcgaggacgaggtgttccccgacagccccggcgcctacgaggccgagagccccagccccccccccccccccagcccccccctggagcccgtgcccaagaccgagcccgagccccccagcgtgaagagcagcagcggcgagaacaagagaaagagaaagagagtgctgaagagcaagacctacctggacggcgagggctgcatcgtgaccgagaaggtgtacgagagcgagagctgcaccgacagcgaggaggagctgaacatgaagaccagcagcgtgcacagaccccccgccatgaccgtgaagaaggagcccagagaggagagaaagggccccaagaagggcaccgccgccctgggcaaggccaacagacaggtgagcatcaccggcttcttccagagaaagtag

SEQ ID NO: 341772 - DNA, 1083 bp, Artificial Sequence
  derived and/or modified sequence
atgctgaaggacagcggccccctgttcaacaccgactacgacatcctgaagagcaacctgcagaactgcagcaagttcagcgccatccagtgcgccgccgccgtgcccagagcccccgccgagagcagcagcagcagcaagaagttcgagcagagccacctgcacatgagcagcgagacccaggccaacaacgagctgaccaccaacggccacggcccccccgccagcaagcaggtgagccagcagcccaagggcatcatgggcatgttcgccagcaaggccgccgccaagacccaggagaccaacaaggagaccaagaccgaggccaaggaggtgaccaacgccagcgccgccggcaacaaggcccccggcaagggcaacatgatgagcaacttcttcggcaaggccgccatgaacaagttcaaggtgaacctggacagcgagcaggccgtgaaggaggagaagatcgtggagcagcccaccgtgagcgtgaccgagcccaagctggccacccccgccggcctgaagaagagcagcaagaaggccgagcccgtgaaggtgctgcagaaggagaagaagagaggcaagagagtggccctgagcgacgacgagaccaaggagaccgagaacatgagaaagaagagaagaagaatcaagctgcccgagagcgacagcagcgaggacgaggtgttccccgacagccccggcgcctacgaggccgagagccccagccccccccccccccccagcccccccctggagcccgtgcccaagaccgagcccgagccccccagcgtgaagagcagcagcggcgagaacaagagaaagagaaagagagtgctgaagagcaagacctacctggacggcgagggctgcatcgtgaccgagaaggtgtacgagagcgagagctgcaccgacagcgaggaggagctgaacatgaagaccagcagcgtgcacagaccccccgccatgaccgtgaagaaggagcccagagaggagagaaagggccccaagaagggcaccgccgccctgggcaaggccaacagacaggtgagcatcaccggcttcttccagagaaagtag

SEQ ID NO: 341773 - DNA, 1284 bp, Artificial Sequence
  derived and/or modified sequence
atgctctacgactatgtggagaggaaaaggaaagaaaactccggtgctcagctgcatgtgacatatctcgtatctgggtcccttattcagaatggccactcatgccacaaagtggccgtcgtccgggaagacaagttggaagccgtcaaatctaaactcgccgtgaccgcaagcatccatgtctattcaatccagaaagccatgctcaaagatagtggacctttgtttaataccgactacgacatccttaagagtaatttgcagaattgctctaagttttcagcaattcaatgcgccgctgcggttcccagagcacccgctgaaagctctagctcctcgaagaagttcgaacaatcacacttacacatgtcttccgaaacacaggccaacaatgagttgacaaccaacgggcacggccccccggctagtaagcaggtgagtcagcagcccaaagggattatgggtatgtttgcaagcaaggccgcagccaaaacgcaagagacgaataaggaaaccaaaaccgaagctaaggaagtgactaacgcaagtgccgccggtaacaaggcaccaggaaaggggaacatgatgtctaacttttttggaaaggcagccatgaacaaattcaaagtaaatctggacagtgagcaggctgtgaaggaagagaagatcgtggaacagccaacagtgtcagtaaccgagcctaaacttgcaaccccagcaggattgaagaagtcctccaagaaggcagaaccagtcaaagtcttacagaaggaaaagaagcgaggtaaacgtgtggcactgagtgacgatgagaccaaagagacggagaacatgaggaagaaacgacgccgcatcaagctccctgaatccgattctagcgaggatgaagtgttccctgacagtcctggagcctacgaggccgagtcccccagcccccctcctcccccgagcccgcccctggagcctgtgcccaaaacagagccggaacccccaagcgttaagtctagctccggggagaataagcggaagcgcaagcgcgttctgaaatcaaagacatacctcgacggcgaaggctgtatagtgacagagaaagtgtacgagagcgagtcctgcacagattcagaagaggagctgaacatgaaaacgtccagcgtgcaccgccctccagctatgaccgtcaagaaggagccgagggaagagaggaagggtcctaagaaggggactgcagccctgggcaaagccaatcgacaggtgagcatcaccggtttcttccagagaaaatag

SEQ ID NO: 341774 - DNA, 1083 bp, Artificial Sequence
  derived and/or modified sequence
atgctgaaggatagcggccccttgttcaataccgattacgatattttgaagtctaatttgcagaattgttccaaattctcagctatccaatgcgctgcagcagtgccccgtgcaccggccgaaagtagcagttcgagtaagaagttcgaacagagccatctccacatgtcctctgaaacacaggctaataatgaactgacaaccaatggacacggccctcccgccagtaagcaggtgtcccagcagccaaaaggtattatggggatgttcgccagcaaagcggcggctaagacccaggagaccaacaaggaaacaaagactgaggctaaagaggtgaccaacgcaagtgcagcagggaacaaggcacccgggaaaggaaatatgatgagtaactttttcggcaaggccgctatgaacaagtttaaggtgaatctggattccgagcaggccgtgaaagaggagaaaatcgtggaacagcctacggtttccgtgactgagccaaagctcgctacccctgcgggcctgaaaaaatcatctaagaaggcggaacctgtaaaagtcctacagaaggaaaaaaaacgagggaaacgggtcgccctgagcgatgacgaaacaaaggagactgagaatatgagaaaaaagcgacgccgtataaaactgcctgaatctgattcatcagaggatgaagtgttccccgacagccccggtgcttacgaggcagagtcccccagtccccctcctcccccttcgccaccgttggagcctgtgccaaagacagagcctgagccaccctcggtaaagagcagctcaggagagaataagcggaaacggaaaagagttctcaaaagtaagacgtatcttgacggtgaaggttgtatcgtcaccgagaaagtgtacgagagtgagagctgtacagacagtgaggaagaactgaatatgaaaacgtccagcgtccacaggcccccagcgatgaccgtgaaaaaggaacctagagaagagcgcaagggtcccaagaagggcacggctgctctcggcaaggccaacaggcaggtaagtatcaccggcttcttccagaggaagtag

SEQ ID NO: 341775 - DNA, 1284 bp, Artificial Sequence
  derived and/or modified sequence
atgctgtatgactatgtggagaggaagaggaaggagaacagcggggcccagctgcacgtgacctacctggtgtctggcagcctcatccagaatggccacagctgccacaaggtggccgtggtgcgggaggacaagctggaggccgtgaagagcaagctggccgtgacagccagcatccacgtgtacagcatccagaaggccatgctgaaggacagcggccccctcttcaacacagattatgacatcctgaagagcaacctgcagaactgcagcaagttcagcgccatccagtgtgccgctgctgtgccccgggccccagctgagagcagcagcagcagcaagaagtttgagcagagccacctgcacatgagcagcgagacccaggccaacaatgagctgaccaccaacggccacggccccccagccagcaagcaggtgtcccagcagcccaagggcatcatgggcatgtttgccagcaaggccgccgccaagacccaggagaccaacaaggagaccaagacagaggccaaggaggtgaccaatgccagcgctgctggcaacaaggcccctgggaagggcaacatgatgagcaacttcttcggcaaggccgccatgaacaagttcaaggtgaacctggacagcgagcaggccgtgaaggaggagaagatcgtggagcagcccaccgtgtctgtgacagagcccaagctggccaccccagctggcctgaagaagagcagcaagaaggccgagcctgtgaaggtgctgcagaaggagaagaagaggggcaagagggtggccctgagtgatgatgagaccaaggagacagagaacatgaggaagaagagaagacgcatcaagctgcctgagagtgacagcagtgaagatgaggtgtttcctgacagccctggggcctatgaagctgagagccccagccccccacctccacccagcccccccctggagcctgtgcccaagacagagcctgagccccccagcgtgaagagcagcagtggagagaacaagaggaagaggaagagggtgctgaagagcaagacctacctggatggagagggctgcatcgtgacagagaaggtgtatgagagcgagagctgcacagacagcgaggaggagctgaacatgaagaccagctctgtgcaccggcccccagccatgacagtgaagaaggagccccgggaggagaggaagggccccaagaagggcacagctgccctgggcaaggccaaccggcaggtgtccatcaccggcttcttccagaggaagtag

SEQ ID NO: 341776 - DNA, 1083 bp, Artificial Sequence
  derived and/or modified sequence
atgctgaaggacagcggccccctcttcaacacagattatgacatcctgaagagcaacctgcagaactgcagcaagttcagcgccatccagtgtgccgctgctgtgccccgggccccagctgagagcagcagcagcagcaagaagtttgagcagagccacctgcacatgagcagcgagacccaggccaacaatgagctgaccaccaatggacatggccccccagccagcaagcaggtgtcccagcagcccaagggcatcatgggcatgtttgccagcaaggctgctgccaagacccaggagaccaacaaggagaccaagacagaggccaaggaggtgaccaatgccagcgctgctggcaacaaggcccctggaaaaggaaacatgatgagcaacttcttcggcaaggccgccatgaacaagttcaaggtgaacctggacagcgagcaggccgtgaaggaggagaagatcgtggagcagcccaccgtgtctgtgacagagcccaagctggccaccccagctggcctgaagaagagcagcaagaaggccgagcctgtgaaggtgctgcagaaggagaagaagaggggcaagagggtggccctgagtgatgatgagaccaaggagacagagaacatgaggaagaagagaagacgcatcaagctgcctgagagtgacagcagtgaagatgaggtgtttcctgacagccctggggcctatgaggccgagagccccagccccccacctccacccagcccccccctggagcctgtgcccaagacagagcctgagcccccatctgtgaagagcagcagcggggagaacaagaggaagaggaagagggtgctgaagagcaagacctacctggatggagagggctgcatcgtgacagagaaggtgtatgaaagtgagagctgcacagattctgaggaggagctgaacatgaagaccagctctgtgcaccggcccccagccatgacagtgaagaaggagccccgggaggagaggaagggccccaagaagggcacagctgccctgggcaaggccaaccggcaggtgtccatcaccggcttcttccagaggaagtag

SEQ ID NO: 341777 - DNA, 1284 bp, Artificial Sequence
  derived and/or modified sequence
atgctgtacgactacgtggagcggaagcggaaggagaacagcggcgctcagctgcacgttacttacctggtgtcaggtagcctcatccaaaacgggcactcctgtcataaagtagccgtggtgcgggaagataagttagaagcagtcaagagcaaactcgccgtgactgcctctattcacgtgtattccatccaaaaagccatgttgaaagactccggaccgctcttcaacactgactacgacatactgaaatctaacctgcagaattgttccaagtttagcgcaattcaatgcgcagctgcagttccacgggcaccagcggagagctcgtcgagcagcaaaaagttcgagcaaagtcacctgcacatgtcgagcgagacacaggccaacaacgagttaacgactaacggtcatggacctccagcctctaagcaggtatctcagcagccaaagggcatcatgggcatgtttgcttctaaggccgccgcaaagacccaggaaaccaataaggaaacaaaaacagaggctaaggaggttaccaacgccagtgccgcgggaaataaggctcctgggaaggggaacatgatgtccaatttcttcgggaaagctgcaatgaacaagtttaaggtgaaccttgattctgagcaggccgtcaaggaagagaaaattgttgaacagcctaccgtgtcggtcaccgagccaaaactcgcaacccccgcaggactcaagaagtcatcaaaaaaggctgaacctgtgaaagtactgcaaaaggagaagaaacgcgggaaaagggttgcactgagcgacgacgaaaccaaagaaacagagaatatgaggaagaagagacgacgcattaaactccctgagtcggactcatccgaggatgaggtctttcctgatagccctggcgcctacgaagctgaatcccctagccctcctccccctccgtccccccctctagagccagtgcccaagaccgagccagaaccacccagcgtcaagtcctcctctggagagaataagcggaagcgaaagcgagtgttaaaatccaagacatacttggatggcgagggttgtatcgtcaccgaaaaagtgtacgagtccgagtcttgcacagactccgaggaagagctcaacatgaagacttctagcgtccataggccccccgcaatgactgtcaagaaggagcctagagaggaacgaaagggccctaagaagggtaccgctgcactcggtaaggccaacaggcaagtgtctattacgggcttcttccaacgaaagtag

SEQ ID NO: 341778 - DNA, 1083 bp, Artificial Sequence
  derived and/or modified sequence
atgctgaaggacagcggccccctgttcaacaccgactacgacatcttgaaaagcaacttacagaactgctcgaagtttagcgcaatccagtgcgctgcggccgtgcctcgagccccagccgagtcaagttcgagttctaagaagttcgagcagagccacctgcacatgtcatccgagacccaggcgaacaatgagctcaccaccaatgggcacggacccccagcctccaagcaggtgagccagcagcctaagggcatcatgggcatgtttgcatcgaaggccgccgccaagacacaggaaaccaacaaagaaacaaaaaccgaagccaaggaagtaacaaatgcgtcagctgctggaaataaggcccccggcaaaggaaacatgatgtccaatttctttggtaaagccgctatgaataagtttaaggttaacttagactctgagcaggccgtgaaagaggaaaagatcgtggaacagcccactgtatccgttaccgagccaaaactggctaccccggctggtctgaagaagtcatccaagaaggcagagcccgtgaaggtcttgcagaaggaaaagaagcgtggtaagagggtggcactgtctgacgatgaaacgaaagagacagagaatatgcgtaagaagagacgccgaatcaaactccctgaatcagactccagtgaagatgaggtgttccccgatagccctggggcctatgaggcagagagtccatcaccgcctccaccacccagcccccctctggaaccagtgcctaagaccgaacccgagccaccatcagttaaatcgagcagcggcgaaaacaagcgcaaacgcaagcgggtcctgaagtccaaaacatacctggacggcgaaggctgcatcgtcaccgaaaaggtgtacgaatccgagagttgtactgacagcgaagaggaattgaacatgaaaacatcctccgtgcacaggccgccagcaatgactgtgaagaaagagccccgagaggagcgcaagggtcccaaaaaaggaaccgccgctcttgggaaagcgaatagacaggtgtcgataactggtttcttccaacgaaagtag

SEQ ID NO: 341779 - DNA, 1284 bp, Artificial Sequence
  derived and/or modified sequence
atgctctatgactatgtggagagaaagaggaaagagaacagcggtgcacagctccacgtgacatacctcgtcagtggatccctaattcaaaacgggcattcatgtcacaaggtggccgtagtacgggaagacaaattagaagccgtgaagtcaaagttagcggtgaccgcgtctattcatgtctatagcatccagaaggctatgctgaaggatagcggtccgctgttcaatactgattatgacattctgaaatccaatctccagaattgctcaaagttcagcgccatccagtgcgcggcagcagtcccaagggcacccgctgagtcttcgtcttccagcaagaaatttgagcagagtcacctacatatgtcatccgagacacaggccaacaatgagctgacaacgaacgggcacggcccacctgctagcaagcaagtctcccagcagcccaaagggattatggggatgttcgctagtaaagccgcagctaagactcaagagactaataaggagaccaagaccgaagccaaagaagtaaccaatgcgagtgcagccggaaacaaagccccagggaaaggcaatatgatgtcgaatttcttcggcaaagcagccatgaacaagttcaaagtgaatctggacagtgagcaggctgttaaagaagaaaaaatcgtggagcagccaactgtcagcgtgactgaaccaaaacttgcaaccccggctgggcttaagaagtccagcaaaaaggccgagccagtgaaggtccttcaaaaggagaagaaacggggaaagagagtcgccttatccgacgacgagaccaaggaaacggagaatatgaggaagaagaggaggcggatcaagctgccagagtccgactcttccgaggacgaagttttccccgacagtcctggcgcatacgaggcagagtctccaagcccgcctcccccaccatcaccaccgctagagcccgtccctaaaacggagccggagcctcctagcgtcaagagttcttcaggcgaaaataaaagaaagcggaaacgagtgctgaaaagtaaaacgtatttggacggggagggttgtattgtcaccgagaaggtttacgagtccgagtcgtgtacagacagcgaggaggaactgaatatgaaaacgtcatccgtgcatcgcccacccgcaatgaccgtgaagaaggagccacgagaggagagaaaaggacccaagaagggcaccgctgctttgggcaaggctaacaggcaggtatccattaccggtttttttcagagaaaatag

SEQ ID NO: 341780 - DNA, 1083 bp, Artificial Sequence
  derived and/or modified sequence
atgctgaaagatagtggaccacttttcaatactgactatgacattctcaagagtaacctccagaattgcagcaaattttctgcaattcagtgtgccgctgcagtgcccagagcacccgctgaatccagtagctcctcaaagaaattcgagcaaagccatctgcatatgagctccgagacccaggcgaataatgagctgaccaccaatgggcacggcccaccagctagtaaacaggtgagtcaacaaccaaagggtatcatgggaatgttcgccagcaaggctgcggctaaaacacaagagacaaacaaggagaccaagaccgaagctaaagaggtcactaacgcctctgccgcaggaaacaaggcacctggaaaaggaaatatgatgtccaactttttcggtaaggccgcaatgaacaaattcaaagttaacctggactccgaacaggctgttaaggaggaaaagatcgtggagcaacccactgtgagcgttaccgagcctaagctggcaactccagcagggctgaaaaaatcctctaagaaggccgaacccgtgaaggtactgcaaaaggagaagaagaggggcaagagagtagccctctctgatgatgagacgaaagaaaccgagaatatgagaaaaaaacgccgaaggatcaagctgcccgagagcgattccagtgaggatgaagtgttccccgatagtcctggagcctatgaagccgagtccccctcgcctccgccacccccttcaccaccactcgagcccgtccctaaaaccgaaccagaaccaccgagtgtaaagtcttcctccggtgagaataagcgtaagcgaaagagagtcctcaagtcaaaaacctacctcgatggagaaggctgcattgtaacagaaaaggtctatgagtccgagagctgtactgattcagaagaggagctgaatatgaagacgtcgtccgttcacagaccacccgctatgaccgtcaagaaggaaccacgggaagaaagaaagggtcccaaaaagggcactgcagcccttggaaaggctaacaggcaagtcagcattacaggattctttcaaagaaagtag

SEQ ID NO: 341781 - DNA, 2122 bp, Artificial Sequence
  derived and/or modified sequence
gctgtggctgtgattgagagaggggttagaggcgggtcccagcgctgccgcaccatggcggaccagctttatctggaaaatatagacgagttcgtcacggaccaaaacaagatcgtgagcagctactactggggaacgcgggcgtgcgaccggggtcctgggcccggctagggcggcgggagccttgaccctctgtctgcttgtggcttcgtggggaccaggggagacaggtccccacgaggggacctgggcgagctctgtgccccagagcgagcgaggactcgtcgggaaggtcctccagcacacacggaagtccgcgtcccttgggtgggcgtgctgggaacagagcctggggctggagccgcggagaccgggcgcggagggagggccgttggctgagagttctaaggcgtccctacacctttcttttaaggtgacatacaaatggctgagctatacactaggggttcatgttaaccaggccaaacagatgctgtatgattatgttgaaaggaaacgaaaagaaaattcaggagcccaactgcatgttacctacttggtgtctggcagtctcattcagaatggacattcctgccacaaggttgcagtagtgagagaagataaattggaagcagtgaagtccaagctagctgtgactgccagcatccatgtgtacagcatccagaaagccatgctaaaggacagtgggcctctgttcaatactgactatgacatccttaaaagcaacttgcagaactgcagcaaatttagtgctatacaatgtgcagctgccgtccctagagctcctgctgaatcctcttcgtcttccaaaaagtttgagcagtcacatcttcacatgtcaagtgagacacaagccaacaatgagctgaccaccaatggtcatggcccacctgcatccaagcaggtttcccagcagcccaaaggaattatgggaatgtttgcctccaaagctgctgctaaaacccaagaaaccaacaaggaaacgaaaacagaggctaaagaagtaacaaatgcatctgcagcaggcaacaaggcaccagggaaagggaatatgatgagcaacttttttggaaaagctgctatgaataaatttaaagtcaatttggactcagaacaagcagtgaaagaagaaaaaatagtggagcagcctacagtgtctgtcacggaaccaaagctggcaactcctgcaggcctgaaaaaatccagcaaaaaagcagagcctgttaaggtgctgcagaaggaaaaaaaaagggggaagcgagtagcattatctgatgatgagacaaaggaaactgaaaacatgaggaaaaagaggagaagaatcaaacttcctgaatctgatagcagtgaagatgaagtctttccagactctcctggggcttatgaagctgagtcaccatccccacctcctcctccgtctccacctcttgaaccagtgccaaagactgagcctgaacctccttctgtcaagagctcaagtggagaaaacaaaagaaaacgaaaacgcgtactaaaatctaaaacttacctggatggggaaggctgcatagtgactgaaaaagtctacgagagtgaatcctgcacagatagtgaagaggagcttaacatgaagacatcctcagtacacagaccccctgccatgactgtgaaaaaagaacccagagaggaacgaaagggccccaagaaagggactgctgctctgggcaaagccaacagacaggtgtccattactggcttcttccagaggaaataaactgccatctctggtagatcagagacttggagtggtcaagggagaagaccaagaaatgtactcctcacttactatgtaagttcatctagatctccacctcacctgtatcaaaagactgttctttcatcctgtgaggtttatactatttctggtttttaaccaaaaggaaatcatctggaagcaggaggcaaaaagctgttaccttctaatgacatttaaaaagcacagtctttgacctgtccaggagaaggatttactccaaaattatactggaacagttttcagaattctcactgaagccatttagtggctaacccactgtgctccactcaccctatgccctggtcc

SEQ ID NO: 341782 - DNA, 1700 bp, Artificial Sequence
  derived and/or modified sequence
gctgtggctgtgattgagagaggggttagaggcgggtcccagcgctgccgcaccatggcggaccagctttatctggaaaatatagacgagttcgtcacggaccaaaacaagatcgtgacatacaaatggctgagctatacactaggggttcatgttaaccaggccaaacatgccacaaggttgcagtagtgagagaagataaattggaagcagtgaagtccaagctagctgtgactgccagcatccatgtgtacagcatccagaaagccatgctaaaggacagtgggcctctgttcaatactgactatgacatccttaaaagcaacttgcagaactgcagcaaatttagtgctatacaatgtgcagctgccgtccctagagctcctgctgaatcctcttcgtcttccaaaaagtttgagcagtcacatcttcacatgtcaagtgagacacaagccaacaatgagctgaccaccaatggtcatggcccacctgcatccaagcaggtttcccagcagcccaaaggaattatgggaatgtttgcctccaaagctgctgctaaaacccaagaaaccaacaaggaaacgaaaacagaggctaaagaagtaacaaatgcatctgcagcaggcaacaaggcaccagggaaagggaatatgatgagcaacttttttggaaaagctgctatgaataaatttaaagtcaatttggactcagaacaagcagtgaaagaagaaaaaatagtggagcagcctacagtgtctgtcacggaaccaaagctggcaactcctgcaggcctgaaaaaatccagcaaaaaagcagagcctgttaaggtgctgcagaaggaaaaaaaaagggggaagcgagtagcattatctgatgatgagacaaaggaaactgaaaacatgaggaaaaagaggagaagaatcaaacttcctgaatctgatagcagtgaagatgaagtctttccagactctcctggggcttatgaagctgagtcaccatccccacctcctcctccgtctccacctcttgaaccagtgccaaagactgagcctgaacctccttctgtcaagagctcaagtggagaaaacaaaagaaaacgaaaacgcgtactaaaatctaaaacttacctggatggggaaggctgcatagtgactgaaaaagtctacgagagtgaatcctgcacagatagtgaagaggagcttaacatgaagacatcctcagtacacagaccccctgccatgactgtgaaaaaagaacccagagaggaacgaaagggccccaagaaagggactgctgctctgggcaaagccaacagacaggtgtccattactggcttcttccagaggaaataaactgccatctctggtagatcagagacttggagtggtcaagggagaagaccaagaaatgtactcctcacttactatgtaagttcatctagatctccacctcacctgtatcaaaagactgttctttcatcctgtgaggtttatactatttctggtttttaaccaaaaggaaatcatctggaagcaggaggcaaaaagctgttaccttctaatgacatttaaaaagcacagtctttgacctgtccaggagaaggatttactccaaaattatactggaacagttttcagaattctcactgaagccatttagtggctaacccactgtgctccactcaccctatgccctggtcc

SEQ ID NO: 341783 - protein, 259 aa, Artificial Sequence
  derived and/or modified sequence
MAFTLEERLQLGIHGLIPPCFLSQDVQLLRIMRYYERQQSDLDKYIILMTLQDRNEKLFYRVLTSDVEKFMPIVYTPTVGLACQHYGLTFRRPRGLFITIHDKGHLATMLNSWPEDNIKAVVVTDGERILGLGDLGCYGMGIPVGKLALYTACGGVNPQQCLPVLLDVGTNNEELLRDPLYIGLKHQRVHGKAYDDLLDEFMQAVTDKFGINCLIQFEDFANANAFRLLNKYRNKYCMFNDDIQDDFSRGPKRSQLFFK

SEQ ID NO: 341784 - DNA, 780 bp, Artificial Sequence
  derived and/or modified sequence
atggcattcacactggaagaaaggctgcagcttggaatccatggactgatcccaccttgctttctgtcccaagatgtgcagctccttcggattatgcgctactacgagaggcaacagtctgatcttgataagtatataattcttatgacactgcaggatagaaatgagaagctgttttacagagtgttaactagtgacgttgaaaaattcatgccaatcgtatataccccaactgttggcctggcctgccagcactacggcttgacttttcgtagaccgagaggcctgtttattacaattcacgacaagggccatcttgcaacaatgttaaatagctggccagaggacaatatcaaggccgtcgtcgtgaccgatggcgaaaggatcctcggcctgggggacctggggtgttacgggatggggattcccgtcggaaaactcgctctgtatacggcctgtgggggtgtgaatccacagcagtgcctacccgtgctcctggacgtggggactaacaatgaagaactcctacgcgatccactgtatatcggcctgaagcaccagagagtgcacggcaaggcctatgacgatctgttagacgaattcatgcaggctgttactgataaattcggcattaactgtcttattcaattcgaggatttcgccaacgccaacgcctttaggctgctgaataaatatcgaaataaatattgtatgttcaacgacgacatccaagatgacttttctaggggcccaaaaagaagccaactgttcttcaagtag

SEQ ID NO: 341785 - DNA, 780 bp, Artificial Sequence
  derived and/or modified sequence
atggccttcaccctggaggagcggctgcagctgggcatccacggcctcatccccccctgcttcctgagccaggatgtgcagctgctgcgcatcatgagatactatgagcggcagcagagcgacctggacaagtacatcatcctgatgaccctgcaggacagaaatgagaagctgttctacagagtgctgaccagtgatgtggagaagttcatgcccatcgtgtacacccccaccgtgggcctggcctgccagcactacggcctgaccttcagaagaccccggggcctcttcatcaccatccatgacaagggccacctggccaccatgctgaacagctggccagaggacaacatcaaggctgtggtggtgacagatggagagcgcatcctgggcctgggggacctgggctgctacggcatgggcatccctgtgggcaagctggccctgtacacagcctgtggcggcgtgaacccccagcagtgcctgcctgtgctgctggatgtgggcaccaacaatgaggagctgctgcgggaccccctgtacatcggcctgaagcaccagagggtgcacggcaaggcctatgatgacctgctggatgagttcatgcaggccgtgacagacaagtttggcatcaactgcctgatccagtttgaggactttgccaatgccaatgccttccggctgctgaacaagtacagaaacaagtactgcatgtttaatgatgacatccaggatgacttcagccggggccccaagaggagccagctgttcttcaagtag

SEQ ID NO: 341786 - DNA, 780 bp, Artificial Sequence
  derived and/or modified sequence
atggcctttacccttgaagaaaggctgcagcttggaatccacggcctaatcccgccctgctttctgagccaggacgtccagctcctccgaatcatgagatattacgagcggcagcagagtgacctggacaagtacatcattctcatgacactccaagaccggaacgagaagctcttctaccgagtgctgacttcggacgtggagaagttcatgccaatcgtgtacacgcctaccgtggggctggcctgtcagcactatggcctgactttccgcaggccccgtggactgttcatcaccattcatgacaaaggtcatcttgcaacaatgctgaattcttggccagaagacaatattaaggccgtggtggtgactgatggggagcgcatcctgggcctgggagacctgggctgctacggcatgggcatccctgtgggcaagctggccctgtacacggcatgcggaggggtgaacccgcagcagtgcctccctgtgctgctggacgtcggcaccaacaatgaggagctgctcagagaccctctgtacatcggcctgaaacaccagcgcgtgcacgggaaggcatacgatgacttgctggatgagttcatgcaggctgtgacagacaagtttggaataaattgcctcatccaatttgaagacttcgccaatgccaatgccttccgcctgctcaacaaataccgtaacaagtactgcatgttcaatgatgacatccaagatgacttctccagaggcccaaagaggtcacaacttttcttcaagtga

SEQ ID NO: 341787 - DNA, 780 bp, Artificial Sequence
  derived and/or modified sequence
atggccttcaccctggaggagcggctgcagctgggcatccacggcttgatcccaccctgttttctctcccaggatgtccagctcttacggattatgagatactatgaaagacagcaaagcgacttggataaatatattatcctcatgacattacaggatcgcaatgagaaactgttctatagggtgttgacaagcgacgtggaaaaatttatgccaatcgtttacaccccaaccgttggactagcttgtcagcactacggcctgacctttcgacgaccgagagggctgttcatcaccatacacgataaagggcacctggccactatgcttaacagctggcccgaggacaacattaaggctgttgtcgttactgatggggagagaatcctggggctgggagacctggggtgctatggtatgggcatacccgttggcaaactggccctgtatacggcgtgcggtggggtcaacccgcagcagtgcctcccagttctcctggacgtgggtactaacaatgaagagctcctccgggaccccctgtatatcggacttaagcatcaaagggtgcacgggaaggcctatgatgacctgctggacgaattcatgcaggcggtgacagacaagttcggaattaattgcctgattcagtttgaggactttgctaatgccaatgcttttagactcctgaataaatatagaaacaaatattgcatgttcaatgatgacattcaggacgattttagtcggggacccaagagatcccagctcttcttcaagtag

SEQ ID NO: 341788 - DNA, 780 bp, Artificial Sequence
  derived and/or modified sequence
atggctttcacactcgaggagcggctacagcttggaattcacggcctgattcccccttgcttcctttcccaagatgtacagcttctgcgtattatgaggtattacgagaggcagcaatctgatctggataaatatataattctgatgaccctccaggatcgaaacgaaaaactcttctatcgggttctcacgtcagacgtggaaaaattcatgccgatcgtctataccccaaccgtgggccttgcttgtcaacactatggccttaccttccgtcggccaaggggtttgtttataactatccatgacaagggacacctggccacaatgctgaattcctggcccgaagacaatatcaaagccgtagtagtgaccgacggagagagaattttaggcctgggggatcttggttgctatggcatgggcattcctgtgggcaagttggctctgtataccgcatgcggcggagttaaccctcaacagtgtctgccagtgttgctagatgttggcaccaacaatgaggaactgctccgtgaccccctctatataggtttgaagcatcaacgcgtgcacggaaaggcctacgatgatcttttggacgagttcatgcaagccgtcactgacaagttcggaatcaactgtcttatccagttcgaggatttcgctaatgccaacgcttttaggctccttaacaagtatcggaacaaatactgcatgttcaatgatgacatccaggacgacttttcccggggtcccaagaggtcccagttgttctttaaatag

SEQ ID NO: 341789 - DNA, 780 bp, Artificial Sequence
  derived and/or modified sequence
atggccttcaccctggaggagagactgcagctgggcatccacggcctgatccccccctgcttcctgagccaggacgtgcagctgctgagaatcatgagatactacgagagacagcagagcgacctggacaagtacatcatcctgatgaccctgcaggacagaaacgagaagctgttctacagagtgctgaccagcgacgtggagaagttcatgcccatcgtgtacacccccaccgtgggcctggcctgccagcactacggcctgaccttcagaagacccagaggcctgttcatcaccatccacgacaagggccacctggccaccatgctgaacagctggcccgaggacaacatcaaggccgtggtggtgaccgacggcgagagaatcctgggcctgggcgacctgggctgctacggcatgggcatccccgtgggcaagctggccctgtacaccgcctgcggcggcgtgaacccccagcagtgcctgcccgtgctgctggacgtgggcaccaacaacgaggagctgctgagagaccccctgtacatcggcctgaagcaccagagagtgcacggcaaggcctacgacgacctgctggacgagttcatgcaggccgtgaccgacaagttcggcatcaactgcctgatccagttcgaggacttcgccaacgccaacgccttcagactgctgaacaagtacagaaacaagtactgcatgttcaacgacgacatccaggacgacttcagcagaggccccaagagaagccagctgttcttcaagtag

SEQ ID NO: 341790 - DNA, 1029 bp, Artificial Sequence
  derived and/or modified sequence
atgggggccgcccttgggacaggcactcggcttgctccctggccaggccgggcatgcggagcgttgccgagatggactcctacagcgcctgcccaagggtgtcactccaagcccgggcctgctagaccggtgccactgaaaaaacgcgggtacgatgtaacccggaacccacatctcaataaggggatggcgtttactttagaagagcgtctgcaactcggaatacacggcctcatccccccctgcttcctgtctcaggatgtgcagttgttacgaattatgcgttattacgagcgccagcaaagcgatcttgacaagtacattatcctgatgaccctgcaagatagaaacgaaaaattgttctaccgggtgctgacatccgatgttgagaaatttatgcccatcgtatatacccccacagtaggtcttgcgtgccaacattacggcctgacctttcggaggccacgcggcctttttataactatccacgacaaggggcatctggcgaccatgctgaactcgtggcctgaggacaatataaaggcagtcgtcgtcacagatggagaacgtatcctaggccttggcgatctgggatgctatgggatggggatccccgttggaaaactcgccctgtacactgcttgcggcggggtgaatcctcagcagtgtctccccgtccttctggacgtgggaaccaacaatgaagaattgttaagggaccccctttatattgggctcaagcaccagcgcgtccacgggaaggcctacgacgacttgcttgatgaattcatgcaggctgtgacagataaatttggaattaactgtctgatacagttcgaggactttgccaacgctaatgccttcaggttgctcaataaatacagaaacaaatattgcatgttcaacgatgacattcagggtaccacatgtcacacattcagttgtccctggcatctgtgggcacaggtgatgtttcaacatattcctggacctatgggcttttccgagtggctcccaaggaactcatag

SEQ ID NO: 341791 - DNA, 189 bp, Artificial Sequence
  derived and/or modified sequence
atgggggcggccttgggtaccgggactcgcctagcaccctggccaggacgggcctgcggtgcacttccgcggtggacacccacggcccctgcgcagggttgccatagcaaacccggacccgccagaccagtgcctttaaagaagcgtggttacgatgtcaccagaaacccccatctgaacaaggtctag

SEQ ID NO: 341792 - DNA, 186 bp, Artificial Sequence
  derived and/or modified sequence
atgggagccgcgctggggacaggcacccgattggccccgtggcctggcagggcctgtggcgcacttccacgctggacacccacagcccctgcccagggatgtcactctaagcctggacccgcccgccccgtgccactgaaaaagcgcggatacgatgtgacgcgcaatccacacctgaacaaatag

SEQ ID NO: 341793 - DNA, 456 bp, Artificial Sequence
  derived and/or modified sequence
atgggagcagccctgggcacaggtactcgactggctccgtggcctggacgggcatgtggggccttacctcgctggacccccacggcccccgcacagggctgccactcgaaaccaggacctgcccggcctgtcccactcaagaaaagaggttacgatgtgaccaggaatccacatttgaataaaggtatggcattcacccttgaggaacggttgcaactgggtattcacggattgatccctccctgtttcctctcacaagacgttcagctgctgagaatcatgcgatactatgagagacaacaaagcgatctggataagtacatcatcctcatgacccttcaggaccgaaacgagaagctgttctatagagttctgacctccgacgtcgaaaaattcatgcccatcgtttacacacccacagtggggctggcctgtcagcactatggcctcacatag

SEQ ID NO: 341794 - DNA, 240 bp, Artificial Sequence
  derived and/or modified sequence
atgggcgccgcactcggaaccgggacacggttggctccatggcccggacgggcctgcggcgccttgccccgttggacacctactgctcccgcgcaaggctgtcactctaagcccgggcccgcaaggcccgtacccctgaagaaaagaggttacgatgtcacccggaacccacatctcaacaaggtgatggggcaacgagccggtaggcctgctctgcggagcaggggctgtcgaaaatag

SEQ ID NO: 341795 - DNA, 759 bp, Artificial Sequence
  derived and/or modified sequence
atggcattcacactggaggagcgtctgcagctgggaatccacggcctaatcccaccgtgttttctgtctcaggacgtgcagctgttacgaattatgcgatactatgagcgtcagcagagcgacctcgacaagtacatcatactgatgacactgcaagataggaatgaaaagttgttctatagagtgttgacatccgatgtagagaaatttatgccaatcgtgtacactcctacggtaggtcttgcctgtcaacattacggccttacttttcggcgtcccaggggacttttcatcacaatacacgacaagggtcacttagccacgatgttaaatagttggcctgaagataatattaaggcagtggtcgtgacagacggcgagcggatcctggggctgggtgatctgggctgctacggtatgggcattcccgtgggcaaactggccctctatacagcctgtggaggcgtgaaccctcagcaatgcttgcctgtcctgttggatgtcgggaccaacaatgaggaactccttagagaccccttgtacatagggctgaaacatcagcgggtccacggaaaggcctatgatgatctcttggacgaatttatgcaggccgttaccgacaaattcggaatcaattgcctgatccagtttgaagacttcgcaaacgctaatgccttccggctcttaaataagtaccgtaacaaatactgcatgttcaacgacgatatccaggcgccctcaaccgctcccgcaacatag

SEQ ID NO: 341796 - DNA, 1029 bp, Artificial Sequence
  derived and/or modified sequence
atgggcgccgccctgggcaccggcacccggctggccccctggccaggccgggcctgtggggccctgccccgctggacccccacagccccagcccagggctgccacagcaagccaggccctgcccggcctgtgcccctgaagaagaggggctatgatgtgaccaggaacccccacctgaacaagggcatggccttcaccctggaggagcggctgcagctgggcatccacggcctcatccccccctgcttcctgagccaggatgtgcagctgctgcgcatcatgagatactatgagcggcagcagagcgacctggacaagtacatcatcctgatgaccctgcaggacagaaatgagaagctgttctacagagtgctgaccagtgatgtggagaagttcatgcccatcgtgtacacccccaccgtgggcctggcctgccagcactacggcctgaccttcagaagaccccggggcctcttcatcaccatccatgacaagggccacctggccaccatgctgaacagctggccagaggacaacatcaaggctgtggtggtgacagatggagagcgcatcctgggcctgggggacctgggctgctacggcatgggcatccctgtgggcaagctggccctgtacacagcctgtggcggcgtgaacccccagcagtgcctgcctgtgctgctggatgtgggcaccaacaatgaggagctgctgcgggaccccctgtacatcggcctgaagcaccagagggtgcacggcaaggcctatgatgacctgctggatgagttcatgcaggccgtgacagacaagtttggcatcaactgcctgatccagtttgaggactttgccaatgccaatgccttccggctgctgaacaagtacagaaacaagtactgcatgtttaatgatgacatccagggcaccacctgccacaccttcagctgcccctggcacctgtgggcccaggtgatgttccagcacatccctggccccatgggcttcagcgagtggctgcccaggaacagctag

SEQ ID NO: 341797 - DNA, 189 bp, Artificial Sequence
  derived and/or modified sequence
atgggcgccgccctgggcaccggcacccggctggccccctggccaggccgggcctgtggggccctgccccgctggacccccacagccccagcccagggctgccacagcaagccaggccctgcccggcctgtgcccctgaagaagaggggctatgatgtgaccaggaacccccacctgaacaaggtgtag

SEQ ID NO: 341798 - DNA, 186 bp, Artificial Sequence
  derived and/or modified sequence
atgggcgccgccctgggcaccggcacccggctggccccctggccaggccgggcctgtggggccctgccccgctggacccccacagccccagcccagggctgccacagcaagccaggccctgcccggcctgtgcccctgaagaagaggggctatgatgtgaccaggaacccccacctgaacaagtag

SEQ ID NO: 341799 - DNA, 456 bp, Artificial Sequence
  derived and/or modified sequence
atgggcgccgccctgggcaccggcacccggctggccccctggccaggccgggcctgtggggccctgccccgctggacccccacagccccagcccagggctgccacagcaagccaggccctgcccggcctgtgcccctgaagaagaggggctatgatgtgaccaggaacccccacctgaacaagggcatggccttcaccctggaggagcggctgcagctgggcatccacggcctcatccccccctgcttcctgagccaggatgtgcagctgctgcgcatcatgagatactatgagcggcagcagagcgacctggacaagtacatcatcctgatgaccctgcaggacagaaatgagaagctgttctacagagtgctgaccagtgatgtggagaagttcatgcccatcgtgtacacccccaccgtgggcctggcctgccagcactacggcctgacctag

SEQ ID NO: 341800 - DNA, 240 bp, Artificial Sequence
  derived and/or modified sequence
atgggcgccgccctgggcaccggcacccggctggccccctggccaggccgggcctgtggggccctgccccgctggacccccacagccccagcccagggctgccacagcaagccaggccctgcccggcctgtgcccctgaagaagaggggctatgatgtgaccaggaacccccacctgaacaaggtgatgggccagagagctggccggcctgccctgcggagccggggctgcaggaagtag

SEQ ID NO: 341801 - DNA, 759 bp, Artificial Sequence
  derived and/or modified sequence
atggccttcaccctggaggagcggctgcagctgggcatccacggcctcatccccccctgcttcctgagccaggatgtgcagctgctgcgcatcatgagatactatgagcggcagcagagcgacctggacaagtacatcatcctgatgaccctgcaggacagaaatgagaagctgttctacagagtgctgaccagtgatgtggagaagttcatgcccatcgtgtacacccccaccgtgggcctggcctgccagcactacggcctgaccttcagaagaccccggggcctcttcatcaccatccatgacaagggccacctggccaccatgctgaacagctggccagaggacaacatcaaggctgtggtggtgacagatggagagcgcatcctgggcctgggggacctgggctgctacggcatgggcatccctgtgggcaagctggccctgtacacagcctgtggcggcgtgaacccccagcagtgcctgcctgtgctgctggatgtgggcaccaacaatgaggagctgctgcgggaccccctgtacatcggcctgaagcaccagagggtgcacggcaaggcctatgatgacctgctggatgagttcatgcaggccgtgacagacaagtttggcatcaactgcctgatccagtttgaggactttgccaatgccaatgccttccggctgctgaacaagtacagaaacaagtactgcatgtttaatgatgacatccaggcccccagcacagccccagccacctag

SEQ ID NO: 341802 - DNA, 1776 bp, Artificial Sequence
  derived and/or modified sequence
aaacgcaaatccccctctgtgcatttagtcttgccaagatggagagtctcaggcgggcattctgagctgcttcttgtcactggggaaaaccacgtgcacgcagtgctgaggcgccccacgcgcgtcctcaggggaagccaggcactgagaacaaaggttgtgggaccgctctttgaggaactcaccagctccgcgagctcgcggccgccagcgcggtccacccattggcgggagaggactcacagaccgcagctcctcaccccgcctgctccgcagcgggaccgcgtagacctcagctccccgagcagcgcaggtctgccaaggaccatgggtgccgcgctggggacaggcacgcggctggctccctggccgggccgggcctgcggcgccctcccgcgctggacacccaccgcgcccgcccaaggctgccactccaagcctggcccggcgcgccctgtgcccctgaagaagcgcggatacgatgtcaccaggaaccctcatctcaacaaggggatggcctttacccttgaagaaaggctgcagcttggaatccacggcctaatcccgccctgctttctgagccaggacgtccagctcctccgaatcatgagatattacgagcggcagcagagtgacctggacaagtacatcattctcatgacactccaagaccggaacgagaagctcttctaccgagtgctgacttcggacgtggagaagttcatgccaatcgtgtacacgcctaccgtggggctggcctgtcagcactatggcctgactttccgcaggccccgtggactgttcatcaccattcatgacaaaggtcatcttgcaacaatgctgaattcttggccagaagacaatattaaggccgtggtggtgactgatggggagcgcatcctgggcctgggagacctgggctgctacggcatgggcatccctgtgggcaagctggccctgtacacggcatgcggaggggtgaacccgcagcagtgcctccctgtgctgctggacgtcggcaccaacaatgaggagctgctcagagaccctctgtacatcggcctgaaacaccagcgcgtgcacgggaaggcatacgatgacttgctggatgagttcatgcaggctgtgacagacaagtttggaataaattgcctcatccaatttgaagacttcgccaatgccaatgccttccgcctgctcaacaaataccgtaacaagtactgcatgttcaatgatgacatccaaggaacaacctgccacactttcagctgcccatggcatttatgggcacaagtcatgttccagcacatccctggacccatgggcttctcagagtggttacctcgaaacagctaagtagcttcctttccagttttaaacccctagtgcatagcccaagagcaccccaaaaatgcaggttaatgatggagataactttatttgccaaattttgtaatttggagcttaagaaccactgtttttcctcttgagttctggcctgtaccaagtgcagaaatagcttcccaaaggaaaaaaatgggcaacagtaccaaatgctgctgagaggtcaagaaagaagaaggctgagaactgattactgaatttggccacctggaggtacttggggaccctgacaagaggcacagcctccgttgctgtggcagggatcttggctgctctgcgaatcaccaagaacaagctttccaatcacgtgtttgttttccaaggtgcaggcgaggcagctatgggcattgcccacctccttgtcatggccct

SEQ ID NO: 341803 - DNA, 298 bp, Artificial Sequence
  derived and/or modified sequence
cctgctccgcagcgggaccgcgtagacctcagctccccgagcagcgcaggtgggccagggaaggagaggaccgaggcaagccaccacgcgggattaggggtctgccaaggaccatgggtgccgcgctggggacaggcacgcggctggctccctggccgggccgggcctgcggcgccctcccgcgctggacacccaccgcgcccgcccaaggctgccactccaagcctggcccggcgcgccctgtgcccctgaagaagcgcggatacgatgtcaccaggaaccctcatctcaacaaggt

SEQ ID NO: 341804 - DNA, 487 bp, Artificial Sequence
  derived and/or modified sequence
tttagtcttgccaagatggagagtctcaggcgggcattctgagctgcttcttgtcactggggaaaaccacgtgcacgcagtgctgaggcgccccacgcgcgtcctcaggggaagccaggcactgagaacaaaggttgtgggaccgctctttgaggaactcaccagctccgcgagctcgcggccgccagcgcggtccacccattggcgggagaggactcacagaccgcagctcctcaccccgcctgctccgcagcgggaccgcgtagacctcagctccccgagcagcgcaggtctgccaaggaccatgggtgccgcgctggggacaggcacgcggctggctccctggccgggccgggcctgcggcgccctcccgcgctggacacccaccgcgcccgcccaaggctgccactccaagcctggcccggcgcgccctgtgcccctgaagaagcgcggatacgatgtcaccaggaaccctcatctcaacaag

SEQ ID NO: 341805 - DNA, 814 bp, Artificial Sequence
  derived and/or modified sequence
gtgcatttagtcttgccaagatggagagtctcaggcgggcattctgagctgcttcttgtcactggggaaaaccacgtgcacgcagtgctgaggcgccccacgcgcgtcctcaggggaagccaggcactgagaacaaaggttgtgggaccgctctttgaggaactcaccagctccgcgagctcgcggccgccagcgcggtccacccattggcgggagaggactcacagaccgcagctcctcaccccgcctgctccgcagcgggaccgcgtagacctcagctccccgagcagcgcaggtgggccagggaaggagaggaccgaggcaagccaccacgcgggattaggggtctgccaaggaccatgggtgccgcgctggggacaggcacgcggctggctccctggccgggccgggcctgcggcgccctcccgcgctggacacccaccgcgcccgcccaaggctgccactccaagcctggcccggcgcgccctgtgcccctgaagaagcgcggatacgatgtcaccaggaaccctcatctcaacaaggggatggcctttacccttgaagaaaggctgcagcttggaatccacggcctaatcccgccctgctttctgagccaggacgtccagctcctccgaatcatgagatattacgagcggcagcagagtgacctggacaagtacatcattctcatgacactccaagaccggaacgagaagctcttctaccgagtgctgacttcggacgtggagaagttcatgccaatcgtgtacacgcctaccgtggggctggcctgtcagcactatggcctgacttt

SEQ ID NO: 341806 - DNA, 384 bp, Artificial Sequence
  derived and/or modified sequence
cagcgcggtccacccattggcgggagaggactcacagaccgcagctcctcaccccgcctgctccgcagcgggaccgcgtagacctcagctccccgagcagcgcaggtgggccagggaaggagaggaccgaggtctgccaaggaccatgggtgccgcgctggggacaggcacgcggctggctccctggccgggccgggcctgcggcgccctcccgcgctggacacccaccgcgcccgcccaaggctgccactccaagcctggcccggcgcgccctgtgcccctgaagaagcgcggatacgatgtcaccaggaaccctcatctcaacaaggtaatgggccagagggcaggacggcccgcgttgcgatcccgtggctgccggaaaat

SEQ ID NO: 341807 - DNA, 1629 bp, Artificial Sequence
  derived and/or modified sequence
cccgcaccggatctgcttccagggcttggtttcgctttgcctggctcttggctaggcctggcgccccgcgcggagccgagcaggtggcagccgaggagtggcgggggctggaacatttaaccctttgggagcacctgccctctcccagagggcgcgtccccggatcaggcccggtgccccgcagcgcgccctgtgcccctgaagaagcgcggatacgatgtcaccaggaaccctcatctcaacaaggggatggcctttacccttgaagaaaggctgcagcttggaatccacggcctaatcccgccctgctttctgagccaggacgtccagctcctccgaatcatgagatattacgagcggcagcagagtgacctggacaagtacatcattctcatgacactccaagaccggaacgagaagctcttctaccgagtgctgacttcggacgtggagaagttcatgccaatcgtgtacacgcctaccgtggggctggcctgtcagcactatggcctgactttccgcaggccccgtggactgttcatcaccattcatgacaaaggtcatcttgcaacaatgctgaattcttggccagaagacaatattaaggccgtggtggtgactgatggggagcgcatcctgggcctgggagacctgggctgctacggcatgggcatccctgtgggcaagctggccctgtacacggcatgcggaggggtgaacccgcagcagtgcctccctgtgctgctggacgtcggcaccaacaatgaggagctgctcagagaccctctgtacatcggcctgaaacaccagcgcgtgcacgggaaggcatacgatgacttgctggatgagttcatgcaggctgtgacagacaagtttggaataaattgcctcatccaatttgaagacttcgccaatgccaatgccttccgcctgctcaacaaataccgtaacaagtactgcatgttcaatgatgacatccaagctcccagcaccgcgcctgctacatgatagatgcctaataaatgtttaaagaatatatgaatgatgtctacacatacaaactgacatcctcataagcacacccacctgttcatgtgagtatgtctacactggacacctgcccctgcagcctctctgttatccaggtcatcattcatgtacagctgacccttgaacaaaggtggtggttacaggtgccaatgccccacacagtcaaaaatctgcataacttttgcctctccagaaacttagctactaatagcctactgttgaccagaagccttactaataacatcagtagtggattaacacataaatagactagtatctatccctattttatgtatgcatgacatacctaacttcttaatttttttgatatttctaggctacacagttcatctgtgagtgttcgcaaattgttacaaacctccaaaattttaaaaaatatatgtattgaaaaaatctgcatataagtggactcacacagctcaaccccatgttgttcaaggattgactgtgctcacatataaatgcacctctacatgtgctcatacatattcacatgtgtaccccacatgcagacacatggagctgtttgtttttaattaaatcaatccatttgtttac

SEQ ID NO: 341808 - DNA, 1029 bp, Artificial Sequence
  derived and/or modified sequence
atgggcgccgccctgggcaccggcacccggctggccccctggcccggaagggcttgcggcgcactgccgcgatggacgcctacagccccagcacagggttgccactcaaagcctggtccggccaggccggtacccttgaagaagcggggctatgacgttacccggaatcctcacctgaataaagggatggccttcactcttgaagagcgtctacagctaggcatccatggtctgattcccccttgtttcctgtctcaagatgtacagctcctcagaattatgcggtactatgaacggcagcagagcgatcttgacaaatatataatactcatgacgctgcaggacagaaacgagaagctgttttaccgtgtactgacatccgacgtggagaagtttatgccaatcgtttacacgcccacagtaggattggcctgccagcattacggcttaacctttcgcagaccaaggggattattcattactatacatgataagggccatctggctacaatgctcaactcgtggcccgaggataacattaaagcagtggtggtgacggacggcgagcgcatcctggggcttggggatctcgggtgttacgggatgggaatcccggtcgggaaattagctctttataccgcctgtggcggagttaacccacagcagtgccttcctgtgttgctggacgtgggcactaacaacgaagaactgcttcgcgaccccctctatatagggcttaagcaccagagggttcacggtaaggcctacgacgacctgctcgacgagttcatgcaagcagtgacggacaagttcggtattaattgcctgatccagttcgaagacttcgccaacgcgaacgccttccgccttctgaacaaataccggaataagtattgcatgtttaacgacgatatccagggcacaacctgccataccttctcatgcccctggcatctttgggcacaggtcatgttccagcacattcccgggcccatggggttcagcgaatggttacccagaaacagctag

SEQ ID NO: 341809 - DNA, 189 bp, Artificial Sequence
  derived and/or modified sequence
atgggcgccgccctgggcaccggcacccggctggccccctggcccggtcgcgcctgtggagccttgccgcgatggactcccaccgcccctgcccaaggttgccacagtaagcccggtccggctaggcctgtgcccctgaagaagcgtgggtacgacgtcactcgcaacccccacctcaataaagtgtag

SEQ ID NO: 341810 - DNA, 186 bp, Artificial Sequence
  derived and/or modified sequence
atgggcgccgccctgggcaccggcacccggctggccccctggcccggtcgagcctgcggcgcccttcctcgctggactcccaccgccccagcccaggggtgtcactccaaacccggccccgcacgacccgtgccgctgaagaaacgcggatatgatgtcaccaggaacccacacctcaacaaatag

SEQ ID NO: 341811 - DNA, 456 bp, Artificial Sequence
  derived and/or modified sequence
atgggcgccgccctgggcaccggcacccggctggccccctggcccggaagggcttgcggtgccttgccccggtggacacctacggcacctgcccagggctgtcattcgaagccaggtcccgctagaccagtgcccttgaagaaacgcgggtacgacgtgacaaggaacccacatctcaataaggggatggccttcaccctagaagaaagactccagttaggcatccacggactgattcccccttgcttcctttcgcaggacgtgcaactcctgcggattatgaggtattacgaacgccagcagagcgatctggataaatacatcattctgatgacgttgcaagataggaatgagaaactgttttacagggtactgaccagcgatgtcgagaaattcatgcccattgtgtacactcctaccgtgggcctggcctgccagcactatggactgacgtag

SEQ ID NO: 341812 - DNA, 240 bp, Artificial Sequence
  derived and/or modified sequence
atgggcgccgccctgggcaccggcacccggctggccccctggcccggtagggcgtgcggtgcactcccccgctggacgccaaccgcacccgcccagggatgccactctaaacctggacctgcacggcctgtgcccttgaagaaacgaggatacgacgttacacggaatccccatctgaacaaggtcatggggcaacgcgccggccgcccagcgctccgcagtagaggatgtaggaagtag

SEQ ID NO: 341813 - DNA, 759 bp, Artificial Sequence
  derived and/or modified sequence
atggccttcaccctggaggagcggctgcagctgggcatccacggcctgattccgccctgcttcctgtcccaggatgtgcagcttctccgcatcatgcgctattatgaacggcagcagagcgacctggacaagtacattattttgatgacgcttcaggatcgtaatgaaaaactcttctatagagtcttaactagcgatgttgaaaagttcatgcccatagtgtatacgcctaccgtcgggctcgcctgtcagcattatggactgacctttagacggccccgaggtctctttatcaccattcacgataaaggccatcttgcaactatgcttaattcatggcccgaagacaacatcaaggccgtcgtggttaccgatggtgagcggattctgggattgggtgacctcgggtgctacggaatgggcatccccgttggcaaactagccctgtatacagcctgcggcggcgtgaatccccaacagtgcctgcctgtgctgctggacgtaggtacaaataacgaagagctgcttcgagacccactttacatcggactgaagcaccaacgagtgcacgggaaggcatatgacgatctgctcgacgagttcatgcaagcagtgactgataagttcggtatcaactgcctgatccagtttgaggatttcgcaaatgcgaacgcgtttcgcctcctgaacaaatacagaaacaagtactgcatgttcaatgatgacatccaggcgccctccacagccccagccacttag

SEQ ID NO: 341814 - DNA, 1029 bp, Artificial Sequence
  derived and/or modified sequence
atgggagccgctctggggaccgggacgcgcctggcaccgtggcccggacgggcatgcggggcactgcctcgctggaccccaaccgcacctgctcagggatgtcactccaaacccggtcccgctcgtcccgtgcctctgaaaaagcgtgggtacgatgtgactcgcaacccacatcttaataaaggcatggctttcacgttagaggagcgtctgcagctggggatccatggcctcattccgccatgcttcctttcccaagatgtgcaactgttgagaatcatgaggtattacgagagacagcagtcagacctggacaaatacataattctgatgactctccaagaccgcaacgagaaattgttctacagagtgctcactagcgacgtagagaaattcatgccaatcgtgtacactccaacggtcggcctggcttgccaacactacggactaacttttagacgacctcgcggactgttcattactattcatgacaagggccatttggcaactatgttaaatagctggcccgaagacaacatcaaggccgtcgtcgtaactgatggggaaagaattctgggactcggtgacttggggtgttacggaatgggtattccggtaggtaagctcgccctctataccgcgtgtgggggtgtgaacccacagcagtgtctaccagttctgctggacgtcggaaccaataatgaggaattgctgcgggaccccctgtatataggcctcaagcaccagcgagtccacggcaaggcctacgacgacctgctggatgaattcatgcaggctgtcaccgataagtttggaataaattgccttatccaattcgaagattttgccaacgcaaatgcatttcgactgctgaacaagtatcgcaacaagtattgcatgttcaacgacgacattcagggaacaacttgtcacactttttcatgcccctggcacctctgggcacaggtaatgttccagcatattcccggaccgatgggattcagcgaatggcttccccgtaacagttag

SEQ ID NO: 341815 - DNA, 189 bp, Artificial Sequence
  derived and/or modified sequence
atgggtgccgcacttgggactggaactcgactggctccctggcccggtcgcgcttgtggggctcttcctcgctggactcctaccgctcccgctcagggatgtcatagcaagcctggtcccgcacgcccagtgcctctgaagaagcggggttatgatgtgactaggaacccacatttgaataaggtgtag

SEQ ID NO: 341816 - DNA, 186 bp, Artificial Sequence
  derived and/or modified sequence
atgggagctgcactgggcaccggaaccagattagcgccatggccgggtagagcctgtggcgcattaccaagatggacccctaccgctccagcccagggttgccactccaagcctggtcctgccagaccagtgcctttgaagaagcgcggatatgacgttaccaggaacccccatcttaataagtag

SEQ ID NO: 341817 - DNA, 456 bp, Artificial Sequence
  derived and/or modified sequence
atgggcgcagcactgggtactgggactcggctggcgccttggcccggtagagcatgcggagcgttaccgcgttggacaccaacggcccctgcacagggttgccacagcaaaccaggaccagcccgtcccgttccccttaagaaaagaggctacgacgtgactaggaacccacaccttaataaaggcatggccttcaccctagaggaacgcctccagctcggaattcacggtctgatcccaccttgcttcttgtcacaggacgtgcaattgctgcgcatcatgcgctactatgagcgccaacagagcgacttggacaaatatattattttgatgaccttgcaggacagaaacgaaaagctgttctacagggtcctgacctcagacgtagaaaagtttatgcctatcgtgtataccccaacagtaggccttgcttgtcaacattacgggctcacctag

SEQ ID NO: 341818 - DNA, 240 bp, Artificial Sequence
  derived and/or modified sequence
atgggcgctgcactggggaccggaactcggctggctccctggccagggagagcatgtggcgctttgcctcgctggactcccacagcgccagcccaaggctgccattccaagccaggcccagcaagaccagtccccctaaagaagagaggctatgacgtcactcgtaaccctcatctgaacaaagtgatgggccaaagggccggacggccagcactcaggagcagagggtgtcggaagtag

SEQ ID NO: 341819 - DNA, 759 bp, Artificial Sequence
  derived and/or modified sequence
atggcattcaccttggaggagagacttcaacttggcatccacggcttgattcctccatgttttcttagtcaggacgtgcaactgctgaggatcatgagatattatgaaaggcagcaatctgatctcgacaaatacattatactaatgaccctccaagatcgcaatgagaagcttttttatcgtgtgctaacaagcgacgtggaaaagttcatgcctatcgtttatacgcctactgtgggcctggcctgccagcactacggtttgacgttccgaaggccgagggggctttttattactatccacgataaaggacatctggccactatgctgaacagttggcccgaggacaatatcaaggcagttgttgtgacagacggcgaacgaatattgggtctcggggaccttgggtgttatggaatgggcattcccgtcggaaagctagcactgtacacagcttgtggtggtgtgaatccccagcaatgtctgcctgtgctcctcgatgtggggaccaataatgaggaactgctccgcgatccactctacatcggtcttaaacatcagagagttcacgggaaagcttatgatgacctcctagatgaatttatgcaggcagtcactgataagtttgggatcaactgtctgatccagtttgaagactttgcaaacgcgaatgctttccgtcttctcaataaatacaggaacaagtactgcatgtttaacgatgacattcaggcccctagtactgcccctgcaacctag

SEQ ID NO: 341820 - DNA, 1029 bp, Artificial Sequence
  derived and/or modified sequence
atgggcgccgccctgggcaccggcaccagactggccccctggcccggcagagcctgcggcgccctgcccagatggacccccaccgcccccgcccagggctgccacagcaagcccggccccgccagacccgtgcccctgaagaagagaggctacgacgtgaccagaaacccccacctgaacaagggcatggccttcaccctggaggagagactgcagctgggcatccacggcctgatccccccctgcttcctgagccaggacgtgcagctgctgagaatcatgagatactacgagagacagcagagcgacctggacaagtacatcatcctgatgaccctgcaggacagaaacgagaagctgttctacagagtgctgaccagcgacgtggagaagttcatgcccatcgtgtacacccccaccgtgggcctggcctgccagcactacggcctgaccttcagaagacccagaggcctgttcatcaccatccacgacaagggccacctggccaccatgctgaacagctggcccgaggacaacatcaaggccgtggtggtgaccgacggcgagagaatcctgggcctgggcgacctgggctgctacggcatgggcatccccgtgggcaagctggccctgtacaccgcctgcggcggcgtgaacccccagcagtgcctgcccgtgctgctggacgtgggcaccaacaacgaggagctgctgagagaccccctgtacatcggcctgaagcaccagagagtgcacggcaaggcctacgacgacctgctggacgagttcatgcaggccgtgaccgacaagttcggcatcaactgcctgatccagttcgaggacttcgccaacgccaacgccttcagactgctgaacaagtacagaaacaagtactgcatgttcaacgacgacatccagggcaccacctgccacaccttcagctgcccctggcacctgtgggcccaggtgatgttccagcacatccccggccccatgggcttcagcgagtggctgcccagaaacagctag

SEQ ID NO: 341821 - DNA, 189 bp, Artificial Sequence
  derived and/or modified sequence
atgggcgccgccctgggcaccggcaccagactggccccctggcccggcagagcctgcggcgccctgcccagatggacccccaccgcccccgcccagggctgccacagcaagcccggccccgccagacccgtgcccctgaagaagagaggctacgacgtgaccagaaacccccacctgaacaaggtgtag

SEQ ID NO: 341822 - DNA, 186 bp, Artificial Sequence
  derived and/or modified sequence
atgggcgccgccctgggcaccggcaccagactggccccctggcccggcagagcctgcggcgccctgcccagatggacccccaccgcccccgcccagggctgccacagcaagcccggccccgccagacccgtgcccctgaagaagagaggctacgacgtgaccagaaacccccacctgaacaagtag

SEQ ID NO: 341823 - DNA, 456 bp, Artificial Sequence
  derived and/or modified sequence
atgggcgccgccctgggcaccggcaccagactggccccctggcccggcagagcctgcggcgccctgcccagatggacccccaccgcccccgcccagggctgccacagcaagcccggccccgccagacccgtgcccctgaagaagagaggctacgacgtgaccagaaacccccacctgaacaagggcatggccttcaccctggaggagagactgcagctgggcatccacggcctgatccccccctgcttcctgagccaggacgtgcagctgctgagaatcatgagatactacgagagacagcagagcgacctggacaagtacatcatcctgatgaccctgcaggacagaaacgagaagctgttctacagagtgctgaccagcgacgtggagaagttcatgcccatcgtgtacacccccaccgtgggcctggcctgccagcactacggcctgacctag

SEQ ID NO: 341824 - DNA, 240 bp, Artificial Sequence
  derived and/or modified sequence
atgggcgccgccctgggcaccggcaccagactggccccctggcccggcagagcctgcggcgccctgcccagatggacccccaccgcccccgcccagggctgccacagcaagcccggccccgccagacccgtgcccctgaagaagagaggctacgacgtgaccagaaacccccacctgaacaaggtgatgggccagagagccggcagacccgccctgagaagcagaggctgcagaaagtag

SEQ ID NO: 341825 - DNA, 759 bp, Artificial Sequence
  derived and/or modified sequence
atggccttcaccctggaggagagactgcagctgggcatccacggcctgatccccccctgcttcctgagccaggacgtgcagctgctgagaatcatgagatactacgagagacagcagagcgacctggacaagtacatcatcctgatgaccctgcaggacagaaacgagaagctgttctacagagtgctgaccagcgacgtggagaagttcatgcccatcgtgtacacccccaccgtgggcctggcctgccagcactacggcctgaccttcagaagacccagaggcctgttcatcaccatccacgacaagggccacctggccaccatgctgaacagctggcccgaggacaacatcaaggccgtggtggtgaccgacggcgagagaatcctgggcctgggcgacctgggctgctacggcatgggcatccccgtgggcaagctggccctgtacaccgcctgcggcggcgtgaacccccagcagtgcctgcccgtgctgctggacgtgggcaccaacaacgaggagctgctgagagaccccctgtacatcggcctgaagcaccagagagtgcacggcaaggcctacgacgacctgctggacgagttcatgcaggccgtgaccgacaagttcggcatcaactgcctgatccagttcgaggacttcgccaacgccaacgccttcagactgctgaacaagtacagaaacaagtactgcatgttcaacgacgacatccaggcccccagcaccgcccccgccacctag

SEQ ID NO: 341826 - protein, 460 aa, Artificial Sequence
  derived and/or modified sequence
MNTSAPPAVSPNITVLAPGKGPWQVAFIGITTGLLSLATVTGNLLVLISFKVNTELKTVNNYFLLSLACADLIIGTFSMNLYTTYLLMGHWALGTLACDLWLALDYVASNASVMNLLLISFDRYFSVTRPLSYRAKRTPRRAALMIGLAWLVSFVLWAPAILFWQYLVGERTVLAGQCYIQFLSQPIITFGTAMAAFYLPVTVMCTLYWRIYRETENRARELAALQGSETPGKGGGSSSSSERSQPGAEGSPETPPGRCCRCCRAPRLLQAYSWKEEEEEDEGSMESLTSSEGEEPGSEVVIKMPMVDPEAQAPTKQPPRSSPNTVKRPTKKGRDRAGKGQKPRGKEQLAKRKTFSLVKEKKAARTLSAILLAFILTWTPYNIMVLVSTFCKDCVPETLWELGYWLCYVNSTINPMCYALCNKAFRDTFRLLLLCRWDKRRWRKIPKRPGSVHRTPSRQC

SEQ ID NO: 341827 - protein, 134 aa, Artificial Sequence
  derived and/or modified sequence
MNTSAPPAVSPNITVLAPGKGPWQVAFIGITTGLLSLATVTGNLLVLISFKVNTELKTVNNYFLLSLACADLIIGTFSMNLYTTYLLMGHWALGTLACDLWLALDYVASNASVMNLLLISFDRYFSVTRPLSYR

SEQ ID NO: 341828 - protein, 454 aa, Artificial Sequence
  derived and/or modified sequence
MNTSAPPAVSPNITVLAPGKGPWQVAFIGITTGLLSLATVTGNLLVLISFKVNTELKTVNNYFLLSLACADLIIGTFSMNLYTTYLLMGHWALGTLACDLWLALDYVASNASVMNLLLISFDRYFSVTRPLSYRAKRTPRRAALMIGLAWLVSFVLWAPAILFWQYLVGERTVLAGQCYIQFLSQPIITFGTAMAAFYLPVTVMCTLYWRIYRETENRARELAALQGSETPGKGGGSSSSSERSQPGAEGSPETPPGRCCRCCRAPRLLQAYSWKEEEEEDEGSMESLTSSEGEEPGSEVVIKMPMVDPEAQAPTKQPPRSSPNTVKRPTKKGRDRAGKGQKPRGKEQLAKRKTFSLVKEKKAARTLSAILLAFILTWTPYNIMVLVSTFCKDCVPETLWELGYWLCYVNSTINPMCYALCNKAFRDTFRLLLLCRWDKRRWRKIPKRPGSVHR

SEQ ID NO: 341829 - DNA, 417 bp, Artificial Sequence
  derived and/or modified sequence
atggagcgcttcctgaactcaaaagcccggcgcctcggaagctgttcacaccccgctttttacctgctgtgtgtgcctgatgaggacacgtcatgctcaactatataccttcccttgaaaagaagagccgacccggaccaactcttctctgatctccttgggggcactcagcggctctggagcaacagattcggaaatgaagaatctttccccggcagagtgagagcgctcgttgatacattttgttggatcgcacgcgctcctcccctgggtaatcccttacggctagaggaacggatcgcatggcgcatccagaggttgaagagcggtcagactgcactgattgagaagaaaaaacagaaaatagaggaagacgtaagacaccaatgccagcagacaacgtgtgacaggtgttag

SEQ ID NO: 341830 - DNA, 1383 bp, Artificial Sequence
  derived and/or modified sequence
atgaatacatcagccccaccagcagtgtccccaaatataacggtgctggcccccggcaaaggaccctggcaggtggctttcattggaataacaacaggactgctgtcactggcaaccgtgaccgggaacttgcttgttctgatcagtttcaaggtaaatactgagctgaagaccgtgaacaactattttctgctcagcctggcatgtgccgatcttatcatcggaaccttctctatgaacctgtataccacctacctgttgatgggccattgggcactcggcactttggcatgcgacctgtggctggctttggactatgtggcgtcaaatgcgagtgttatgaatctgttactgatctccttcgatcgatatttttcggtaacacgcccactttcatatagggcaaagaggaccccgcgacgcgcggccctgatgattgggctggcctggctcgttagttttgtgctgtgggcacccgctattctgttttggcaatatctggtcggggaacgaaccgttctggccggtcagtgctacatacagtttttgagtcaacccatcatcacttttggcacagccatggctgccttttatcttcccgtgactgttatgtgtactctctactggaggatttaccgagagaccgagaacagagcacgggagctggctgcactgcagggaagcgaaacccctggtaagggcggaggttcatcatcctcctccgagagatcccagcccggggccgaggggagccctgagacaccccctggccggtgctgccgatgctgccgtgctcccaggctcctgcaagcttacagttggaaagaggaggaagaggaggacgaaggctcaatggaaagtctgaccagcagcgagggcgaggaacctgggtcggaagtcgtgatcaaaatgcccatggtggaccccgaggcacaagcaccaacaaaacagcctccccgatcaagcccaaacaccgtcaagagacccacaaagaaggggagggacagagcagggaagggacagaaacctcgtgggaaagagcaactcgccaaaaggaagaccttctcactcgttaaggaaaaaaaggccgcccgcacattgtccgcgattcttctggcattcatcctgacctggacaccctacaacattatggtgcttgtctccactttctgcaaagactgcgttccagaaacactatgggaattgggctactggctctgctacgtcaactctacaatcaacccaatgtgctacgccctgtgcaataaggcgttcagagacaccttccgtctgctactgctgtgtaggtgggacaaacgccgctggcggaagatcccaaaacgtcccggctcggtgcatcgcacacccagccggcagtgctag

SEQ ID NO: 341831 - DNA, 405 bp, Artificial Sequence
  derived and/or modified sequence
atgaatacctctgcaccacctgcagtgtctcccaacatcacagtgctggcccccggcaaaggcccgtggcaagtggccttcatcggcattaccaccggcctccttagtctagctactgtcactggtaatctgctggttctgatctcattcaaagtgaacactgagcttaaaacagtcaacaattatttcttactgagtctcgcatgtgcggacttgattatcgggaccttcagcatgaacctgtacactacctacctacttatgggccactgggcactaggtaccctggcctgtgatctttggctggccctggattacgtggcctctaacgcctctgttatgaacctgttgctgatctccttcgacagatacttctctgtaaccaggcctctcagctacagatag

SEQ ID NO: 341832 - DNA, 1365 bp, Artificial Sequence
  derived and/or modified sequence
atgaacaccagtgccccaccagctgtctctccaaacataacggtgctggctcctgggaagggcccctggcaggtcgccttcattggcatcactaccgggctgttaagccttgccaccgtgaccggcaatctgcttgtactcatctcctttaaagtgaacaccgaactcaaaaccgttaataactacttcctcctgtccctcgcttgtgcggatctgattattggaacattcagcatgaatctctatactacttacctgctgatggggcactgggccttagggacattggcgtgtgacttgtggctggctttggactacgtggcatcaaacgccagtgttatgaacctgctgctcatcagctttgatcggtatttttcggtgaccaggccgttgtcttacagagcaaagagaacaccgcggcgcgccgcactcatgattgggctggcatggctggtgagtttcgtactgtgggctccagcaattttgttctggcagtatctcgttggggagcgcacggttttggcaggccagtgctacatccagtttctgtcccagcctataatcacattcggcactgcgatggcagcgttttatttgcctgtcacagtgatgtgcaccctgtattggcggatttatcgggagaccgagaaccgcgctcgagagctagcggcactgcaggggagtgaaacacccggaaagggaggggggagctcctctagcagcgaacgaagccagccaggagccgagggatccccggaaacccctcccggacggtgttgcaggtgctgccgggccccacgcctccttcaggcctattcgtggaaggaggaggaagaggaggacgaagggagtatggagtctctgactagttcagagggcgaagagcctggtagcgaagtggtgattaaaatgccaatggttgaccccgaagcgcaggcacctacaaagcaaccacccagatcttcgccaaacaccgtgaagcgtcccactaaaaaaggaagggaccgcgccggaaaaggccaaaaacctagggggaaggagcagctcgccaaacggaaaacattctccttggtgaaggagaaaaaggccgcaagaacattgtccgcaatattactagcctttattttgacgtggacaccctataatatcatggtcttggttagtactttttgtaaggattgtgtgccagaaacactgtgggagctgggctattggctgtgttacgttaacagcactatcaatccgatgtgttacgctctgtgcaataaggccttcagagatacttttcggctcctgttgttgtgcaggtgggataaaagaaggtggcgtaaaatcccaaagcgcccgggatctgtccaccgatag

SEQ ID NO: 341833 - DNA, 1383 bp, Artificial Sequence
  derived and/or modified sequence
atgaacaccagcgcccccccagctgtgagccccaacatcaccgtgctggcccctgggaagggcccctggcaggtggccttcatcggcatcaccaccggcctgctgagcctggccaccgtgactggaaacctgctggtgctgatctccttcaaggtgaacacagagctgaagacagtgaacaactacttcctgctgagcctggcctgtgccgacctgatcatcggcaccttctccatgaacctgtacaccacctacctgctgatgggccactgggccctgggcaccctggcctgtgacctgtggctggccctggactatgtggccagcaatgcctctgtgatgaacctgctgctgatcagctttgaccgctacttctctgtgacccggcccctgagctaccgggccaagaggaccccccggcgggccgccctgatgattggcctggcctggctggtgtcctttgtgctgtgggccccagccatcctcttctggcagtacctggtgggggagaggacagtgctggccggccagtgctacatccagttcctgagccagcccatcatcaccttcggcacagccatggccgccttctacctgcctgtgacagtgatgtgcaccctgtactggaggatctaccgggagacagagaacagagcccgggagctggccgccctgcagggcagcgagaccccaggaaaaggaggcggcagcagcagcagcagcgagaggagccagcccggggctgagggcagccctgagaccccacctggccgctgctgccgctgctgccgggccccccggctgctgcaggcctacagctggaaggaggaggaggaggaggatgagggctccatggagagcctgaccagcagcgagggggaggagcccggcagcgaggtggtgatcaagatgcccatggtggaccctgaggcccaggcccccaccaagcagccccccaggagcagccccaacacagtgaagaggcccaccaagaagggccgggacagagctgggaagggccagaagccccggggcaaggagcagctggccaagaggaagaccttcagcctggtgaaggagaagaaggccgcccggaccctgagcgccatcctgctggccttcatcctgacctggaccccctacaacatcatggtgctggtgtccaccttctgcaaggactgtgtgcctgagaccctgtgggagctgggctactggctgtgctacgtgaacagcaccatcaaccccatgtgctacgccctgtgcaacaaggccttccgggacaccttccggctgctgctgctgtgccgctgggacaagaggcgctggaggaagatccccaagaggcctggctctgtgcacaggacccccagccggcagtgctag

SEQ ID NO: 341834 - DNA, 405 bp, Artificial Sequence
  derived and/or modified sequence
atgaacaccagcgcccccccagctgtgagccccaacatcaccgtgctggcccctgggaagggcccctggcaggtggccttcatcggcatcaccaccggcctgctgagcctggccaccgtgactggaaacctgctggtgctgatctccttcaaggtgaacacagagctgaagacagtgaacaactacttcctgctgagcctggcctgtgccgacctgatcatcggcaccttctccatgaacctgtacaccacctacctgctgatgggccactgggccctgggcaccctggcctgtgacctgtggctggccctggactatgtggccagcaatgcctctgtgatgaacctgctgctgatcagctttgaccgctacttctctgtgacccggcccctgagctacagatag

SEQ ID NO: 341835 - DNA, 1365 bp, Artificial Sequence
  derived and/or modified sequence
atgaacaccagcgcccccccagctgtgagccccaacatcaccgtgctggcccctgggaagggcccctggcaggtggccttcatcggcatcaccaccggcctgctgagcctggccaccgtgactggaaacctgctggtgctgatctccttcaaggtgaacacagagctgaagacagtgaacaactacttcctgctgagcctggcctgtgccgacctgatcatcggcaccttctccatgaacctgtacaccacctacctgctgatgggccactgggccctgggcaccctggcctgtgacctgtggctggccctggactatgtggccagcaatgcctctgtgatgaacctgctgctgatcagctttgaccgctacttctctgtgacccggcccctgagctaccgggccaagaggaccccccggcgggccgccctgatgattggcctggcctggctggtgtcctttgtgctgtgggccccagccatcctcttctggcagtacctggtgggggagaggacagtgctggccggccagtgctacatccagttcctgagccagcccatcatcaccttcggcacagccatggccgccttctacctgcctgtgacagtgatgtgcaccctgtactggaggatctaccgggagacagagaacagagcccgggagctggccgccctgcagggcagcgagaccccaggaaaaggaggcggcagcagcagcagcagcgagaggagccagcccggggctgagggcagccctgagaccccacctggccgctgctgccgctgctgccgggccccccggctgctgcaggcctacagctggaaggaggaggaggaggaggatgagggctccatggagagcctgaccagcagcgagggggaggagcccggcagcgaggtggtgatcaagatgcccatggtggaccctgaggcccaggcccccaccaagcagccccccaggagcagccccaacacagtgaagaggcccaccaagaagggccgggacagagctgggaagggccagaagccccggggcaaggagcagctggccaagaggaagaccttcagcctggtgaaggagaagaaggccgcccggaccctgagcgccatcctgctggccttcatcctgacctggaccccctacaacatcatggtgctggtgtccaccttctgcaaggactgtgtgcctgagaccctgtgggagctgggctactggctgtgctacgtgaacagcaccatcaaccccatgtgctacgccctgtgcaacaaggccttccgggacaccttccggctgctgctgctgtgccgctgggacaagaggcgctggaggaagatccccaagaggcctggctctgtgcacaggtag

SEQ ID NO: 341836 - DNA, 1383 bp, Artificial Sequence
  derived and/or modified sequence
atgaacaccagcgccccccccgccgtgagccccaacatcaccgtgctggcgccaggaaagggaccctggcaggtcgcatttataggaataacaacgggccttttaagcctcgcaaccgttaccggaaacctgctcgtgctgatcagtttcaaggttaataccgagttgaagactgtgaacaactacttcttgcttagcctggcatgcgctgatctgattatcggtaccttttctatgaacctgtacacaacctacctcctgatggggcactgggcgctcggtaccctggcctgtgatctgtggcttgcgctcgattacgtggcgtcaaatgcttctgtgatgaatctccttctgatttcatttgaccggtacttcagtgtgacgaggccactcagttaccgcgctaagaggaccccccgccgagcagcactgatgattggcttagcttggctagtttcattcgtgttgtgggcaccagccattcttttttggcagtaccttgtgggtgaacgcacagtactagctggacagtgctacatccagtttttgtctcaacccattatcacctttgggaccgctatggctgcgttttatctgccagtaactgtgatgtgcaccctatattggagaatttaccgagagaccgagaaccgcgccagagagcttgctgcactccaaggcagcgaaacacctggaaaggggggcggcagcagcagtagtagcgaacgctcccaacccggggctgagggtagcccagagacaccaccagggaggtgctgccgttgttgcagagcccctcggctgctgcaggcttactcttggaaagaagaggaggaagaagatgaggggtcaatggagagcttgacaagctcagaaggggaggaacctggatctgaggtagtcatcaagatgccaatggtagatcccgaggctcaggcgcccacgaagcagccgccacgctcatcacctaataccgtgaaaaggccaactaagaagggccgggatcgcgccggtaagggtcaaaaaccgcgcggaaaggaacagctggctaaacgcaaaaccttctccctcgtgaaggagaaaaaagcagctaggacactctctgcaattctgttggcatttatcttaacttggacaccctacaacatcatggtcctggtgtcaaccttctgcaaggattgtgtaccggaaacattgtgggaactcggctactggttgtgttatgtgaattccactatcaaccctatgtgttatgccttgtgcaacaaagcatttcgggacacattccgactgctgttgctgtgccgatgggacaaacgccgatggagaaagatcccaaagaggcccgggtctgtgcaccgcactcccagcagacagtgttag

SEQ ID NO: 341837 - DNA, 405 bp, Artificial Sequence
  derived and/or modified sequence
atgaacaccagcgccccccccgccgtgagccccaacatcaccgtgctagcaccaggcaagggcccctggcaggtcgctttcataggcataaccaccgggttgctgagtcttgccacagtgacaggcaacctgttggttctaatctcttttaaagtgaacactgaactaaaaacagtgaacaattacttcctgctctccctcgcctgcgctgacctcattattggtactttctctatgaatctgtatacaacctaccttctgatggggcactgggcattggggacactggcatgcgacttatggcttgctctggattatgtggccagtaacgcatccgtcatgaacttactgctgatttctttcgatagatacttcagcgtgactaggccactgtcatatcgttag

SEQ ID NO: 341838 - DNA, 1365 bp, Artificial Sequence
  derived and/or modified sequence
atgaacaccagcgccccccccgccgtgagccccaacatcaccgtgttggcacccggcaagggtccatggcaggttgccttcatcggaataactactggtctgctgagcctcgccacggtcaccgggaatctgctggtccttatcagtttcaaagtgaacacagaacttaaaacagttaataactactttttactctccctggcctgtgcagatctaattatcgggacctttagtatgaatctgtatactacatatctgctcatggggcactgggccctgggaactctggcttgtgacctgtggctggccctggattacgtcgcatccaacgcctcggtaatgaatttactgctcatctctttcgataggtacttctcagtgactagacccctgtcttatcgcgctaagcgcacacccagaagagcggctctgatgattggcctcgcttggctggtttcgttcgtgctatgggcccccgccatactattctggcaatacctagtgggcgagcgcaccgtgctggctggacaatgctacatccagttcctctcccagccgatcataacattcgggaccgccatggccgctttctatctccccgtaacagtgatgtgcaccctgtactggcgcatctaccgggagactgaaaatcgagcccgcgaactggctgccctccagggaagtgaaactcctggaaagggaggcggctcttctagcagtagtgagagatctcagccaggggccgaaggaagtccagaaacccccccggggaggtgctgccgctgttgccgagcaccaagactcctccaggcatactcctggaaggaggaagaagaggaagacgaaggaagcatggagagtttgacatcttcggaaggcgaagaacctggctctgaggtcgtcatcaaaatgcccatggtggaccctgaagcacaggcccccactaaacaaccgcctcgttcttctcccaatactgtgaagcgccctactaagaaaggccgggacagagccggaaaaggccagaaaccaaggggaaaggagcagttagctaaaagaaagactttttctctggtcaaagaaaaaaaggcagccagaacgttgtcggcaatcctgcttgcttttatcctgacatggaccccttacaatatcatggtgctggtgtccacgttctgcaaagattgcgtgcccgagacgctgtgggagctgggttactggctatgttacgtgaactctaccataaatcccatgtgctatgcactctgcaacaaggccttcagagatacctttagactacttctcttatgtagatgggacaaacgacgctggcggaagatccccaaacgccccggatctgtgcataggtag

SEQ ID NO: 341839 - DNA, 1383 bp, Artificial Sequence
  derived and/or modified sequence
atgaatacgagtgcacctcccgcagtttcccccaatatcaccgtacttgctcccggtaagggaccttggcaggtcgcatttataggcatcaccaccggtcttttgtctttagctacagtgacaggaaacctgctggttctgatttcatttaaggttaataccgagttgaagactgtaaataattattttctactcagtctggcctgcgccgatctgataatcggaacattttccatgaacctctatacgacctatttgctgatgggacactgggcactggggaccctggcgtgtgacctgtggctcgccctggactatgtcgcatccaacgccagcgttatgaacttgctgcttatctcgttcgaccggtacttctcagtcaccagaccactttcttatcgggctaagcgaactccaagaagagcggcactaatgattggattggcctggttggtgtccttcgttttgtgggctccagccattttgttttggcagtatctcgttggggaaagaactgtcctggccggacagtgctacatacagtttctcagtcagccgatcatcaccttcgggaccgccatggccgcattctatctccccgtgactgtgatgtgcaccctatactggcggatttaccgagaaaccgagaatcgcgctcgagaactcgctgctttgcagggctccgaaacaccgggtaagggagggggaagttcctcctctagtgagcgatcccaacctggcgctgagggttcccccgaaacgccccctggccgatgctgtagatgttgtcgggctccacgattgctgcaagcctacagttggaaggaggaagaagaggaggatgaaggctccatggaaagcctcacctcttctgaaggcgaggagccgggatcagaggttgtgataaagatgcctatggtggaccccgaggcccaggcacctacaaagcaaccccctcgcagcagcccaaacactgtcaagcggcctacaaaaaaaggacgagatagagccggaaagggacagaagccaagagggaaggagcagctcgccaagcggaaaaccttttctctggttaaggagaagaaagcggctaggacactctctgccatcctattggcgttcatactcacatggactccctataatataatggtactcgtgtccacgttttgcaaagactgcgtaccggaaaccctttgggaactcggttattggctgtgctacgtgaatagtacaattaaccctatgtgctacgccctttgcaacaaagcgttcagagacacttttcggctgttactgctctgtaggtgggacaaaaggcgctggagaaagatccctaagaggcccggatccgtacataggactccctcccgccaatgctag

SEQ ID NO: 341840 - DNA, 405 bp, Artificial Sequence
  derived and/or modified sequence
atgaacacttctgcccctccagccgtcagtcctaatatcaccgttctggctcccggaaagggtccctggcaggtagcgtttattggaataaccacgggattgctctccttggctacggtcaccggcaacctgctcgtactgatctcttttaaggtaaacaccgaactgaagaccgtgaacaattactttctgctatccctggcctgtgcggatctcatcatcggcacctttagtatgaacctgtataccacctacttgctaatgggccactgggccctcgggactttggcttgtgatctgtggctggcactagattacgtggccagcaacgcctcagtcatgaatcttctgttgatttcctttgaccgctactttagcgttacccgtcctttaagctatagatag

SEQ ID NO: 341841 - DNA, 1365 bp, Artificial Sequence
  derived and/or modified sequence
atgaacaccagcgcccctcctgctgtcagccccaatataacagtcctagcacctgggaaggggccatggcaggtagctttcattgggatcacaaccgggcttctgtccctggctactgtgaccgggaaccttctcgtcctgatatccttcaaagtaaacactgaactgaaaacagtcaataactatttcctcctctcactggcatgtgctgatcttattatcggaactttttcaatgaacttatataccacttacctgctaatggggcattgggcgttaggcacgctggcctgtgacctgtggctcgccctcgactacgttgcttctaacgcctcggtgatgaatctcttactgatctcatttgaccgctatttcagcgtcacgcggcctctgagctatcgtgcgaagaggacccccagaagagccgctctgatgatcggattagcttggctggtgtcctttgtcttgtgggcccctgcaattcttttttggcagtatctggtgggagaacgcaccgtcttggctggccaatgctacatccagtttcttagtcagcctattataacctttggaactgctatggcggcattttacttgcctgtcacagttatgtgcaccctgtattggcgcatctatcgtgagacagaaaatcgggctagagaattagcagccctacagggttcggaaacaccaggaaaggggggaggatcatcttcgagctccgagcggagtcagcccggagcagaaggttccccagagactccacccggaagatgttgcaggtgttgccgagctcctagactgctccaggcatattcctggaaagaggaagaggaagaggacgaaggcagcatggaaagcctgaccagcagcgagggcgaagagcctggctctgaggttgtgatcaaaatgcccatggtggacccagaagcccaggcaccgaccaagcagcccccaagatccagcccgaacacagtcaaacgaccgactaagaaagggagagacagggcaggcaaaggtcaaaagccgaggggcaaggaacagctggctaaacggaaaacattttctctggtgaaagagaagaaagccgcaaggacactgtcggccattctgctcgcattcattctaacctggacaccttataatatcatggtcctggtgtcaaccttctgcaaagactgtgttcccgaaactctctgggagctgggatactggctgtgttatgtaaactcaaccattaatcctatgtgctacgccttgtgcaacaaggctttccgcgatactttcaggcttctgctgctatgtcggtgggacaaaaggaggtggagaaagatccctaaaagacccggatctgtccatcggtag

SEQ ID NO: 341842 - DNA, 2964 bp, Artificial Sequence
  derived and/or modified sequence
agtgtgcctttgtgagggtgtgtgtgccgccgggtctgtgcagtgggtgtgggtgtttgtctccctgtatccgccttctctcccgtccgggacttttagccttcctgggctcgccttcctcatgtcctttctcctccctcttggggctcaaattgggtgccctggtgaaggaggggggcacactccagaacctagtccaaccccagacgctgcctgaggcttccctccagctcccctcccttccttttctccctttcctccctccctctctttccctttctccctccccgctaaggctggcgtgccagggggtgggacatgccaatcactggctgtgcctctcccgctgccagcacagggcgcagctccccctgggagccaggtgtttgggtccctggagacgccgcaggcccccagggaggcagtggggctgaggaccctacagacccctcttcagccccgtggtgatgactttcccctgaggaagccctgtagcgtgcctggaggaaggggctctccaaccccagccccacctagccaccatgaacacttcagccccacctgctgtcagccccaacatcaccgtcctggcaccaggaaagggtccctggcaagtggccttcattgggatcaccacgggcctcctgtcgctagccacagtgacaggcaacctgctggtactcatctctttcaaggtcaacacggagctcaagacagtcaataactacttcctgctgagcctggcctgtgctgacctcatcatcggtaccttctccatgaacctctataccacgtacctgctcatgggccactgggctctgggcacgctggcttgtgacctctggctggccctggactatgtggccagcaatgcctccgtcatgaatctgctgctcatcagctttgaccgctacttctccgtgactcggcccctgagctaccgtgccaagcgcacaccccgccgggcagctctgatgatcggcctggcctggctggtttcctttgtgctctgggccccagccatcctcttctggcagtacctggtaggggagcggacagtgctagctgggcagtgctacatccagttcctctcccagcccatcatcacctttggcacagccatggctgccttctacctccctgtcacagtcatgtgcacgctctactggcgcatctaccgggagacagagaaccgagcacgggagctggcagcccttcagggctccgagacgccaggcaaagggggtggcagcagcagcagctcagagaggtctcagccaggggctgagggctcaccagagactcctccaggccgctgctgtcgctgctgccgggcccccaggctgctgcaggcctacagctggaaggaagaagaggaagaggacgaaggctccatggagtccctcacatcctcagagggagaggagcctggctccgaagtggtgatcaagatgccaatggtggaccccgaggcacaggcccccaccaagcagcccccacggagctccccaaatacagtcaagaggccgactaagaaagggcgtgatcgagctggcaagggccagaagccccgtggaaaggagcagctggccaagcggaagaccttctcgctggtcaaggagaagaaggcggctcggaccctgagtgccatcctcctggccttcatcctcacctggacaccgtacaacatcatggtgctggtgtccaccttctgcaaggactgtgttcccgagaccctgtgggagctgggctactggctgtgctacgtcaacagcaccatcaaccccatgtgctacgcactctgcaacaaagccttccgggacacctttcgcctgctgctgctttgccgctgggacaagagacgctggcgcaagatccccaagcgccctggctccgtgcaccgcactccctcccgccaatgctgatagtcccctctcctgcatccctccaccccagtccccgggaaaggccggtgggaagagggcaggggctgcatcctcagccccagggccctgctcaggcctcacctggcttcccaggaccctgggtcaccttcctgggcagcccagagagaccctgccaactttccagacttcgctattcccaggcagggagggaaacccggggaactggtttttctgttccctgctgggtgggaatgcgctcttcaccaggaagaaggcccgggaggaggatccgggctttggactccttgtttgcctttaggcaggaagtcaggagccagcagggcgggccaggagaaagaaggcttaacattaagtattccttggcccagcagcggcccagattgcggtgtgagatggtgccccctggggggcacagccagaaactgaactggccgctgggagaaaagccagatgacagggagctggggaatcccctcgcttcataggcagagcccgcccacctgggccctaggcatactctccaggattgtccacaaatgtcctcagagggtccctaggtgggtcaactccaaggcaaatgtccaagcatcagcaagacaatgacactggaagggtccggcttggctagtcacatatcaagtcccgaggcagcaacaggaccaggagccaggtgtcctgactgtcctacaatatcattttcctgggagtgggagtcaagtgtgcctgctatccagccgcaaatccataccccctgccccagagaagcctcagtccctccctcctggctcacagccaccacctggatggatctgctccatgcagatctagccaggcctcccgcatgctgcctgcctccggccctgccccacacaggcctggcccagccagcaggttctctcctgtgagctccccaatccaacccatgcatggcctcccagccacccggatctccaggcccagcctggccccaaatgttctttcctttcatcctcagcaagtgctgagtctgtgaataaagccacataaccagcgggca

SEQ ID NO: 341843 - DNA, 549 bp, Artificial Sequence
  derived and/or modified sequence
cggtggcaagaatcaggttccaattctctggaacctctggtgacttctctacctgccacctgccccaggtgatgactttcccctgaggaagccctgtagcgtgcctggaggaaggggctctccaaccccagccccacctagccaccatgaacacttcagccccacctgctgtcagccccaacatcaccgtcctggcaccaggaaagggtccctggcaagtggccttcattgggatcaccacgggcctcctgtcgctagccacagtgacaggcaacctgctggtactcatctctttcaaggtcaacacggagctcaagacagtcaataactacttcctgctgagcctggcctgtgctgacctcatcatcggtaccttctccatgaacctctataccacgtacctgctcatgggccactgggctctgggcacgctggcttgtgacctctggctggccctggactatgtggccagcaatgcctccgtcatgaatctgctgctcatcagctttgaccgctacttctccgtgactcggcccctgagctaccgtg

SEQ ID NO: 341844 - DNA, 2123 bp, Artificial Sequence
  derived and/or modified sequence
atgtgcaggggggagggcgtgtgtgcgagggaagcaggcatgtgaataccagggcatgtgtgttggggcatggtgcacaggggctgggggctctaaggttgggtggggggaggagcccaaggaaacagtgtgcctttgtgagggtgtgtgtgccgccgggtctgtgcagtgggtgtgggtgtttgtctccctgtatccgccttctctcccgtccgggacttttagccttcctgggctcgccttcctcatgtcctttctcctccctcttggggctcaaattgggtgccctggtgaaggaggggggcacactccagaacctagtccaaccccagacgctgcctgaggcttccctccagctcccctcccttccttttctccctttcctccctccctctctttccctttctccctccccgctaaggctggcgtgccagggggtgggacatgccaatcactggctgtgcctctcccgctgccagcacagggcgcagctccccctgggagccaggtgtttgggtccctggagacgccgcaggcccccagggaggcagtggggctgaggaccctacagacccctcttcagccccgtgggcaccctgaaacccaccacccccgtccacctcagctcccccaagatggactgaatcaggctgctggccagatagagaagctagaagccaaggtgatgactttcccctgaggaagccctgtagcgtgcctggaggaaggggctctccaaccccagccccacctagccaccatgaacacttcagccccacctgctgtcagccccaacatcaccgtcctggcaccaggaaagggtccctggcaagtggccttcattgggatcaccacgggcctcctgtcgctagccacagtgacaggcaacctgctggtactcatctctttcaaggtcaacacggagctcaagacagtcaataactacttcctgctgagcctggcctgtgctgacctcatcatcggtaccttctccatgaacctctataccacgtacctgctcatgggccactgggctctgggcacgctggcttgtgacctctggctggccctggactatgtggccagcaatgcctccgtcatgaatctgctgctcatcagctttgaccgctacttctccgtgactcggcccctgagctaccgtgccaagcgcacaccccgccgggcagctctgatgatcggcctggcctggctggtttcctttgtgctctgggccccagccatcctcttctggcagtacctggtaggggagcggacagtgctagctgggcagtgctacatccagttcctctcccagcccatcatcacctttggcacagccatggctgccttctacctccctgtcacagtcatgtgcacgctctactggcgcatctaccgggagacagagaaccgagcacgggagctggcagcccttcagggctccgagacgccaggcaaagggggtggcagcagcagcagctcagagaggtctcagccaggggctgagggctcaccagagactcctccaggccgctgctgtcgctgctgccgggcccccaggctgctgcaggcctacagctggaaggaagaagaggaagaggacgaaggctccatggagtccctcacatcctcagagggagaggagcctggctccgaagtggtgatcaagatgccaatggtggaccccgaggcacaggcccccaccaagcagcccccacggagctccccaaatacagtcaagaggccgactaagaaagggcgtgatcgagctggcaagggccagaagccccgtggaaaggagcagctggccaagcggaagaccttctcgctggtcaaggagaagaaggcggctcggaccctgagtgccatcctcctggccttcatcctcacctggacaccgtacaacatcatggtgctggtgtccaccttctgcaaggactgtgttcccgagaccctgtgggagctgggctactggctgtgctacgtcaacagcaccatcaaccccatgtgctacgcactctgcaacaaagccttccgggacacctttcgcctgctgctgctttgccgctgggacaagagacgctggcgcaagatccccaagcgccctggctccgtgcaccgca

SEQ ID NO: 341845 - DNA, 1383 bp, Artificial Sequence
  derived and/or modified sequence
atgaacaccagcgccccccccgccgtgagccccaacatcaccgtgctggcccccggcaagggcccctggcaggtggccttcatcggcatcaccaccggcctgctgagcctggccaccgtgaccggcaacctgctggtgctgatcagcttcaaggtgaacaccgagctgaagaccgtgaacaactacttcctgctgagcctggcctgcgccgacctgatcatcggcaccttcagcatgaacctgtacaccacctacctgctgatgggccactgggccctgggcaccctggcctgcgacctgtggctggccctggactacgtggccagcaacgccagcgtgatgaacctgctgctgatcagcttcgacagatacttcagcgtgaccagacccctgagctacagagccaagagaacccccagaagagccgccctgatgatcggcctggcctggctggtgagcttcgtgctgtgggcccccgccatcctgttctggcagtacctggtgggcgagagaaccgtgctggccggccagtgctacatccagttcctgagccagcccatcatcaccttcggcaccgccatggccgccttctacctgcccgtgaccgtgatgtgcaccctgtactggagaatctacagagagaccgagaacagagccagagagctggccgccctgcagggcagcgagacccccggcaagggcggcggcagcagcagcagcagcgagagaagccagcccggcgccgagggcagccccgagaccccccccggcagatgctgcagatgctgcagagcccccagactgctgcaggcctacagctggaaggaggaggaggaggaggacgagggcagcatggagagcctgaccagcagcgagggcgaggagcccggcagcgaggtggtgatcaagatgcccatggtggaccccgaggcccaggcccccaccaagcagccccccagaagcagccccaacaccgtgaagagacccaccaagaagggcagagacagagccggcaagggccagaagcccagaggcaaggagcagctggccaagagaaagaccttcagcctggtgaaggagaagaaggccgccagaaccctgagcgccatcctgctggccttcatcctgacctggaccccctacaacatcatggtgctggtgagcaccttctgcaaggactgcgtgcccgagaccctgtgggagctgggctactggctgtgctacgtgaacagcaccatcaaccccatgtgctacgccctgtgcaacaaggccttcagagacaccttcagactgctgctgctgtgcagatgggacaagagaagatggagaaagatccccaagagacccggcagcgtgcacagaacccccagcagacagtgctag

SEQ ID NO: 341846 - DNA, 405 bp, Artificial Sequence
  derived and/or modified sequence
atgaacaccagcgccccccccgccgtgagccccaacatcaccgtgctggcccccggcaagggcccctggcaggtggccttcatcggcatcaccaccggcctgctgagcctggccaccgtgaccggcaacctgctggtgctgatcagcttcaaggtgaacaccgagctgaagaccgtgaacaactacttcctgctgagcctggcctgcgccgacctgatcatcggcaccttcagcatgaacctgtacaccacctacctgctgatgggccactgggccctgggcaccctggcctgcgacctgtggctggccctggactacgtggccagcaacgccagcgtgatgaacctgctgctgatcagcttcgacagatacttcagcgtgaccagacccctgagctacagatag

SEQ ID NO: 341847 - DNA, 1365 bp, Artificial Sequence
  derived and/or modified sequence
atgaacaccagcgccccccccgccgtgagccccaacatcaccgtgctggcccccggcaagggcccctggcaggtggccttcatcggcatcaccaccggcctgctgagcctggccaccgtgaccggcaacctgctggtgctgatcagcttcaaggtgaacaccgagctgaagaccgtgaacaactacttcctgctgagcctggcctgcgccgacctgatcatcggcaccttcagcatgaacctgtacaccacctacctgctgatgggccactgggccctgggcaccctggcctgcgacctgtggctggccctggactacgtggccagcaacgccagcgtgatgaacctgctgctgatcagcttcgacagatacttcagcgtgaccagacccctgagctacagagccaagagaacccccagaagagccgccctgatgatcggcctggcctggctggtgagcttcgtgctgtgggcccccgccatcctgttctggcagtacctggtgggcgagagaaccgtgctggccggccagtgctacatccagttcctgagccagcccatcatcaccttcggcaccgccatggccgccttctacctgcccgtgaccgtgatgtgcaccctgtactggagaatctacagagagaccgagaacagagccagagagctggccgccctgcagggcagcgagacccccggcaagggcggcggcagcagcagcagcagcgagagaagccagcccggcgccgagggcagccccgagaccccccccggcagatgctgcagatgctgcagagcccccagactgctgcaggcctacagctggaaggaggaggaggaggaggacgagggcagcatggagagcctgaccagcagcgagggcgaggagcccggcagcgaggtggtgatcaagatgcccatggtggaccccgaggcccaggcccccaccaagcagccccccagaagcagccccaacaccgtgaagagacccaccaagaagggcagagacagagccggcaagggccagaagcccagaggcaaggagcagctggccaagagaaagaccttcagcctggtgaaggagaagaaggccgccagaaccctgagcgccatcctgctggccttcatcctgacctggaccccctacaacatcatggtgctggtgagcaccttctgcaaggactgcgtgcccgagaccctgtgggagctgggctactggctgtgctacgtgaacagcaccatcaaccccatgtgctacgccctgtgcaacaaggccttcagagacaccttcagactgctgctgctgtgcagatgggacaagagaagatggagaaagatccccaagagacccggcagcgtgcacagatag

SEQ ID NO: 341848 - protein, 71 aa, Artificial Sequence
  derived and/or modified sequence
QFLDQEDWGPQRTSKEIRQLQNDCMRLRESLNTTQVHNLALGEKLQNLPTLLYKSLKEGAQAIQEEAQAIQ

SEQ ID NO: 341849 - DNA, 216 bp, Artificial Sequence
  derived and/or modified sequence
caatttcttgaccaggaagactggggccctcaaaggacctcaaaagaaattaggcagctgcagaacgactgtatgcgactgagggagtccctaaacactacgcaggtgcacaacttggctctcggggaaaaactccagaatttgccgaccctactgtacaaaagcctgaaggagggcgctcaggcaattcaagaggaggctcaggccattcagtag

SEQ ID NO: 341850 - DNA, 216 bp, Artificial Sequence
  derived and/or modified sequence
cagttcctggaccaggaggactggggcccccagaggaccagcaaggagatccggcagctgcagaatgactgcatgaggctgcgggagagcctgaacaccacccaggtgcacaacctggccctgggggagaagctgcagaacctgcccaccctgctgtacaagagcctgaaggagggcgcccaggccatccaggaggaggcccaggccatccagtag

SEQ ID NO: 341851 - DNA, 216 bp, Artificial Sequence
  derived and/or modified sequence
cagttcctggaccaggaggactggggcccccagcggaccagcaaggagattaggcaacttcagaatgactgcatgagactgcgagagtctttgaacaccacccaggtgcataacctggccctgggcgaaaaactccagaatctgccaaccctgctctacaagtcacttaaagaaggagcacaagcaatccaagaagaagcacaagctatacaatag

SEQ ID NO: 341852 - DNA, 216 bp, Artificial Sequence
  derived and/or modified sequence
caattcctggatcaggaagactggggtccccagcggacttccaaggaaataagacagctccagaacgactgcatgagactacgagagtctctcaataccacacaagttcacaacctggcactgggggaaaagctgcagaacttacctaccctgttgtacaaatccctgaaggaaggagctcaagccattcaggaggaggctcaggccatccagtag

SEQ ID NO: 341853 - DNA, 217 bp, Artificial Sequence
  derived and/or modified sequence
accagttcttagatcaggaggactggggcccccagcggacctcaaaggagatcaggcagttgcagaatgactgcatgaggcttcgggagtcactgaacaccacccaagtgcacaacctggccctgggggagaagctgcagaacctgcccaccttattgtataagagcctgaaggagggagcccaggccatccaggaggaggcccaggccatccagga

SEQ ID NO: 341854 - DNA, 216 bp, Artificial Sequence
  derived and/or modified sequence
cagttcctggaccaggaggactggggcccccagagaaccagcaaggagatcagacagctgcagaacgactgcatgagactgagagagagcctgaacaccacccaggtgcacaacctggccctgggcgagaagctgcagaacctgcccaccctgctgtacaagagcctgaaggagggcgcccaggccatccaggaggaggcccaggccatccagtag

SEQ ID NO: 341855 - protein, 736 aa, Artificial Sequence
  derived and/or modified sequence
MAFSGIYKLDDGKPYLNNCFPARNLLRVPEEGQGHWLVVQKGNLKKKPKGLVGAQAERRESLKATSFEFKGKKESRRENQVDLPGHILDQAFLLKHHCVRKPSDLCTINAKENDFKHFHSVIYINASENLLPLEAFHTFPALKELDLAFNGIKTIYVKYGDFKLLEFLDLSFNSLTVEAICDLGILPHLRVLLLTGNGLTSLPPNLAVAEQEASVTSLTSKRYILRFPALETLMLDDNRLSNPSCFASLAGLRRLKKLSLDENRIIRIPYLQQVQLYDESVDWNGGRGSPHKEPQFMLQSKPRMLEDSDEQLDYTVLPMKKDVDRTIAKEDAVLPVALFPSLCEFVFHNNPLVAHTRGVPPLLKSFLQERLGIHLIRRKIVKPKHHVLMSRKESWKVKSEIPKVPKQPLVLHHPRMTTTKSPSKDMLEPEAELAEDLPTTKSTSVESEMPTENLEGHSPSCRTFVPLPPICSNSTVHSEETLSHLSDTTVRLSPERPSDEDSKSTESIFLTQVSELPSSVIHKDDLELKEKDQKKPPTAPREVKGTRRKLPTAFLPSKYHGYEELLTAKPDPAFIEPKGIQKNAQALQQMLKHPLLCHSSKPKLDTLQKPYVHKEKRAQRIPIPPPKKTRAQLLDDIFIRLRDPRNITEAPLGAVLHQWTERRLVNHKQYLEAKRLLKEFQARYRQLVSGSLRTVFGTTPLPMACPALSESQPKFGHFLEFMDEFCQEPTASDSQG

SEQ ID NO: 341856 - protein, 517 aa, Artificial Sequence
  derived and/or modified sequence
MLDDNRLSNPSCFASLAGLRRLKKLSLDENRIIRIPYLQQVQLYDESVDWNGGRGSPHKEPQFMLQSKPRMLEDSDEQLDYTVLPMKKDVDRTEVVFSSYPGFSTSEIAKEDAVLPVALFPSLCEFVFHNNPLVAHTRGVPPLLKSFLQERLGIHLIRRKIVKPKHHVLMSRKESWKVKSEIPKVPKQPLVLHHPRMTTTKSPSKDMLEPEAELAEDLPTTKSTSVESEMPTENLEGHSPSCRTFVPLPPICSNSTVHSEETLSHLSDTTVRLSPERPSDEDSKSTESIFLTQVSELPSSVIHKDDLELKEKDQKKPPTAPREVKGTRRKLPTAFLPSKYHGYEELLTAKPDPAFIEPKGIQKNAQALQQMLKHPLLCHSSKPKLDTLQKPYVHKEKRAQRIPIPPPKKTRAQLLDDIFIRLRDPRNITEAPLGAVLHQWTERRLVNHKQYLEAKRLLKEFQARYRQLVSGSLRTVFGTTPLPMACPALSESQPKFGHFLEFMDEFCQEPTASDSQG

SEQ ID NO: 341857 - DNA, 2211 bp, Artificial Sequence
  derived and/or modified sequence
atggccttcagcggcatctacaagctggacgacggcaagccctacctgaacaactgcttccccgccagaaacctgctgagagtgcccgaggagggccagggccactggctggtggtgcagaagggcaacctgaagaagaagcccaagggcctggtgggcgcccaggccgagagaagagagagcctgaaggccaccagcttcgagttcaagggcaagaaggagagcagaagagagaaccaggtggacctgcccggccacatcctggaccaggccttcctgctgaagcaccactgcgtgagaaagcccagcgacctgtgcaccatcaacgccaaggagaacgacttcaagcacttccacagcgtgatctacatcaacgccagcgagaacctgctgcccctggaggccttccacaccttccccgccctgaaggagctggacctggccttcaacggcatcaagaccatctacgtgaagtacggcgacttcaagctgctggagttcctggacctgagcttcaacagcctgaccgtggaggccatctgcgacctgggcatcctgccccacctgagagtgctgctgctgaccggcaacggcctgaccagcctgccccccaacctggccgtggccgagcaggaggccagcgtgaccagcctgaccagcaagagatacatcctgagattccccgccctggagaccctgatgctggacgacaacagactgagcaaccccagctgcttcgccagcctggccggcctgagaagactgaagaagctgagcctggacgagaacagaatcatcagaatcccctacctgcagcaggtgcagctgtacgacgagagcgtggactggaacggcggcagaggcagcccccacaaggagccccagttcatgctgcagagcaagcccagaatgctggaggacagcgacgagcagctggactacaccgtgctgcccatgaagaaggacgtggacagaaccatcgccaaggaggacgccgtgctgcccgtggccctgttccccagcctgtgcgagttcgtgttccacaacaaccccctggtggcccacaccagaggcgtgccccccctgctgaagagcttcctgcaggagagactgggcatccacctgatcagaagaaagatcgtgaagcccaagcaccacgtgctgatgagcagaaaggagagctggaaggtgaagagcgagatccccaaggtgcccaagcagcccctggtgctgcaccaccccagaatgaccaccaccaagagccccagcaaggacatgctggagcccgaggccgagctggccgaggacctgcccaccaccaagagcaccagcgtggagagcgagatgcccaccgagaacctggagggccacagccccagctgcagaaccttcgtgcccctgccccccatctgcagcaacagcaccgtgcacagcgaggagaccctgagccacctgagcgacaccaccgtgagactgagccccgagagacccagcgacgaggacagcaagagcaccgagagcatcttcctgacccaggtgagcgagctgcccagcagcgtgatccacaaggacgacctggagctgaaggagaaggaccagaagaagccccccaccgcccccagagaggtgaagggcaccagaagaaagctgcccaccgccttcctgcccagcaagtaccacggctacgaggagctgctgaccgccaagcccgaccccgccttcatcgagcccaagggcatccagaagaacgcccaggccctgcagcagatgctgaagcaccccctgctgtgccacagcagcaagcccaagctggacaccctgcagaagccctacgtgcacaaggagaagagagcccagagaatccccatccccccccccaagaagaccagagcccagctgctggacgacatcttcatcagactgagagaccccagaaacatcaccgaggcccccctgggcgccgtgctgcaccagtggaccgagagaagactggtgaaccacaagcagtacctggaggccaagagactgctgaaggagttccaggccagatacagacagctggtgagcggcagcctgagaaccgtgttcggcaccacccccctgcccatggcctgccccgccctgagcgagagccagcccaagttcggccacttcctggagttcatggacgagttctgccaggagcccaccgccagcgacagccagggctag

SEQ ID NO: 341858 - DNA, 1554 bp, Artificial Sequence
  derived and/or modified sequence
atgctggacgacaacagactgagcaaccccagctgcttcgccagcctggccggcctgagaagactgaagaagctgagcctggacgagaacagaatcatcagaatcccctacctgcagcaggtgcagctgtacgacgagagcgtggactggaacggcggcagaggcagcccccacaaggagccccagttcatgctgcagagcaagcccagaatgctggaggacagcgacgagcagctggactacaccgtgctgcccatgaagaaggacgtggacagaaccgaggtggtgttcagcagctaccccggcttcagcaccagcgagatcgccaaggaggacgccgtgctgcccgtggccctgttccccagcctgtgcgagttcgtgttccacaacaaccccctggtggcccacaccagaggcgtgccccccctgctgaagagcttcctgcaggagagactgggcatccacctgatcagaagaaagatcgtgaagcccaagcaccacgtgctgatgagcagaaaggagagctggaaggtgaagagcgagatccccaaggtgcccaagcagcccctggtgctgcaccaccccagaatgaccaccaccaagagccccagcaaggacatgctggagcccgaggccgagctggccgaggacctgcccaccaccaagagcaccagcgtggagagcgagatgcccaccgagaacctggagggccacagccccagctgcagaaccttcgtgcccctgccccccatctgcagcaacagcaccgtgcacagcgaggagaccctgagccacctgagcgacaccaccgtgagactgagccccgagagacccagcgacgaggacagcaagagcaccgagagcatcttcctgacccaggtgagcgagctgcccagcagcgtgatccacaaggacgacctggagctgaaggagaaggaccagaagaagccccccaccgcccccagagaggtgaagggcaccagaagaaagctgcccaccgccttcctgcccagcaagtaccacggctacgaggagctgctgaccgccaagcccgaccccgccttcatcgagcccaagggcatccagaagaacgcccaggccctgcagcagatgctgaagcaccccctgctgtgccacagcagcaagcccaagctggacaccctgcagaagccctacgtgcacaaggagaagagagcccagagaatccccatccccccccccaagaagaccagagcccagctgctggacgacatcttcatcagactgagagaccccagaaacatcaccgaggcccccctgggcgccgtgctgcaccagtggaccgagagaagactggtgaaccacaagcagtacctggaggccaagagactgctgaaggagttccaggccagatacagacagctggtgagcggcagcctgagaaccgtgttcggcaccacccccctgcccatggcctgccccgccctgagcgagagccagcccaagttcggccacttcctggagttcatggacgagttctgccaggagcccaccgccagcgacagccagggctag

SEQ ID NO: 341859 - DNA, 2211 bp, Artificial Sequence
  derived and/or modified sequence
atggcattttctgggatctataaattagatgacggcaagccttatctaaataactgctttcctgctcgaaatcttctgcgcgtacccgaagaaggacagggacactggctcgtcgtgcagaagggtaatctcaagaaaaagccaaaaggtctggtgggggctcaggccgagcggcgggagtcactgaaagccacgtccttcgagttcaaaggcaaaaaggaatcccggcgcgaaaaccaggtcgatcttcctggccacatattggatcaggcattcctgctgaaacatcattgcgtgagaaagccgagcgacttgtgcaccatcaatgcaaaagaaaacgattttaaacatttccatagtgtaatttatataaacgccagcgagaatctgctccccctggaagcctttcacacattccccgctctcaaagagctcgacttggcattcaacggcataaaaaccatttacgtcaaatacggcgatttcaagttgctggagtttctggacctttccttcaatagcctgactgtagaggctatctgtgacctcggaatcctgcctcatttgcgagtcttacttctgaccggcaatggcctcacttccttgcctcccaaccttgctgtggccgagcaggaggctagtgtgacgagcctcacatctaaacgatatatcctgaggttccctgccctcgaaaccctgatgctggatgataaccgcctcagcaatcctagctgtttcgcatctctggctggtctgcgtagactgaagaagctgtctctcgacgagaaccgcatcatcagaatcccctatctgcaacaggtgcaattgtatgacgaatccgttgactggaacggaggtaggggatcaccacacaaggaaccccaatttatgctgcagtccaaaccccggatgcttgaagattctgatgaacagctggactacaccgtcttgcctatgaagaaagacgtggatcggacaattgctaaagaggatgcagtgttgccggtcgccctgttcccttctctgtgtgagtttgtgtttcacaacaacccactggtggcccacacacgaggagtaccccctctgctcaaatccttcctgcaagagcgattaggaatccatttaattcgaaggaagatagttaagcccaaacaccatgtacttatgtcccgcaaggaaagctggaaagtcaagtcggaaatccctaaagttccgaaacaacctctggtgttgcaccatcctcggatgaccacaactaaatcaccttcaaaagatatgcttgagccagaagccgaactcgccgaggatcttcccaccactaaaagtacgagtgtggaaagcgaaatgcccaccgaaaatctcgaggggcattccccgtcctgtcggacctttgtaccccttccgcctatctgctctaacagcacagtacactcagaggagacgctttcccacttgtcggatacaacagtgcgcctcagtcccgagcgaccaagtgacgaagactccaaatccaccgagagtatcttccttacgcaggtgtccgagttacctagttcagtcattcacaaggacgacctggagttaaaagagaaagaccagaagaagccaccgaccgcacctagagaagtcaaaggcacccgcaggaagcttcccaccgcctttttgccctcaaaatatcacggctatgaggaactgctgactgctaagcccgatcccgcttttattgaacccaagggtatccagaaaaatgctcaagccctccaacagatgctgaagcacccattactgtgtcattccagtaagccaaagctggatacgctgcaaaaaccctatgtccataaggagaagcgggcacagcgtatcccaatccccccaccaaaaaaaacccgcgcccaacttttggacgatatttttattagactgcgggatcctcgaaacatcacggaagcgcctctcggcgcagtgctccatcagtggactgagcgccgattggtgaatcacaaacagtatctggaggccaaaaggctgttgaaagagttccaggctcgataccggcagctggtatcagggagcttgcgcactgtctttgggactactcctcttccaatggcctgtccagcactgagtgagtcccagccgaagtttggccattttctagagtttatggacgagttctgtcaggaaccaacggctagcgatagccagggttag

SEQ ID NO: 341860 - DNA, 1554 bp, Artificial Sequence
  derived and/or modified sequence
atgttggacgataacaggctctctaacccatcatgttttgcgagtctcgccggtctccgaaggctcaaaaagctgtctttagacgagaaccgaataatcaggatcccctatctccagcaggttcagctctatgacgagagtgtcgactggaacggcggacggggatcaccacataaggaaccccagttcatgctccaatcgaagcctagaatgctcgaagattctgacgagcaactggattataccgttctgccgatgaagaaagatgtggaccgcaccgaggtggtctttagctcctatcccgggttctccacctctgagatcgctaaagaggacgctgtgctgcctgtcgcactcttccctagcttgtgtgagtttgtgttccataacaaccccttagtcgcgcataccaggggcgtacctcctcttttaaagtcatttctccaggagagactgggtattcatttgatccgccgaaaaatcgtcaaaccaaagcatcatgtcctgatgagccgtaaggagtcgtggaaggttaaatctgaaatccccaaagtgcccaaacaaccgctcgtgcttcatcatccccggatgaccacaacaaaaagccctagtaaggatatgctggagcccgaagcggaactggctgaggacttacccacgactaagtcgacctctgtggaatccgagatgcccaccgagaacctggagggtcattctcccagctgcaggaccttcgtgcctttgccaccaatttgcagcaacagtaccgtccactcagaggaaacgctctcacatttatcagacacgacagtgaggttatcaccagagagaccatccgacgaagattcaaagtcaactgaatctatctttctgacacaggttagcgagctgccaagcagtgtgattcataaggatgatctggagttgaaggagaaggaccagaaaaaacctccaactgcccctagagaggtgaagggtacgcgacggaagttacccaccgcctttctcccatcgaagtatcacggctatgaggagctcttgacggcaaagcccgaccctgcgtttatcgagcccaagggaatacagaagaatgcccaggccttgcaacagatgctgaagcaccccctcctttgtcactctagcaagcctaagcttgatacgctccagaagccttacgtccataaggagaagcgagctcaaaggattccaattccaccccccaaaaaaactcgagcacagctgctggatgatatctttatccggttgcgcgaccctcgaaacatcacagaagctccgctaggcgcggtactgcaccagtggaccgaaagaaggctcgtcaatcataaacagtacctagaggccaagcgccttctcaaggaatttcaggctcggtatcggcagctggtatccggctccttgcgtactgtcttcggcaccactccactacccatggcttgtccagccctgagcgagtcccagcccaaattcggccactttctggaattcatggacgagttttgccaggagcccaccgccagcgactcccagggctag

SEQ ID NO: 341861 - DNA, 2211 bp, Artificial Sequence
  derived and/or modified sequence
atggccttcagcggcatctacaagctggatgatggcaagccctacctgaacaactgcttccctgccaggaacctgctgcgggtgcctgaggagggccagggccactggctggtggtgcagaagggcaacctgaagaagaagcccaagggcctggtgggcgcccaggccgagcggcgggagagcctgaaggccaccagctttgagttcaagggcaagaaggagagccggcgggagaaccaggtggacctgcccggccacatcctggaccaggccttcctgctgaagcaccactgtgtgaggaagcccagcgacctgtgcaccatcaatgccaaggaaaatgacttcaagcacttccacagcgtcatctacatcaatgccagcgagaacctgctgcccctggaggccttccacaccttccctgccctgaaggagctggacctggccttcaacggcatcaagaccatctacgtgaagtatggagacttcaagctgctggagttcctggacctgtccttcaacagcctgactgtggaggccatctgtgacctgggcatcctgccccacctgcgggtgctgctgctgactggaaatggcctgaccagcctgccccccaacctggccgtggccgagcaggaggcctctgtgaccagcctgaccagcaagcgctacatcctgcgcttccctgccctggagaccctgatgctggatgacaaccggctgagcaaccccagctgctttgccagcctggccggcctgcggcggctgaagaagctgagcctggatgagaaccgcatcatccgcatcccctacctgcagcaggtgcagctgtatgatgagagcgtggactggaatggaggccggggcagcccccacaaggagccccagttcatgctgcagagcaagcccaggatgctggaggacagtgatgagcagctggactacacagtgctgcccatgaagaaggatgtggacaggaccatcgccaaggaggatgctgtgctgcctgtggccctcttccccagcctgtgtgaatttgtgttccacaacaaccccctggtggcccacacccggggcgtgccccccctgctgaagagcttcctgcaggagcggctgggcatccacctgatccggaggaagatcgtgaagcccaagcaccacgtgctgatgagcaggaaggagagctggaaggtgaagtctgagatccccaaggtgcccaagcagcccctggtgctgcaccaccccaggatgaccaccaccaagagccccagcaaggacatgctggagcctgaggccgagctggccgaggacctgcccaccaccaagagcacctctgtggagagcgagatgcccacagagaacctggagggccacagccccagctgcaggacctttgtgcccctgccccccatctgcagcaacagcacagtgcacagcgaggagaccctgagccacctgagtgacaccaccgtgcggctgagccctgagcggcccagtgatgaggacagcaagagcacagagagcatcttcctgacccaggtgtctgagctgcccagcagcgtcatccacaaggatgacctggagctgaaggagaaggaccagaagaagccacccacagccccccgggaggtgaagggcaccaggaggaagctgcccacagccttcctgcccagcaagtaccacggctatgaggagctgctgacagccaagccagaccctgccttcatcgagcccaagggcatccagaagaatgcccaggccctgcagcagatgctgaagcaccccctgctgtgccacagcagcaagcccaagctggacaccctgcagaagccctacgtgcacaaggagaagagggcccagaggatccccatccccccacccaagaagacccgggcccagctgctggatgacatcttcatccggctgcgggaccccaggaacatcacagaggcccccctgggcgctgtgctgcaccagtggacagagcggcggctggtgaaccacaagcagtacctggaggccaagaggctgctgaaggagttccaggcccgctaccggcagctggtgtctggcagcctgaggacagtgtttggcaccacccccctgcccatggcctgcccagccctgtctgagagccagcccaagtttggccacttcctggagttcatggatgagttctgccaggagcccacagccagtgacagccagggctag

SEQ ID NO: 341862 - DNA, 1554 bp, Artificial Sequence
  derived and/or modified sequence
atgctggatgacaaccggctgagcaaccccagctgctttgccagcctggccggcctgcggcggctgaagaagctgagcctggatgaaaatcgcatcatccgcatcccctacctgcagcaggtgcagctgtatgatgaatctgtggactggaatggaggccggggcagcccccacaaggagccccagttcatgctgcagagcaagcccaggatgctggaggacagtgatgagcagctggactacacagtgctgcccatgaagaaggatgtggacagaacagaggtggtgttcagcagctacccaggcttcagcaccagcgagatcgccaaggaggatgctgtgctgcctgtggccctcttccccagcctgtgtgaatttgtgttccacaacaaccccctggtggcccacacccggggcgtgccccccctgctgaagagcttcctgcaggagcggctgggcatccacctgatccggaggaagatcgtgaagcccaagcaccacgtgctgatgagcaggaaggagagctggaaggtgaagtctgagatccccaaggtgcccaagcagcccctggtgctgcaccaccccaggatgaccaccaccaagagccccagcaaggacatgctggagcctgaggccgagctggccgaggacctgcccaccaccaagagcacctctgtggagagcgagatgcccacagagaacctggagggccacagccccagctgcaggacctttgtgcccctgccccccatctgcagcaacagcacagtgcacagcgaggagaccctgagccacctgagtgacaccaccgtgcggctgagccctgagcggcccagtgatgaggacagcaagagcacagagagcatcttcctgacccaggtgtctgagctgcccagcagcgtcatccacaaggatgacctggagctgaaggagaaggaccagaagaagcccccaacagccccccgggaggtgaagggcaccaggaggaagctgcccacagccttcctgcccagcaagtaccacggctatgaggagctgctgacagccaagccagaccctgccttcatcgagcccaagggcatccagaagaatgcccaggccctgcagcagatgctgaagcaccccctgctgtgccacagcagcaagcccaagctggacaccctgcagaagccctacgtgcacaaggagaagagggcccagaggatccccatccccccacccaagaagacccgggcccagctgctggatgacatcttcatccggctgcgggaccccaggaacatcacagaggcccccctgggcgctgtgctgcaccagtggacagaaagaaggctggtgaaccacaagcagtacctggaggccaagaggctgctgaaggagttccaggcccgctaccggcagctggtgtctggcagcctgaggacagtgtttggcaccacccccctgcccatggcctgcccagccctgtctgagagccagcccaagtttggccacttcctggagttcatggatgagttctgccaggagcccacagccagtgacagccagggctag

SEQ ID NO: 341863 - DNA, 2211 bp, Artificial Sequence
  derived and/or modified sequence
atggccttcagcggcatctacaagctggacgacggcaagccctaccttaacaactgctttccagctaggaatctgctgcgcgtcccggaggaaggccaagggcactggctagtcgtgcagaaagggaacctgaaaaaaaagcccaaagggttggtgggagcccaggcagagcgcagagaaagtctaaaggctacgtccttcgaatttaagggaaagaaggagagtcgacgtgaaaatcaggtagatcttcctggccacatcctagatcaggcctttctgctcaaacatcactgcgtgcggaagccctcagacctttgcactatcaatgccaaagagaatgatttcaagcacttccacagtgtcatctacatcaacgcttcggaaaatttgctgcccctcgaggctttccacacattccctgcattgaaagaacttgatcttgcctttaatggcattaaaacaatttacgttaagtatggcgactttaagttgcttgaatttctggacctgtcttttaactccctgacggtcgaggctatctgcgatctaggcattctcccccacctgcgcgtgctcctgctaacaggcaatggcctgacttccctaccccccaacttagccgtagcggagcaggaggcatcagtaacctccttgacatcaaaaagatacattctgcgttttcccgctctggagacgctgatgctggatgataaccgtctgagtaacccttcttgctttgccagcctcgctggcctccggagactgaagaagttaagcctcgacgagaacagaatcatcagaataccctatctccagcaggtgcagctgtatgatgagagcgtggattggaatggggggcggggaagcccccacaaagaaccccaattcatgctgcagtccaaaccccggatgctcgaggattcggacgagcagctggactacactgtgctgccgatgaaaaaggacgtggaccgaacaattgcgaaggaagacgcagtgctgcctgtggctctgtttccttccctgtgcgaattcgtgtttcataacaatcctcttgtggctcataccagaggggttcctccattgctgaagtccttcctgcaggagaggttaggcatacatttgattagaagaaagattgtgaagcccaaacatcatgtcctgatgagccggaaggaaagctggaaagtaaagagtgagatcccaaaagtgccaaagcagcccctggtgctgcatcatcctagaatgacaacaacgaagagccccagcaaagacatgctcgaacccgaggctgagctggctgaagatctgcctacaacgaagtctactagtgtggaatccgaaatgcccacggagaatctcgaaggtcatagtccctcctgtagaacctttgtaccgcttccaccaatctgttccaactcaacggttcattccgaagaaacactctcccatttatccgatacaacggtgcgcctcagccccgagaggccctccgacgaagatagcaaaagcacggagagtatttttctgacccaggtgagtgagctgccctcttccgtgatccataaagacgacctggaactgaaagagaaggatcagaagaaacctccaaccgcaccaagggaggtgaagggaaccaggcggaaattgccgaccgcatttctgccgtcaaaatatcacggctatgaagagctgttgactgccaagccggaccctgcctttattgagcccaaagggatccagaaaaacgcccaggctctccagcagatgctgaaacatccgttgctgtgtcactcaagcaagccaaagctggatacgcttcagaagccttacgtccataaggagaaacgggcacagcgaattcctataccaccaccaaaaaaaacacgcgcgcagctgctggatgacatctttatccgccttagggaccctagaaacatcacagaagcccccctgggtgccgtactccaccaatggacagaacgaaggctcgtgaaccacaagcagtaccttgaggctaaacgcctgctgaaggagtttcaggcaagatatcgccagctggtttctggcagcctgaggaccgtcttcgggacaacgccattaccaatggcctgcccggcactgagcgagagccaaccaaaattcgggcactttctggaatttatggacgagttctgccaggagcctaccgccagtgactctcaaggttag

SEQ ID NO: 341864 - DNA, 1554 bp, Artificial Sequence
  derived and/or modified sequence
atgctggacgacaaccggctgagcaaccccagctgcttcgccagcctcgctgggctaaggaggctgaagaaactgtcacttgacgaaaatcggataatccggataccatacctgcagcaggttcagctatacgatgaatcagtagactggaatggaggtcggggctccccacacaaagagccccagtttatgctgcagtctaagccacgcatgttggaagattctgacgaacaactggactacacggtgcttccaatgaagaaagacgtagaccggacagaggtggtgttttccagctatcctggcttttcgacctcggagattgctaaggaggacgccgtgcttcctgtggctttatttccgtctctgtgtgagttcgtctttcacaacaatcctctggtggcacacacgcgcggagtgccacccctcctgaagtcttttctgcaggagcggttgggcattcacctgatccggaggaagatcgttaaacctaagcaccacgtgctgatgtctcgtaaggagtcctggaaggtgaagagtgagatacccaaggtgccgaaacagccactggttctgcaccacccacggatgacgactaccaagtcaccttctaaggatatgcttgaacctgaggctgagctcgccgaggatctgcccaccaccaaatccacctctgttgaatccgagatgcccacagaaaacctggaagggcactctccctcctgccggacgttcgttcccctcccccccatttgttccaattccacagtgcacagtgaggaaactctcagccatttgagtgacacaacagtgaggctgtctcctgaacgcccaagcgatgaagactctaaatctactgaatcaatcttcctcactcaagtgagcgagctgccctcctccgtgatacataaggatgatttggagcttaaggaaaaagatcaaaagaagcctccgacggcgcctcgcgaggtcaaaggaacgcgtagaaagctccctacggctttcctgccttccaagtaccatgggtatgaggagctcctcactgccaaacccgatccagccttcattgaacccaagggaattcagaaaaatgcccaggccttacagcaaatgctgaaacaccccctgctgtgccactccagtaaacccaaactggacacacttcagaagccttacgtgcataaggaaaagagagcccagcgtatccctataccgcctcccaagaagactcgggcacagctgttggacgacatattcatacgcttaagggatcctcgcaacattactgaggctccgctaggggcagtcctccaccagtggactgagagaaggctcgttaatcataaacaatatcttgaggccaaaaggttgctgaaagagttccaggccagatatcggcagctcgtctccggttccctgcggaccgtcttcggaacaacccccctgcccatggcctgcccagccctgtcggaatcgcaacccaagtttggacattttctcgagttcatggatgagttctgccaggagcccacagctagtgactcacaggggtag

SEQ ID NO: 341865 - DNA, 2211 bp, Artificial Sequence
  derived and/or modified sequence
atggcctttagcggaatctataagttggatgatggcaaaccctatcttaataactgctttcctgcgcgtaatctgttgcgggtgcctgaagaagggcagggtcactggctggtggtgcagaagggcaatttgaaaaagaaacccaaaggcctggtgggcgcacaagccgaacgtcgggagagtctgaaagctacttcgtttgagttcaagggcaagaaagaatcgcgacgggagaaccaagttgatcttccaggccatatattagaccaagctttcttgctgaagcaccattgtgttagaaagccatccgatctgtgcacaattaatgccaaagaaaacgatttcaagcacttccattcagtgatctatataaacgcatccgaaaatcttctgccactagaggccttccacacattcccagccttgaaagagttagaccttgccttcaacggcatcaagactatctatgtgaaatacggggacttcaagctgctagaatttctcgacttgtcttttaacagcttgactgtggaagcgatctgcgatctgggaattttaccccacttaagagtgctcctgttgacggggaatggtcttacctctctaccacctaatcttgccgtcgctgagcaggaagcatctgtcacaagcttaacatcaaaacggtatatccttcgatttcccgcactggaaacattaatgctagatgataaccgtctctccaacccttcttgctttgcttcgctggctggtctcaggcggcttaagaagctttcgctggatgagaatcggataattcgcatcccctatctccaacaggtgcagctctatgatgagtcagtcgattggaacggcggtagggggagtccccacaaggaacctcagttcatgcttcagagcaaaccgagaatgcttgaagacagtgacgaacagctggactatactgtgctcccgatgaagaaggacgtcgatcgaactatcgcaaaagaggacgcggtattgccagttgccctcttccccagcttatgtgagttcgtctttcataataatcccctcgtagctcacaccagaggggttccgcctttgctcaaatcattcctgcaggagaggctggggattcatctgattagacgcaaaatcgtgaaacctaagcaccacgtgctgatgtcccgcaaggaaagttggaaggtgaagtccgagatccccaaggtgcctaaacagcccctcgtgctgcaccaccctaggatgactaccactaaaagccccagcaaggacatgctggagcctgaggcggaacttgccgaggatttacctaccaccaaatccaccagcgtcgaaagcgaaatgccaaccgaaaacctggaaggacacagcccatcatgtcggacattcgttccacttccaccaatttgtagcaacagcacggtgcatagcgaggagacgctgagtcacctgagcgataccactgtccggctgtcaccagaacgccctagcgatgaggacagcaagagtactgaatctatttttctcacccaggtctctgaacttccatcttctgtgatacacaaggatgatctggagctgaaggagaaagaccagaaaaagcccccaaccgcaccgagggaggtcaaggggacacgcagaaagctgccaacagcgtttctgccatcgaaataccacggctatgaggaactcttaacggctaaacctgaccccgcttttatagaacccaaaggcattcagaagaacgctcaggccttacagcagatgctcaagcacccacttctgtgccacagcagcaaaccaaagttggacaccctgcagaaaccgtacgtgcacaaagaaaagagagcacaaaggatccctattcctccccctaaaaagacccgagcgcagttgctcgacgatatctttattcggctgcgcgacccacggaacatcactgaggctccgttgggagcagtgctccaccagtggacggagcggagactcgtcaatcataaacagtatctggaagccaaacggcttcttaaagagttccaggctaggtataggcagcttgtctcagggagtctccgtaccgttttcggaacaaccccattgcctatggcatgccctgcattgtccgaatctcagccgaaatttggccattttctggagtttatggatgagttctgtcaggagcctacagcctctgattcacagggttag

SEQ ID NO: 341866 - DNA, 1554 bp, Artificial Sequence
  derived and/or modified sequence
atgctcgatgacaaccgtctttctaaccctagctgctttgcatcgttggcagggcttagacgcttgaagaagctctcattagatgaaaatcgcataatcaggatcccctatctgcagcaagtgcagctgtatgacgaatcagtggactggaatgggggtcgcggtagcccgcataaggagccccagttcatgttacagtctaagccacgcatgttggaggactccgacgaacagctggactatacagtgctccccatgaaaaaggatgtagaccggacagaggtagtattttcgtcataccctgggttctctacgtccgaaatcgctaaggaggatgccgttctgcccgtagcactgttcccctccctgtgcgaatttgttttccacaacaatcccctagtggcccacacaaggggggtccccccactgctgaaaagttttctacaagagcgcctggggattcacctgatccgaagaaagatcgttaagcccaagcaccacgtgctcatgtcccggaaggagtcctggaaggtgaaatcagagatcccaaaggtgccgaaacaacccctggtcctgcatcacccaaggatgactaccactaaatctcctagcaaggacatgcttgaacctgaggctgagctcgcagaagaccttccaacaaccaaatcaacatctgtagagtcggagatgcctaccgagaaccttgagggacacagcccatcttgcaggacattcgtgcccctgcctccaatatgctctaattctaccgtccattcagaggagactctgtcgcatttgtcggatactaccgtgagattaagccccgagcgcccttcagatgaggatagtaaaagcactgagagcatctttctcacacaggtctccgaactgccgagcagcgtgattcataaggacgacttagagctcaaggagaaggaccagaagaagccacccacggcgccaagagaagtgaaggggaccaggcgtaaactgccgacggcgtttttacctagtaaataccacggatatgaggaacttctgaccgcgaaaccggaccccgcttttatcgagccaaagggtatccagaagaacgctcaggcactacagcagatgcttaagcaccctctcctgtgtcatagctcaaagcctaaacttgacacactccagaagccgtatgttcataaggagaaaagggcacaacggattcctatccccccacctaagaaaacacgcgcacagctgctggacgacatcttcattcgactgagagacccgagaaatattaccgaggctccgttgggtgctgtgctgcatcagtggacagagcgccgtctcgtgaatcataagcagtatttagaagctaaaagattacttaaggagttccaggctcgttaccggcagctggtgagcggcagtttgcgtaccgtgttcggcacgactccactacctatggcctgccccgcactgtccgagagccaacctaagttcgggcattttctagaattcatggatgaattttgtcaggagcctactgcatctgattctcagggctag

SEQ ID NO: 341867 - DNA, 4832 bp, Artificial Sequence
  derived and/or modified sequence
agtttgggtcttgctggcgcgaggtagtcagaggacgtggccgcggggcttgctgggacttgaggttagacgtcccggccgtcggttgccgcctacactgtctgccgtcgcgtcgcagttactaaggcgtggggaagatagcggcaggcaccgcagtggagcggctccgagatccccggggggctcgcaggcgcgcatccctcctgactgggacgtcgcctccgcagacccctcggaggctgaagcgacgccggaggcaggcaaagaaacaagtgaagaaacaaaaaaaaaaggaagttaaggggccattcccaaagtcaaagatcaaggagatggccttctcaggaatctacaagctggatgatgggaagccttacctgaacaactgcttcccagccagaaatctgcttcgcgtgccggaggaaggccaaggacactggttagtggttcagaaaggtaacctcaagaagaagcccaagggtttggttggagcacaagctgaacgtcgggaaagcctgaaggcgacttcttttgagttcaaggggaagaaagagtctcggcgggaaaatcaggtggaccttcctggacatatcctggaccaggcttttctgctgaagcaccactgtgtgaggaagccatcagatctgtgcaccattaatgccaaggaaaatgacttcaagcattttcattctgtgatttatatcaatgcctcagaaaacctgctgcctctagaggcatttcacacgtttccagccctaaaggaactggatctcgcatttaatggcatcaaaactatctacgtgaaatatggagactttaagttattagaattcttggacctttccttcaacagcctgactgtggaggccatctgtgatttggggattctgccacacctccgtgtcctgctcctcacaggcaatggccttacctccctgccgcccaatttggccgtcgcagaacaggaggcatctgtaacatcgctgacaagcaagaggtacatcctgaggttcccagcgctggagacactgatgctggatgacaacagactctccaaccccagttgctttgccagcctggctgggctcaggagactgaagaagttaagcttggatgaaaacaggattatcaggatcccatacctacagcaagttcagctctatgacgagtcagtagactggaatggaggcaggggaagtccccataaagagccccaattcatgctgcagtccaagccaaggatgcttgaggactcagatgagcaactggattatactgtactgcccatgaaaaaggatgttgaccggacaatcgcaaaagaggatgctgtcctaccagtagctctcttcccatctctctgcgagttcgtctttcataacaaccctctggtggcccatacacgaggggtccctccactgctgaagagcttcctccaggagcgactgggaatccacttaattcgaaggaagatagtaaagcctaagcatcatgttttgatgtctcggaaggaatcatggaaggtgaaaagcgaaatcccaaaggtgccgaagcagcctctggtgctccatcacccgcgcatgacgacaaccaagtctccctcaaaggatatgctagagccagaggcagagctggctgaagatctgcccactaccaaaagcacttctgtggagtcagagatgcccactgagaacctggaaggccattccccgtcttgccggaccttcgtgccactgcctcccatctgctccaactccactgtgcatagtgaagagaccctgtcccacctgagtgacacaactgtccgcctcagcccagagcgcccatcagatgaggactccaagagcacagagtccatcttcctgacccaggtgagtgaactgccttcctccgtcatccataaggatgatttagagttaaaggagaaagaccaaaagaaaccaccaacggcacccagagaggtgaaagggactcggaggaaactcccaactgccttccttcccagcaagtaccacggctatgaagaactgctgacagccaagcctgatccagccttcattgagccaaagggaatccagaagaatgcacaagccctgcaacaaatgctgaagcacccactcctgtgccactcctccaagcccaagctggacactcttcagaaaccctatgttcacaaagagaaacgggcccagagaatcccgattccacccccaaagaagactagagcccaacttctggatgacatcttcattcgcttgcgggatccccggaacattacagaggctccactaggtgctgtcctgcaccagtggacagaacggcggctggtgaaccacaagcagtacctggaggccaagaggctgttgaaggagttccaggcacgttaccggcagctggtgagtggctctctgcgcacagtgttcgggactaccccgctccccatggcctgcccagcgctgagtgagagccagcccaagttcggccacttcctcgagttcatggatgagttctgccaggagcccacagccagtgactcacaaggctagagctgtgcatgggggctgtgtgcaccacccggcctgtgccccagctctccccgagggctctgtgccctggaccgcacctcaaggttgaccagccggccacaggcctcagagctcagctgggccccacttgctggccacaaggtggcatccccttgtcaggatctcccctccttggcccaggcatgacctggtgcctggcccagcggcaataaagagtgggtgcacagggcaatagactgggtgccacatgcattctttcttggaacccaggccacagcagcattgtcacacttccctctaaaaatggttttccagttcagatgcaacagggatacatttgttctctgttgtatgagaaactgacaccaaggggatcttaacaaattcctgaacaatggctccaaaaaagggtatttttaaaaaccagatcttgtgagtacagccctaatgtgcagggacagtgtcatcctgtatattcgttctttactcagactctttcttggttccttcattaggagcatgaatggttgaatgtgaacatgacagtaaattggagcaaactgtaaactggacataacttatgccaaaagacgtagttgtacaccatggaaaccccatccctgctcctaatctctactgccattctgaatgccaaagcaagacatccaacatggggcatctcccagagcacatacagcaccaaaaatccacacacagcctaagcttaacccatgtttttgtctgagattgttcaccagagacaagactctgactataaacagaacatccactttcatgagtttcctttactgtattctcaacttgggccttgcttcaagcaggcaaacatacattgaagaatgcactttggtactgtttaaataacaacacatcagcccacttgattccatgccatgtccttgctgacagaaacatccccaacagggcatgccctggtccaagtcctctgtctttgtcaaaatgctcttctgatgagttggagaggaggcagccagcagtggcagtccacaaggatccaggtaccttctccaatcctaaagcagacagcaggttgaataaaaccaatacacaacctattttctaggcaggaggggaaaaggcccttaggacaataatatttgtacaaagagttgagagtaaacaaacagtgtatcaggttcaaaaaaaaaaaaactattcgttggcatttaaatttttttcccttgcatagtatctattctctcactaggacttttaagtgctctgctggaggctcagcgttggtaataccatgtttgatgcaaacttgaacccaatgctctcattggtggcacagctttggagggtggtggccccaagaaggggcaatctgcctgctgctatattaatctggaaccagggccaacagctactcttgaactatggtatttgaagagcgagttcattgcctgttttaccttaaatgacaggaaaggaagatgaacaaaccttgctttgccttggcttcaaactagttcttgatttaagacaccagaaagggagagagggagtctgcttagagtttgaggttgcctctcacaagatgacagttaaaagttgccaccttacttaaaaggcattaaggaggcatttactcacaaaggagagagagtaaatttttttcttaagaggaaaaaaatactgataatacatagaacaatctgcacatccagtcttggcactttttccaatttgactgatctctaaactggtgacccttgcatatatcttagtctcttttctacaatcttcttcagaaagctacagcagctaacaatcatgtataaagatgcatttcctagatcatcttcagaagaaaatctcttcagcactttccctagaatctgtctcctgaccaccccgccccagacctgctttctcttttgagaattcataaccaggtatgtttagataccagttcaaaagaccactctatgggttgatgaggaaaaggctgcctgaggacaatttaagaccataatgagtttccaatttttaaagaaaatttggctagctggcttttaattcttaattaaaatcattaaatttaattaaaattattccaatcaaaatatatcactttccaagattccacattcatattacttacttatactatggagactttctctacctgagcatgtattcaggggctataggtacatttaactctaactaactgaaaaaaatcaggaagaaaaaactattaaaataaaataacctcctaaatcatttgggggtatccccatc

SEQ ID NO: 341868 - DNA, 4695 bp, Artificial Sequence
  derived and/or modified sequence
ggccgcggggcttgctgggacttgaggttagacgtcccggccgtcggttgccgcctacactgtctgccgtcgcgtcgcagttactaaggcgtggggaagatagcggcaggcaccgcagtggagcggctccgagatccccggggggctcgcaggcgcgcatccctcctgactgggacgtcgcctccgcagacccctcggaggctgaagcgacgccggaggcaggccaaggacactggttagtggttcagaaaggtaacctcaagaagaagcccaagggtttggttggagcacaagctgaacgtcgggaaagcctgaaggcgacttcttttgagttcaaggggaagaaagagtctcggcgggaaaatcaggtggaccttcctggacatatcctggaccaggcttttctgctgaagcaccactgtgtgaggaagccatcagatctgtgcaccattaatgtgagtggcctgaagttctccaaggccaaggaaaatgacttcaagcattttcattctgtgatttatatcaatgcctcagaaaacctgctgcctctagaggcatttcacacgtttccagccctaaaggaactggatctcgcatttaatggcatcaaaactatctacgtgaaatatggagactttaagttattagaattcttggacctttccttcaacagcctgactgtggaggccatctgtgatttggggattctgccacacctccgtgtcctgctcctcacaggcaatggccttacctccctgccgcccaatttggccgtcgcagaacaggaggcatctgtaacatcgctgacaagcaagaggtacatcctgaggttcccagcgctggagacactgatgctggatgacaacagactctccaaccccagttgctttgccagcctggctgggctcaggagactgaagaagttaagcttggatgaaaacaggattatcaggatcccatacctacagcaagttcagctctatgacgagtcagtagactggaatggaggcaggggaagtccccataaagagccccaattcatgctgcagtccaagccaaggatgcttgaggactcagatgagcaactggattatactgtactgcccatgaaaaaggatgttgaccggacagaggttgtgttttcatcttaccctggattttcaacctcagagatcgcaaaagaggatgctgtcctaccagtagctctcttcccatctctctgcgagttcgtctttcataacaaccctctggtggcccatacacgaggggtccctccactgctgaagagcttcctccaggagcgactgggaatccacttaattcgaaggaagatagtaaagcctaagcatcatgttttgatgtctcggaaggaatcatggaaggtgaaaagcgaaatcccaaaggtgccgaagcagcctctggtgctccatcacccgcgcatgacgacaaccaagtctccctcaaaggatatgctagagccagaggcagagctggctgaagatctgcccactaccaaaagcacttctgtggagtcagagatgcccactgagaacctggaaggccattccccgtcttgccggaccttcgtgccactgcctcccatctgctccaactccactgtgcatagtgaagagaccctgtcccacctgagtgacacaactgtccgcctcagcccagagcgcccatcagatgaggactccaagagcacagagtccatcttcctgacccaggtgagtgaactgccttcctccgtcatccataaggatgatttagagttaaaggagaaagaccaaaagaaaccaccaacggcacccagagaggtgaaagggactcggaggaaactcccaactgccttccttcccagcaagtaccacggctatgaagaactgctgacagccaagcctgatccagccttcattgagccaaagggaatccagaagaatgcacaagccctgcaacaaatgctgaagcacccactcctgtgccactcctccaagcccaagctggacactcttcagaaaccctatgttcacaaagagaaacgggcccagagaatcccgattccacccccaaagaagactagagcccaacttctggatgacatcttcattcgcttgcgggatccccggaacattacagaggctccactaggtgctgtcctgcaccagtggacagaacggcggctggtgaaccacaagcagtacctggaggccaagaggctgttgaaggagttccaggcacgttaccggcagctggtgagtggctctctgcgcacagtgttcgggactaccccgctccccatggcctgcccagcgctgagtgagagccagcccaagttcggccacttcctcgagttcatggatgagttctgccaggagcccacagccagtgactcacaaggctagagctgtgcatgggggctgtgtgcaccacccggcctgtgccccagctctccccgagggctctgtgccctggaccgcacctcaaggttgaccagccggccacaggcctcagagctcagctgggccccacttgctggccacaaggtggcatccccttgtcaggatctcccctccttggcccaggcatgacctggtgcctggcccagcggcaataaagagtgggtgcacagggcaatagactgggtgccacatgcattctttcttggaacccaggccacagcagcattgtcacacttccctctaaaaatggttttccagttcagatgcaacagggatacatttgttctctgttgtatgagaaactgacaccaaggggatcttaacaaattcctgaacaatggctccaaaaaagggtatttttaaaaaccagatcttgtgagtacagccctaatgtgcagggacagtgtcatcctgtatattcgttctttactcagactctttcttggttccttcattaggagcatgaatggttgaatgtgaacatgacagtaaattggagcaaactgtaaactggacataacttatgccaaaagacgtagttgtacaccatggaaaccccatccctgctcctaatctctactgccattctgaatgccaaagcaagacatccaacatggggcatctcccagagcacatacagcaccaaaaatccacacacagcctaagcttaacccatgtttttgtctgagattgttcaccagagacaagactctgactataaacagaacatccactttcatgagtttcctttactgtattctcaacttgggccttgcttcaagcaggcaaacatacattgaagaatgcactttggtactgtttaaataacaacacatcagcccacttgattccatgccatgtccttgctgacagaaacatccccaacagggcatgccctggtccaagtcctctgtctttgtcaaaatgctcttctgatgagttggagaggaggcagccagcagtggcagtccacaaggatccaggtaccttctccaatcctaaagcagacagcaggttgaataaaaccaatacacaacctattttctaggcaggaggggaaaaggcccttaggacaataatatttgtacaaagagttgagagtaaacaaacagtgtatcaggttcaaaaaaaaaaaaactattcgttggcatttaaatttttttcccttgcatagtatctattctctcactaggacttttaagtgctctgctggaggctcagcgttggtaataccatgtttgatgcaaacttgaacccaatgctctcattggtggcacagctttggagggtggtggccccaagaaggggcaatctgcctgctgctatattaatctggaaccagggccaacagctactcttgaactatggtatttgaagagcgagttcattgcctgttttaccttaaatgacaggaaaggaagatgaacaaaccttgctttgccttggcttcaaactagttcttgatttaagacaccagaaagggagagagggagtctgcttagagtttgaggttgcctctcacaagatgacagttaaaagttgccaccttacttaaaaggcattaaggaggcatttactcacaaaggagagagagtaaatttttttcttaagaggaaaaaaatactgataatacatagaacaatctgcacatccagtcttggcactttttccaatttgactgatctctaaactggtgacccttgcatatatcttagtctcttttctacaatcttcttcagaaagctacagcagctaacaatcatgtataaagatgcatttcctagatcatcttcagaagaaaatctcttcagcactttccctagaatctgtctcctgaccaccccgccccagacctgctttctcttttgagaattcataaccaggtatgtttagataccagttcaaaagaccactctatgggttgatgaggaaaaggctgcctgaggacaatttaagaccataatgagtttccaatttttaaagaaaatttggctagctggcttttaattcttaattaaaatcattaaatttaattaaaattattccaatcaaaatatatcactttccaagattccacattcatattacttacttatactatggagactttctctacctgagcatgtattcaggggctataggtacatttaactctaactaactgaaaaaaatcaggaagaaaaaactattaaaataaaataacctcctaaatcatttgggggtatccccatca

SEQ ID NO: 341869 - protein, 296 aa, Artificial Sequence
  derived and/or modified sequence
MAFSGIYKLDDGKPYLNNCFPARNLLRVPEEGQGHWLVVQKGNLKKKPKGLVGAQAERRESLKATSFEFKGKKESRRENQVDLPGHILDQAFLLKHHCVRKPSDLCTINVSGLKFSKAKENDFKHFHSVIYINASENLLPLEAFHTFPALKELDLAFNGIKTIYVKYGDFKLLEFLDLSFNSLTVEAICDLGILPHLRVLLLTGNGLTSLPPNLAVAEQEASVTSLTSKRYILRFPALETLMLDDNRLSNPSCFASLAGLRRLKKLSLDENRIIRIPYLQQVQLYDESVDWNGGRG

SEQ ID NO: 341870 - DNA, 891 bp, Artificial Sequence
  derived and/or modified sequence
atggccttcagcggcatctacaagctggacgacggcaagccctacctgaacaactgcttccccgccagaaacctgctgagagtgcccgaggagggccagggccactggctggtggtgcagaagggcaacctgaagaagaagcccaagggcctggtgggcgcccaggccgagagaagagagagcctgaaggccaccagcttcgagttcaagggcaagaaggagagcagaagagagaaccaggtggacctgcccggccacatcctggaccaggccttcctgctgaagcaccactgcgtgagaaagcccagcgacctgtgcaccatcaacgtgagcggcctgaagttcagcaaggccaaggagaacgacttcaagcacttccacagcgtgatctacatcaacgccagcgagaacctgctgcccctggaggccttccacaccttccccgccctgaaggagctggacctggccttcaacggcatcaagaccatctacgtgaagtacggcgacttcaagctgctggagttcctggacctgagcttcaacagcctgaccgtggaggccatctgcgacctgggcatcctgccccacctgagagtgctgctgctgaccggcaacggcctgaccagcctgccccccaacctggccgtggccgagcaggaggccagcgtgaccagcctgaccagcaagagatacatcctgagattccccgccctggagaccctgatgctggacgacaacagactgagcaaccccagctgcttcgccagcctggccggcctgagaagactgaagaagctgagcctggacgagaacagaatcatcagaatcccctacctgcagcaggtgcagctgtacgacgagagcgtggactggaacggcggcagaggctag

SEQ ID NO: 341871 - DNA, 891 bp, Artificial Sequence
  derived and/or modified sequence
atggccttcagcggcatatataaactggatgacggcaaaccctatctgaacaactgttttcccgccaggaatctcctacgcgtgcctgaagaggggcagggtcattggcttgtcgtgcagaagggcaacctaaaaaagaagcctaaagggctcgtgggcgcacaggctgagaggagagaatccctgaaagcgacctcctttgagtttaagggaaagaaggagtctaggcgagaaaaccaggttgacttgcccggacacatactcgaccaggctttcttgctcaaacatcattgcgtccgtaagccgagcgatctatgcaccattaacgtttcagggctgaagtttagtaaggcgaaagaaaatgactttaaacatttccattctgtgatttatattaatgccagtgagaacctattgccgctggaagccttccacaccttccccgcccttaaggagctcgacctcgcttttaacgggatcaagacaatctatgtcaaatatggcgatttcaagcttctcgaattcctcgatctctcgtttaacagtctgacggtcgaggcgatttgcgacctggggatcctgccccatctgagagtcctgctgttgaccggtaatgggctaacctctttgcccccaaatctggccgtagccgagcaggaggctagtgtgacttctctgacgtccaaacgatacatccttcggttcccagccctcgagacacttatgctggatgataaccgactgagcaaccccagttgctttgcatccctagcgggactgcgcaggctaaagaaactgtcactggacgaaaatcggataattagaattccctatctccagcaggtgcagttgtatgatgaatcggtggattggaacggcgggaggggttag

SEQ ID NO: 341872 - DNA, 891 bp, Artificial Sequence
  derived and/or modified sequence
atggccttcagcggcatctacaagctggatgatggcaagccctacctgaacaactgcttccctgccaggaacctgctgcgggtgcctgaggagggccagggccactggctggtggtgcagaagggcaacctgaagaagaagcccaagggcctggtgggcgcccaggccgagcggcgggagagcctgaaggccaccagctttgagttcaagggcaagaaggagagccggcgggagaaccaggtggacctgcccggccacatcctggaccaggccttcctgctgaagcaccactgtgtgaggaagcccagcgacctgtgcaccatcaacgtgtctggcctgaagttcagcaaggccaaggaaaatgacttcaagcacttccacagcgtcatctacatcaatgccagcgagaacctgctgcccctggaggccttccacaccttccctgccctgaaggagctggacctggccttcaacggcatcaagaccatctacgtgaagtatggagacttcaagctgctggagttcctggacctgtccttcaacagcctgactgtggaggccatctgtgacctgggcatcctgccccacctgcgggtgctgctgctgactggaaatggcctgaccagcctgccccccaacctggccgtggccgagcaggaggcctctgtgaccagcctgaccagcaagcgctacatcctgcgcttccctgccctggagaccctgatgctggatgacaaccggctgagcaaccccagctgctttgccagcctggccggcctgcggcggctgaagaagctgagcctggatgagaaccgcatcatccgcatcccctacctgcagcaggtgcagctgtatgatgagagcgtggactggaatggaggccggggctag

SEQ ID NO: 341873 - DNA, 891 bp, Artificial Sequence
  derived and/or modified sequence
atggccttcagcggcatctacaagctggacgacggcaagccctacctgaacaactgctttcctgctagaaatcttctgcgagtgcctgaggagggccaaggtcactggcttgtcgtccagaaaggaaatctgaagaagaagccaaagggcctcgtcggtgcccaggccgagcgacgggagtcactgaaggctaccagttttgagttcaagggaaagaaggaaagtcgtagggagaatcaggtggacctgcccggccacatactcgatcaggcatttctgttgaaacatcactgcgtgcggaaaccttccgacctatgtacaatcaatgtgtctggactcaaattctcaaaggctaaagaaaacgatttcaagcacttccactccgtgatctacattaacgcatctgagaacctcttacctctagaggcattccacacatttcccgccctgaaagagctggacttagcattcaacggcattaagacgatctacgtcaaatatggcgactttaagttattagagttcctggatctgagcttcaatagtctaactgtcgaagcgatctgtgacctggggatcctaccccatctgagagtgctcctgctaacggggaacggtctgacttcattaccacctaacctagctgtagcagagcaggaggctagtgtaactagcctcacgtcgaaacggtacatccttcgcttcccagccttggagacacttatgctggacgacaaccggctttctaaccctagttgctttgcttcactcgccggactcaggcgccttaaaaaactgtctctagacgaaaataggatcatcaggattccatacctgcaacaggtccaactgtatgacgagtcagtggattggaatggaggccgcgggtag

SEQ ID NO: 341874 - DNA, 891 bp, Artificial Sequence
  derived and/or modified sequence
atggcgttttcaggaatctacaaactggatgacggcaagccatatttaaataattgttttcccgctcgaaatctcttgcgtgtgcctgaggagggccagggccactggctggtagtgcaaaaaggaaacctgaagaaaaagcctaagggcctggtaggagcccaggcagagcgacgggaaagcctcaaggcgaccagctttgagttcaaggggaagaaggaatcacggagagagaaccaggtggacctgcctggacatattctcgatcaggcatttctccttaaacaccattgcgtccgaaagccatctgatctctgtaccatcaatgtgtctggccttaaattcagcaaggctaaggaaaacgacttcaagcattttcactcagtgatctatattaatgcatccgagaatttgttaccgctggaggcattccatacttttcctgccctcaaagaacttgatctggcattcaatggaattaagaccatatacgttaagtacggtgactttaagctgctcgagttccttgacctttcctttaacagcctgacggttgaagctatttgcgatttgggtattctccctcatctcagggtcctgctgctgactggaaatggcctgacaagtctcccgccaaaccttgctgttgccgaacaggaagcttcagtcacgtccctgacttccaaaagatacatcttgcggtttcccgctctggagacattaatgctcgacgacaatagactttcaaacccgagttgcttcgcctccctcgccggtttgcgaaggttgaagaaactttctctcgacgagaaccgaatcataagaatcccctacttacagcaggtgcagttatatgatgaatctgtagactggaacggaggtagaggctag

SEQ ID NO: 341875 - DNA, 986 bp, Artificial Sequence
  derived and/or modified sequence
cgagatccccggggggctcgcaggcgcgcatccctcctgactgggacgtcgcctccgcagacccctcggaggctgaagcgacgccggaggcagggagatggccttctcaggaatctacaagctggatgatgggaagccttacctgaacaactgcttcccagccagaaatctgcttcgcgtgccggaggaaggccaaggacactggttagtggttcagaaaggtaacctcaagaagaagcccaagggtttggttggagcacaagctgaacgtcgggaaagcctgaaggcgacttcttttgagttcaaggggaagaaagagtctcggcgggaaaatcaggtggaccttcctggacatatcctggaccaggcttttctgctgaagcaccactgtgtgaggaagccatcagatctgtgcaccattaatgtgagtggcctgaagttctccaaggccaaggaaaatgacttcaagcattttcattctgtgatttatatcaatgcctcagaaaacctgctgcctctagaggcatttcacacgtttccagccctaaaggaactggatctcgcatttaatggcatcaaaactatctacgtgaaatatggagactttaagttattagaattcttggacctttccttcaacagcctgactgtggaggccatctgtgatttggggattctgccacacctccgtgtcctgctcctcacaggcaatggccttacctccctgccgcccaatttggccgtcgcagaacaggaggcatctgtaacatcgctgacaagcaagaggtacatcctgaggttcccagcgctggagacactgatgctggatgacaacagactctccaaccccagttgctttgccagcctggctgggctcaggagactgaagaagttaagcttggatgaaaacaggattatcaggatcccatacctacagcaagttcagctctatgacgagtcagtagactggaatggaggcaggggaa

SEQ ID NO: 341876 - protein, 129 aa, Artificial Sequence
  derived and/or modified sequence
MPMASPQTLVLYLLVLAVTEAWGQEAVIPGCHLHPFNVTVRSDRQGTCQGSHVAQACVGHCESSAFPSRYSVLVASGYRHNITSVSQCCTISGLKKVKVQLQCVGSRREELEIFTARACQCDMCRLSRY

SEQ ID NO: 341877 - DNA, 747 bp, Artificial Sequence
  derived and/or modified sequence
ccagcaggaggcacaggaaaactgcaagccgctctgttcctgggcctcggaagtgatgcctatggcgtcccctcaaaccctggtcctctatctgctggtcctggcagtcactgaagcctggggccaggaggcagtcatcccaggctgccacttgcaccccttcaatgtgacagtgcgaagtgaccgccaaggcacctgccagggctcccacgtggcacaggcctgtgtgggccactgtgagtccagcgccttcccttctcggtactctgtgctggtggccagtggttaccgacacaacatcacctccgtctctcagtgctgcaccatcagtggcctgaagaaggtcaaagtacagctgcagtgtgtggggagccggagggaggagctcgagatcttcacggccagggcctgccagtgtgacatgtgtcgcctctctcgctactagcccatcctctcccctccttcctcccctgggtcacagggcttgacgttctggtgggggaaacctgtgttcaagattcaaaaactggaaggagctccagccctgatggttacttgctatggaatttttttaaataaggggagggttgttccagctttgatcctttgtaagattttgtgactgtcacctgagaagaggggagtttctgcttcttccctgcctctgcctggcccttctaaaccaatctttcatcattttacttccctctttgcccttacccctaaataaagcaagcagttcttgaa

SEQ ID NO: 341878 - DNA, 276 bp, Artificial Sequence
  derived and/or modified sequence
atgtggaagcccatgcccagccccagcaacatgaaggccagcgctgccctgctgtgcctgctgctgacagctgctgccttcagcccccagggcctggcccagcctgagcggcccaggacccacccccagtggaccttcctgctggtggtgtccctgcagctgggcctcatcctgcagctgcctgctgccacagacctgagcatcaggaagagcctgagccggggctggagggccacagagggcccccctgtggccaccgtgcctgggaagctgtag

SEQ ID NO: 341879 - DNA, 174 bp, Artificial Sequence
  derived and/or modified sequence
atgtggaagcccatgcccagccccagcaacatgaaggccagcgccgcccttttatgtttgctgctgaccgccgccgcattttctcctcagggcctggcgcagccagccagtaggcccaattggacacgacgttcggttctcacaccccatcggtcagggagccgaacgttatag

SEQ ID NO: 341880 - DNA, 327 bp, Artificial Sequence
  derived and/or modified sequence
atggctgccaagagccagcccaatatccccaaggctaagtccctcgatggggtcacaaacgatcgcactgcttctcaggggcaatgggggcgtgcctgggaggttgactggtttagtctggccagcgtcattttccttctcctgttcgctccctttattgtgtactactttatcatggcttgcgaccagtatagctgtgcccttactggtcctgttgtggatattgttacaggccacgccagactgtcagacatttgggccaagacccctcccatcaccaggaaagcggcccagctttatactttatgggttacattccaggtctag

SEQ ID NO: 341881 - DNA, 495 bp, Artificial Sequence
  derived and/or modified sequence
atggcagctaagagccagcccaacatccctaaggcaaagagcctggatggcgttactaacgatcgaaccgcttctcagggccagtggggaagggcttgggaggttgactggtttagcctggccagcgtcatttttctgcttcttttcgcaccgttcattgtctactactttattatggcatgcgatcaatatagctgtgccctcactggaccagtggtggatattgttactggccatgccaggttgagcgacatctgggccaagactccccctattacgaggaaagctgcacagctgtataccctgtgggtgactttccaggtcctcttgtatacctcactgccggatttttgccataagtttctgcctgggtatgtgggcggcatccaggagggtgctgtgactcccgctggggtcgtaaataagtatcagatcaatggcctgcaagcttggctattgacccatctcctctggtttgctaacgcccacctgtag

SEQ ID NO: 341882 - DNA, 276 bp, Artificial Sequence
  derived and/or modified sequence
atggcagcaaagtcacaacctaatatacctaaggccaaaagcctggacggcgtgacgaacgacagaacggcatcccagggccagtggggaagggcttgggaagtggactggttcagtctcgcatctgtgatctttttgctactgttcgcgccatttatcgtgtattacttcatcatggcctgtgatcagtattcctgcgcattaactggccctgtggtggacatcgtaactggacatgctcggctcagcgacatctgggctaagactcccccatag

SEQ ID NO: 341883 - DNA, 318 bp, Artificial Sequence
  derived and/or modified sequence
atggctgctaaaagtcagcccaacattccgaaagccaagtctctggacggtgttactaacgatagaaccgcctcacaaggacaatggggccgcgcctgggaagtggactggttcagtctggccagcgtcatcttcctgcttttgttcgcacccttcattgtgtactactttattatggcctgcgatcagtatagttgtgcccttactgggccggtggtcgatatcgtgacgggacatgcccggctcagcgacatatgggctaagactcctccaatcactagaaaggcggcacagctgtatacgctgtgggtcacctag

SEQ ID NO: 341884 - DNA, 327 bp, Artificial Sequence
  derived and/or modified sequence
atggccgccaagagccagcccaacatccccaaggccaagagcctggatggagtgaccaatgacagaacagccagccagggccagtggggccgggcctgggaggtggactggttcagcctggccagcgtcatcttcctgctgctgtttgcccccttcatcgtgtactacttcatcatggcctgtgaccagtacagctgtgccctgactggacctgtggtggacatcgtgactggacatgcccggctgagtgacatctgggccaagaccccacccatcaccaggaaggccgcccagctgtacaccctgtgggtgaccttccaggtgtag

SEQ ID NO: 341885 - DNA, 495 bp, Artificial Sequence
  derived and/or modified sequence
atggccgccaagagccagcccaacatccccaaggccaagagcctggatggagtgaccaatgacagaacagccagccagggccagtggggccgggcctgggaggtggactggttcagcctggccagcgtcatcttcctgctgctgtttgcccccttcatcgtgtactacttcatcatggcctgtgaccagtacagctgtgccctgactggacctgtggtggacatcgtgactggacatgcccggctgagtgacatctgggccaagaccccacccatcaccaggaaggccgcccagctgtacaccctgtgggtgaccttccaggtgctgctgtacaccagcctgcctgacttctgccacaagttcctgcccggctacgtgggcggcatccaggagggcgctgtgaccccagctggggtggtgaacaagtaccagatcaatggcctgcaggcctggctgctgacccacctgctgtggtttgccaatgcccacctgtag

SEQ ID NO: 341886 - DNA, 276 bp, Artificial Sequence
  derived and/or modified sequence
atggccgccaagagccagcccaacatccccaaggccaagagcctggatggagtgaccaatgacagaacagccagccagggccagtggggccgggcctgggaggtggactggttcagcctggccagcgtcatcttcctgctgctgtttgcccccttcatcgtgtactacttcatcatggcctgtgaccagtacagctgtgccctgactggacctgtggtggacatcgtgactggacatgcccggctgagtgacatctgggccaagaccccaccctag

SEQ ID NO: 341887 - DNA, 318 bp, Artificial Sequence
  derived and/or modified sequence
atggccgccaagagccagcccaacatccccaaggccaagagcctggatggagtgaccaatgacagaacagccagccagggccagtggggccgggcctgggaggtggactggttcagcctggccagcgtcatcttcctgctgctgtttgcccccttcatcgtgtactacttcatcatggcctgtgaccagtacagctgtgccctgactggacctgtggtggacatcgtgactggacatgcccggctgagtgacatctgggccaagaccccacccatcaccaggaaggccgcccagctgtacaccctgtgggtgacctag

SEQ ID NO: 341888 - DNA, 87 bp, Artificial Sequence
  derived and/or modified sequence
atgacccccaacagcatgacagagatggccctgcagcccggcaccaacagaagcacagtgcagacagagaacaccaccggcagctag

SEQ ID NO: 341889 - DNA, 327 bp, Artificial Sequence
  derived and/or modified sequence
atggccgccaagagccagcccaacatccccaaggccaagagcctggatggagtgaccaacgatagaactgccagccaaggccaatgggggcgggcatgggaggtggactggttctctctggcttctgtcatcttcctgttgcttttcgcccccttcatcgtctactacttcataatggcttgcgaccagtattcttgcgccttgactggaccagtggttgacatcgtgacaggacacgcacgcctgagcgacatctgggccaaaaccccaccgataacacgcaaagcagctcagctatacacactatgggtgaccttccaggtttag

SEQ ID NO: 341890 - DNA, 495 bp, Artificial Sequence
  derived and/or modified sequence
atggccgccaagagccagcccaacatccccaaggccaagagcctggacggagtgacgaatgatcggaccgccagccaagggcagtggggcagggcctgggaggtcgattggttcagtcttgccagtgtaatatttctgctcttattcgccccatttatagtgtactattttatcatggcatgcgatcagtattcctgcgcattgactggcccagttgtggatatcgtgacgggacacgccagactgtccgatatatgggctaaaaccccacccatcacccgaaaggccgcccaactctacaccttgtgggtgacttttcaggtcctgttgtacacttccctccccgacttctgtcataaatttcttccaggctatgtaggcgggatacaagaaggcgcagtcacaccagccggcgtcgtgaacaagtaccagatcaatggcctgcaggcctggttgctgacccatctgctttggttcgctaacgcccacctttag

SEQ ID NO: 341891 - DNA, 276 bp, Artificial Sequence
  derived and/or modified sequence
atggccgccaagagccagcccaacatccccaaggccaagagcctggatggagtgaccaatgacagaaccgcctcccaaggccaatgggggcgtgcgtgggaggttgattggttcagtctggcttccgtgatctttcttcttctcttcgcccccttcatagtgtattacttcattatggcctgcgatcaatactcatgtgcactgaccggacctgtagtggacatcgtgaccgggcacgctagactctccgatatttgggcaaaaacacccccctag

SEQ ID NO: 341892 - DNA, 318 bp, Artificial Sequence
  derived and/or modified sequence
atggccgccaagagccagcccaacatccccaaggccaagagcctggacggcgtaaccaatgatcgcacagcgagccagggccaatgggggagagcttgggaagtcgactggttttccctagcctcagttatctttcttttgctgtttgccccatttatcgtctactactttattatggcctgcgaccaatactcgtgtgcgctgaccggcccagtcgtcgacattgtgaccggacatgcccggctgagcgatatctgggcaaagacccctccaatcacaaggaaagccgctcagctgtacaccctgtgggttacgtag

SEQ ID NO: 341893 - DNA, 327 bp, Artificial Sequence
  derived and/or modified sequence
atggcagccaaaagtcagcccaacatccccaaagctaagtcattggatggcgtcactaacgacagaaccgcctctcaaggacagtggggaagagcctgggaggtcgactggttctcgctagctagtgtcattttcttgctcctctttgccccatttatcgtatactattttataatggcctgcgaccagtatagttgtgcccttaccgggccagtggtggatattgttacaggacacgctcggctcagtgatatatgggctaaaacccccccaatcacccgcaaggccgcacaactctatactctctgggtgactttccaggtctag

SEQ ID NO: 341894 - DNA, 495 bp, Artificial Sequence
  derived and/or modified sequence
atggctgcaaagagtcaaccaaacatcccaaaggctaagagcctcgatggagtgaccaacgaccggacagcttcccagggccagtggggtcgggcttgggaggtggattggttttccctggccagtgtaatcttcctgttgctgttcgcacccttcatcgtttattatttcatcatggcctgcgaccagtacagttgcgccttgactggccctgtggtggacatagtgaccggccatgctcggctgagcgatatttgggccaagacacctccaatcactcgcaaagccgctcagctgtatacattgtgggtgacttttcaggttctcttgtacacgtccctaccagacttctgtcataaattcctgcccggttatgtaggcggaatccaggaaggggcagtcactcctgctggagtagtcaataagtaccagattaacggactacaggcctggttgctaacacatctgctctggttcgcaaatgctcatttgtag

SEQ ID NO: 341895 - DNA, 276 bp, Artificial Sequence
  derived and/or modified sequence
atggcagccaaaagccagcccaatatcccaaaagcgaaaagtctggatggcgtaaccaatgaccggactgcatcccagggccagtgggggagagcctgggaagtggactggttttctctcgcttctgtaatatttctgttactgttcgcgccattcatcgtctactactttattatggcctgtgaccagtactcctgcgcgctgaccgggcctgttgtggacatcgtgacaggccacgccaggctctccgatatatgggccaaaacccctccttag

SEQ ID NO: 341896 - DNA, 318 bp, Artificial Sequence
  derived and/or modified sequence
atggccgcaaagagccaacccaacatcccgaaggcaaagtcactggacggggtaacgaacgacagaacagcctcccaaggtcagtgggggagggcttgggaggttgattggtttagcctggctagcgtaatttttctgctgctgttcgctccgttcattgtttactattttatcatggcatgcgaccagtactcatgtgccctcacaggacctgtcgtggacatcgtgaccggccacgctcggctatccgatatatgggccaagacccccccaatcacccggaaggccgcacaactttataccttgtgggtgacttag

SEQ ID NO: 341897 - DNA, 523 bp, Artificial Sequence
  derived and/or modified sequence
gcgcaagcgaggccaggggaaggtgggcgcaggtgaggggccgaggtgtgcgcaggtgagtggccaaggactttagccggttgagaaggatcaagcaggcatttggagcacaggtgtctagaaacttttaaggggccggttcaagaaggaaaagttcccttctgctgtgaaactatttggcaagaggctggagggcccaatggctgcaaaatcgcaacccaacattcccaaagccaagagtctagatggcgtcaccaatgacagaaccgcatctcaagggcagtggggccgtgcctgggaggtggactggttttcactggcgagcgtcatcttcctactgctgttcgcccccttcatcgtctactacttcatcatggcttgtgaccagtacagctgcgccctgactggccctgtggtggacatcgtcaccggacatgctcggctctcggacatctgggccaagactccacctataacgaggaaagccgcccagctctataccttgtgggtcaccttccaggtg

SEQ ID NO: 341898 - DNA, 968 bp, Artificial Sequence
  derived and/or modified sequence
acgagccggcgtctgagggatgctctgtccccgcgctgtctggagcttccccgggcgaaggctgcctggctccggggtcggctcctggccccatgccgcgctccgcggcggctctttctcctgccccacctgttgttcgcctccctctttgtcagtgctgagccaggcacagcagctttgcgatgggactggcttgtccgccgtcctccctgacatgcggctgttgaagccctgagcactggaccttctgcctcttgcttgactcctactgtgggccttgagcttctgccctctcctgaaatgtcagctgcctgcggtcttattcatttttgtgttccttgcaggactttagccggttgagaaggatcaagcaggcatttggagcacaggtgtctagaaacttttaaggggccggttcaagaaggaaaagttcccttctgctgtgaaactatttggcaagaggctggagggcccaatggctgcaaaatcgcaacccaacattcccaaagccaagagtctagatggcgtcaccaatgacagaaccgcatctcaagggcagtggggccgtgcctgggaggtggactggttttcactggcgagcgtcatcttcctactgctgttcgcccccttcatcgtctactacttcatcatggcttgtgaccagtacagctgcgccctgactggccctgtggtggacatcgtcaccggacatgctcggctctcggacatctgggccaagactccacctataacgaggaaagccgcccagctctataccttgtgggtcaccttccaggtgcttctgtacacgtctctccctgacttctgccataagtttctacccggctacgtaggaggcatccaggagggggccgtgactcctgcaggggttgtgaacaagtatcagatcaatggcctgcaagcctggctcctcacgcacctgctctggtttgcaaacgctcatctcc

SEQ ID NO: 341899 - DNA, 579 bp, Artificial Sequence
  derived and/or modified sequence
atgaaacgttccaaatacaccaaaagtggagagtacggtaggagcgctccatcgtgcccgcgggacagcagacgatagcaatcgattctccgtgctgggaatcccgccaccctgggcggatggcgctgaattcttgggaaccctctcctgcccctttcactcctgtaccacgtgtgactttagccggttgagaaggatcaagcaggcatttggagcacaggtgtctagaaacttttaaggggccggttcaagaaggaaaagttcccttctgctgtgaaactatttggcaagaggctggagggcccaatggctgcaaaatcgcaacccaacattcccaaagccaagagtctagatggcgtcaccaatgacagaaccgcatctcaagggcagtggggccgtgcctgggaggtggactggttttcactggcgagcgtcatcttcctactgctgttcgcccccttcatcgtctactacttcatcatggcttgtgaccagtacagctgcgccctgactggccctgtggtggacatcgtcaccggacatgctcggctctcggacatctgggccaagactccacct

SEQ ID NO: 341900 - DNA, 507 bp, Artificial Sequence
  derived and/or modified sequence
gtggagcagcgcgcgcaagcgaggccaggggaaggtgggcgcaggtgaggggccgaggtgtgcgcagccggttgagaaggatcaagcaggcatttggagcacaggtgtctagaaacttttaaggggccggttcaagaaggaaaagttcccttctgctgtgaaactatttggcaagaggctggagggcccaatggctgcaaaatcgcaacccaacattcccaaagccaagagtctagatggcgtcaccaatgacagaaccgcatctcaagggcagtggggccgtgcctgggaggtggactggttttcactggcgagcgtcatcttcctactgctgttcgcccccttcatcgtctactacttcatcatggcttgtgaccagtacagctgcgccctgactggccctgtggtggacatcgtcaccggacatgctcggctctcggacatctgggccaagactccacctataacgaggaaagccgcccagctctataccttgtgggtcacctt

SEQ ID NO: 341901 - DNA, 327 bp, Artificial Sequence
  derived and/or modified sequence
atggccgccaagagccagcccaacatccccaaggccaagagcctggacggcgtgaccaacgacagaaccgccagccagggccagtggggcagagcctgggaggtggactggttcagcctggccagcgtgatcttcctgctgctgttcgcccccttcatcgtgtactacttcatcatggcctgcgaccagtacagctgcgccctgaccggccccgtggtggacatcgtgaccggccacgccagactgagcgacatctgggccaagaccccccccatcaccagaaaggccgcccagctgtacaccctgtgggtgaccttccaggtgtag

SEQ ID NO: 341902 - DNA, 495 bp, Artificial Sequence
  derived and/or modified sequence
atggccgccaagagccagcccaacatccccaaggccaagagcctggacggcgtgaccaacgacagaaccgccagccagggccagtggggcagagcctgggaggtggactggttcagcctggccagcgtgatcttcctgctgctgttcgcccccttcatcgtgtactacttcatcatggcctgcgaccagtacagctgcgccctgaccggccccgtggtggacatcgtgaccggccacgccagactgagcgacatctgggccaagaccccccccatcaccagaaaggccgcccagctgtacaccctgtgggtgaccttccaggtgctgctgtacaccagcctgcccgacttctgccacaagttcctgcccggctacgtgggcggcatccaggagggcgccgtgacccccgccggcgtggtgaacaagtaccagatcaacggcctgcaggcctggctgctgacccacctgctgtggttcgccaacgcccacctgtag

SEQ ID NO: 341903 - DNA, 276 bp, Artificial Sequence
  derived and/or modified sequence
atggccgccaagagccagcccaacatccccaaggccaagagcctggacggcgtgaccaacgacagaaccgccagccagggccagtggggcagagcctgggaggtggactggttcagcctggccagcgtgatcttcctgctgctgttcgcccccttcatcgtgtactacttcatcatggcctgcgaccagtacagctgcgccctgaccggccccgtggtggacatcgtgaccggccacgccagactgagcgacatctgggccaagacccccccctag

SEQ ID NO: 341904 - DNA, 318 bp, Artificial Sequence
  derived and/or modified sequence
atggccgccaagagccagcccaacatccccaaggccaagagcctggacggcgtgaccaacgacagaaccgccagccagggccagtggggcagagcctgggaggtggactggttcagcctggccagcgtgatcttcctgctgctgttcgcccccttcatcgtgtactacttcatcatggcctgcgaccagtacagctgcgccctgaccggccccgtggtggacatcgtgaccggccacgccagactgagcgacatctgggccaagaccccccccatcaccagaaaggccgcccagctgtacaccctgtgggtgacctag

SEQ ID NO: 341905 - protein, 975 aa, Artificial Sequence
  derived and/or modified sequence
MGIFKSSLFQALLDIQEFYEVTLLNSQKSCEQKIEEANQVLQKWEKTSLLAPCHDRLQKSSELTDCSGSKENASCIEQNKENQSFENETDETTTQNQGRCPAQNCSVEAPAWMPVHHCTKYRYQDEDAPHDHSLPRLTHEVRGPELVHVSEKNLSQIENVHGYVLQSHISPLKASPAPIIVNTDTLDTIPYVNGTEIEYEFEEITLERGNSGLGFSIAGGTDNPHIGDDPGIFITKIIPGGAAAEDGRLRVNDCILRVNEVDVSEVSHSKAVEALKEAGSIVRLYVRRRRPILETVVEIKLFKGPKGLGFSIAGGVGNQHIPGDNSIYVTKIIDGGAAQKDGRLQVGDRLLMVNNYSLEEVTHEEAVAILKNTSEVVYLKVGKPTTIYMTDPYGPPDITHSYSPPMENHLLSGNNGTLEYKTSLPPISPGRYSPIPKHMLVDDDYTRPPEPVYSTVNKLCDKPASPRHYSPVECDKSFLLSAPYSHYHLGLLPDSEMTSHSQHSTATRQPSMTLQRAVSLEGEPRKVVLHKGSTGLGFNIVGGEDGEGIFVSFILAGGPADLSGELQRGDQILSVNGIDLRGASHEQAAAALKGAGQTVTIIAQYQPEDYARFEAKIHDLREQMMNHSMSSGSGSLRTNQKRSLYVRAMFDYDKSKDSGLPSQGLSFKYGDILHVINASDDEWWQARRVMLEGDSEEMGVIPSKRRVERKERARLKTVKFNAKPGVIDSKGSFNDKRKKSFIFSRKFPFYKNKEQSEQETSDPERGQEDLILSYEPVTRQEINYTRPVIILGPMKDRINDDLISEFPDKFGSCVPHTTRPKRDYEVDGRDYHFVISREQMEKDIQEHKFIEAGQYNDNLYGTSVQSVRFVAERGKHCILDVSGNAIKRLQVAQLYPIAIFIKPRSLEPLMEMNKRLTEEQAKKTYDRAIKLEQEFGEYFTAIVQGDTLEDIYNQCKLVIEEQSGPFIWIPSKEKL

SEQ ID NO: 341906 - protein, 975 aa, Artificial Sequence
  derived and/or modified sequence
FGFIVSVHFQSYLNIQEFYEVTLLNSQKSCEQKIEEANQVLQKWEKTSLLAPCHDRLQKSSELTDCSGSKENASCIEQNKENQSFENETDETTTQNQGRCPAQNCSVEAPAWMPVHHCTKYRYQDEDAPHDHSLPRLTHEVRGPELVHVSEKNLSQIENVHGYVLQSHISPLKASPAPIIVNTDTLDTIPYVNGTEIEYEFEEITLERGNSGLGFSIAGGTDNPHIGDDPGIFITKIIPGGAAAEDGRLRVNDCILRVNEVDVSEVSHSKAVEALKEAGSIVRLYVRRRRPILETVVEIKLFKGPKGLGFSIAGGVGNQHIPGDNSIYVTKIIDGGAAQKDGRLQVGDRLLMVNNYSLEEVTHEEAVAILKNTSEVVYLKVGKPTTIYMTDPYGPPDITHSYSPPMENHLLSGNNGTLEYKTSLPPISPGRYSPIPKHMLVDDDYTRPPEPVYSTVNKLCDKPASPRHYSPVECDKSFLLSAPYSHYHLGLLPDSEMTSHSQHSTATRQPSMTLQRAVSLEGEPRKVVLHKGSTGLGFNIVGGEDGEGIFVSFILAGGPADLSGELQRGDQILSVNGIDLRGASHEQAAAALKGAGQTVTIIAQYQPEDYARFEAKIHDLREQMMNHSMSSGSGSLRTNQKRSLYVRAMFDYDKSKDSGLPSQGLSFKYGDILHVINASDDEWWQARRVMLEGDSEEMGVIPSKRRVERKERARLKTVKFNAKPGVIDSKGSFNDKRKKSFIFSRKFPFYKNKEQSEQETSDPERGQEDLILSYEPVTRQEINYTRPVIILGPMKDRINDDLISEFPDKFGSCVPHTTRPKRDYEVDGRDYHFVISREQMEKDIQEHKFIEAGQYNDNLYGTSVQSVRFVAERGKHCILDVSGNAIKRLQVAQLYPIAIFIKPRSLEPLMEMNKRLTEEQAKKTYDRAIKLEQEFGEYFTAIVQGDTLEDIYNQCKLVIEEQSGPFIWIPSKEKL

SEQ ID NO: 341907 - DNA, 2928 bp, Artificial Sequence
  derived and/or modified sequence
atgggtatctttaagagcagtctctttcaggcccttctcgatatccaagaattttacgaggtgacattgcttaacagccagaaatcctgcgaacaaaagatagaggaggctaaccaggtcctgcagaaatgggagaaaacgtccctgctggcgccgtgtcatgaccgcttgcaaaagtctagtgaactgactgattgttctggctcaaaggaaaacgcatcttgcatcgaacaaaataaggagaaccaatcgttcgagaatgagactgacgaaaccacaacacagaaccagggccgctgccccgcccagaattgctcagttgaggctccagcctggatgccagtgcatcactgcacaaagtaccgataccaggatgaggatgctccacatgatcacagcttgccaagactgactcatgaggtcagagggccagagctcgtccacgtgtcagagaagaaccttagccagattgagaacgtgcatggatacgtgctccagagccacatttctccccttaaggcaagcccagctccaatcatcgtcaacacagacacactcgacacaattccttatgtcaatgggactgagattgagtacgaatttgaggaaatcacacttgagcggggaaatagcggactggggttttctattgccgggggcacagataatccacatatcggagacgaccctggcatcttcatcaccaaaattataccgggcggcgctgctgcagaagacggaaggctccgcgtgaatgactgcattctgcgcgtgaacgaggttgacgtgtccgaggtgtcacactcaaaggctgttgaagcattgaaggaggcaggaagtatagtgaggctgtatgtgcgtcgacgcagacctatcttggaaacggtggtagagatcaagctgttcaagggacctaagggccttggcttctccattgccgggggcgtcgggaatcaacatataccaggtgataattctatttacgtaaccaagatcatcgacggaggggccgcgcagaaggacggacggctgcaggtaggtgatagactcctcatggtaaacaattattcactagaggaggttacccacgaagaggccgtcgctattctgaagaatactagtgaggtagtttacctgaaggttgggaagcctacaaccatttacatgacagatccctacggcccaccggatattacccatagctattcacctccgatggagaatcatctcctctcagggaataacggaacactggagtataaaacaagtctgccccctattagtcccggccggtactccccaattccaaagcatatgctggttgacgacgactacacacgacctcccgagcccgtctacagtacagtcaataagctgtgtgataaacctgccagccccaggcattacagcccggtggaatgtgacaaaagctttcttctaagcgctccttattctcattatcaccttgggttgctgcccgattcagagatgacaagccactcacaacactccacagctacaagacaaccatctatgacattacaacgagctgtgagtctggaaggagagcctagaaaagtcgttttgcacaaaggtagcactgggctcgggtttaacattgtcgggggagaggacggcgaaggcattttcgtgtcgttcattctggccggcggccctgctgatctcagtggcgaattgcagcggggcgatcaaatcttatcagttaatggcattgatctgcgaggggcatcacatgagcaagctgctgccgcactgaaaggagcaggacaaaccgtaacaataattgcccagtatcagcccgaggactatgccaggttcgaggccaaaattcatgatttacgggagcagatgatgaatcactccatgtcgtcagggtcaggctccctcagaactaaccagaaaaggtccctgtacgtgagggcgatgtttgactatgacaagtccaaggatagtggtttgccgagccagggcctaagcttcaagtacggcgacattcttcatgttattaacgctagcgatgatgagtggtggcaggctagacgggtaatgctcgaaggcgactcggaggagatgggcgtgatacccagcaagcgtcgggtggagcgcaaggagcgggcccggctcaaaaccgtgaagtttaatgcaaagcccggcgtgattgattctaaaggaagctttaatgataaaagaaagaagagctttatcttttcaaggaagttcccgttttacaaaaacaaggaacagagcgagcaagagacaagcgaccctgaacgtggtcaggaggatcttatcctttcctatgagccagtgactcgtcaggagattaactacacacggccagtgattattctggggccgatgaaagaccggattaatgatgacctgatttccgaatttcccgataaatttggcagttgcgtcccacataccacccggcccaagcgtgattatgaagtggacggtcgggattaccactttgtcataagccgcgaacaaatggaaaaagacatacaggagcataagttcattgaggccggccaatacaatgataacctgtacggcacttcggttcagtctgtaagatttgtggccgaaagaggtaagcattgtatcctcgatgtgtcaggaaatgccataaaacgcttgcaggtcgcccaactgtatcccatcgcaattttcatcaaaccgcggtccctagagcctcttatggaaatgaacaagaggctaaccgaagaacaggcgaaaaaaacctacgatagggcaattaaattggagcaggaatttggagagtacttcaccgccatcgtgcaaggggatacgctagaggatatatacaaccagtgcaaactggtaatcgaggagcaatccggccccttcatatggattccctcaaaggagaaactctag

SEQ ID NO: 341908 - DNA, 2928 bp, Artificial Sequence
  derived and/or modified sequence
atgggaatttttaagtcttctttattccaggctctgctggatattcaagagttctacgaagttactctcctgaacagccagaaatcctgtgagcagaagatcgaggaggcgaatcaagtgctgcagaagtgggaaaaaacatccctgttggcaccttgtcacgatcgcttacagaagtcttcagagctgacagactgttccgggtcaaaagagaacgcctcttgtatcgagcaaaataaggaaaaccagagctttgagaatgagaccgatgaaaccaccacacagaaccaggggcggtgcccagcccagaactgttctgtggaggcgcccgcttggatgcccgtgcatcattgcacaaaatacagatatcaggacgaggacgcaccacacgatcactcgttgccacgattaactcacgaagtgcgcgggcccgaactggtgcatgtgtcggaaaagaacctgtctcaaatcgagaatgtgcatggatacgtgctccagagccatatctcccctctaaaggcatctccggctcccattattgtgaatacagatactttagataccataccatacgttaacggtacagagatcgaatacgaattcgaggagattactctggagcggggcaacagcggactgggctttagcatcgctggtggaaccgacaacccccacataggtgacgaccctggaatattcatcaccaagatcatccccggcggcgctgctgctgaggacgggcgcctgagggtgaatgactgcatcctgagggtaaatgaagtggatgtgagcgaagtctcccacagtaaggccgtggaggcgctcaaggaggcaggatctatagtcagattgtacgtccggcggcgaaggccaatcctggagaccgtggttgagattaaactgttcaagggcccaaagggactgggcttctccattgccggcggagtgggaaatcagcacataccgggcgataacagtatctacgtgaccaagattattgatggcggagccgcgcagaaagacggtaggctgcaggtgggtgacaggctgttgatggtgaacaattactcattggaagaagtgacacacgaggaagccgtcgcgatactgaagaatacttccgaggtcgtatacctcaaagtcgggaagcccactaccatctacatgactgacccatatgggcctcccgacataacccactcctattcaccacctatggagaaccatctgttgagcggcaacaacggcactctcgagtacaaaacgagcctgcctccgattagtcctggcaggtactcccccataccaaagcatatgctggttgatgatgattatacgagaccccctgaaccggtgtactcgactgttaataagctttgcgacaagcccgccagcccacgccactattctccagtggagtgcgataaaagcttcctgctgtcagccccctattcccattatcacctcggactgctgcctgactctgagatgacgagtcacagccagcatagcacggccacaagacagcctagcatgacgctccaacgggccgttagtcttgaaggtgagcctcgcaaggtggtgttgcacaagggttcgaccggtctgggcttcaatattgtgggcggggaggacggggagggaatcttcgtttcctttatcttggccggaggtcccgcagatctgagtggtgagcttcagcggggcgatcagattttaagtgttaacgggatcgaccttcgcggggccagtcacgaacaggcagccgctgctttgaaaggagcaggacagacagtgaccatcattgcgcagtatcagcccgaggattatgccaggtttgaagctaagattcacgacctgcgcgagcagatgatgaaccattctatgtcaagcgggtccggctctctcagaacgaaccaaaaacgctcattgtacgtgcgcgctatgtttgactatgacaagagcaaagacagcggtctcccatcacaggggttatccttcaagtacggcgatatccttcatgtgattaacgccagcgatgacgaatggtggcaagctcgccgcgtaatgttggagggggactccgaagagatgggcgtcattccgtccaagcggagagtcgaacgcaaggaaagggcccgcttgaaaactgtcaaattcaacgcgaagccaggagttatagattcaaaaggatctttcaacgacaaacggaagaagagtttcatcttctcaaggaagtttcctttttataagaacaaagaacagagcgagcaagaaacatctgatcctgagcggggccaggaagatctaatcctgtcttacgagcctgtcactcgacaagaaattaactatactcgccctgtgatcattctgggacccatgaaagacagaatcaacgatgatttaatcagtgaattccctgataagtttgggagctgcgtgccccataccacacgacccaagcgcgattacgaagttgacggccgagattaccactttgttatttcaagggagcagatggagaaagatatccaggagcacaaatttatagaggcaggtcagtacaatgacaatttgtacggtacttccgtccagtctgtgcgctttgtcgcggagagaggcaagcattgcatcctggatgtcagcggaaacgctattaagagactgcaggtcgcccagctctatcctattgcaattttcattaaacctagaagcctggagcccctgatggagatgaacaaacgcctcaccgaggaacaggcaaaaaaaacttacgatagggcaataaagctcgagcaagagtttggcgaatactttacagctatcgtacagggagatacgctggaagacatatacaatcagtgtaagctagtgatcgaggaacagagtggaccgttcatctggatcccaagtaaggagaaattgtag

SEQ ID NO: 341909 - DNA, 2928 bp, Artificial Sequence
  derived and/or modified sequence
tttgggtttatagtctctgttcactttcagagctacctcaatatacaggagttttacgaagttacacttctcaactctcaaaaatcctgtgagcagaaaatagaagaagcaaatcaagtgctgcagaagtgggagaagactagcctgttggccccgtgccacgaccgcctccagaaatccagcgaactgaccgattgctccggctctaaagagaacgctagttgtattgaacagaacaaagaaaaccagtcattcgagaatgaaaccgatgaaactactacccagaatcagggaaggtgccctgcacagaactgcagcgtcgaggccccagcgtggatgcccgtgcatcactgtaccaagtaccggtatcaagatgaggacgccccacatgatcacagtctgcccaggttgacacacgaggtccggggccccgaactcgtacacgtgagcgaaaagaatctatcacagattgagaatgtgcacggatatgtcctgcagtcacatatttctcctctgaaagctagccctgctcccatcattgtgaacaccgacacccttgacaccatcccgtacgtcaatgggacagagatcgagtacgaattcgaggagattaccttggagcgaggcaacagtggtctggggttttccatagcagggggcaccgataatccacacattggcgacgaccctggaatttttattacaaaaattatccccggtggggcggccgcagaagacggccgtctgagagtaaacgactgtatccttagagtgaacgaggtcgacgtgagtgaggtctcacactctaaagctgtggaggccctcaaagaggccggttcaatagtgaggctttatgtccgcagacgccggcccattctcgagactgtggttgaaatcaagttatttaaggggcccaaaggcctcgggttcagtattgctggtggcgttggcaaccaacatatacctggggacaattctatctatgtaaccaagatcatcgatgggggtgccgctcagaaagacggccgactgcaggtaggggacagacttcttatggtgaataactattcactggaagaggtaactcacgaggaggctgtggccattttaaagaacacaagcgaggtggtgtatctcaaagtggggaagccaaccactatctacatgaccgacccttacgggccacccgacattactcacagctacagtcccccaatggagaatcatctgctcagcggaaacaatggtaccctggagtataagacaagtttaccacctatatcaccaggaaggtacagtcctattcccaaacatatgctcgtggatgatgactataccagaccacctgagcccgtgtactctaccgtgaataagctctgcgataagccagcctcacctcgccattatagccctgttgaatgtgacaagtccttcctcctcagtgctccatacagccactaccatttgggactactgcccgactctgagatgactagtcatagccagcacagtacagcaacacggcagccctcaatgacactacagcgggcagtctcccttgagggagaaccaaggaaagtggtgctgcataaaggctccaccggcctcggttttaacattgtcggaggcgaggatggtgagggcatctttgtctcctttatactggccggaggaccagccgacttgtctggtgagttgcaacgaggcgatcagatattatccgtaaacggcatagatctgagaggggccagtcatgaacaggcagcggctgctctgaagggagccgggcagaccgtaaccatcatcgcgcagtaccaacccgaagactacgcacgctttgaggccaagattcacgacttgagggagcagatgatgaaccacagcatgtctagcggctcaggatccctgcgcaccaatcagaaaaggagtctttatgtacgcgcaatgtttgactatgataaaagcaaagacagtgggctgccctcgcagggtctttctttcaagtacggcgacattttgcatgtaattaacgcctcagatgatgaatggtggcaagctaggcgggtgatgctcgagggagactccgaagagatgggggtgatccctagcaagagacgagttgagagaaaggaacgtgcgcgactgaaaacggtaaaatttaacgccaagccaggggtgatcgattcaaaagggtcttttaatgataaaagaaagaaatcttttatcttctcgaggaagttccccttctataaaaacaaagaacagtcagagcaagaaacctctgatcctgaacgcgggcaggaggatctcatcctgtcgtatgagccggtcacacgacaggaaatcaattatactcgaccagtgatcatccttggaccaatgaaggacaggattaacgacgatctgatctccgaattcccagacaagtttggcagttgtgtgccacatactactcggcctaagagagactacgaagttgatggccgggactatcattttgtgatcagtagagagcagatggagaaagatatccaagagcataagtttattgaggctggacagtacaacgacaacctgtacggtacctcagtgcagtccgtcagatttgtggccgagagggggaagcattgcatactggatgtgtccgggaatgccataaaacggcttcaggtcgcccagctctaccctatcgctatctttatcaaaccccgctcactcgagcctctgatggagatgaataagcggcttacagaagagcaggcaaagaaaacctacgaccgtgcaatcaaactcgaacaagaattcggagaatactttactgctattgtgcagggcgatacactcgaagatatatacaaccagtgcaagctggttattgaggagcagtcggggccatttatctggataccatccaaagagaagctgtag

SEQ ID NO: 341910 - DNA, 2928 bp, Artificial Sequence
  derived and/or modified sequence
atgggcatcttcaagagcagcctcttccaggccctgctggacatccaggagttctatgaggtgaccctgctgaacagccagaagagctgtgagcagaagattgaggaggccaaccaggtgctgcagaagtgggagaagaccagcctgctggccccctgccacgaccggctgcagaagagcagcgagctgacagactgcagcggcagcaaagaaaatgccagctgcatcgagcagaacaaggagaaccagagctttgaaaatgaaacagatgagaccaccacccagaaccagggccgctgcccagcccagaactgcagcgtggaggccccagcctggatgcctgtgcaccactgcaccaagtaccgctaccaggatgaagatgcccctcatgaccacagcctgccccggctgacccatgaggtgcggggccctgagctggtgcacgtgtctgagaagaacctgagccagattgaaaatgtgcacggctacgtgctgcagagccacatcagccccctgaaggccagccctgcccccatcatcgtgaacacagacaccctggacaccatcccctacgtgaatggaacagaaattgaatatgaatttgaggagatcaccctggagcggggcaacagcggcctgggcttcagcattgctgggggcacagacaacccccacatcggagatgaccccggcatcttcatcaccaagatcatccctggaggagctgctgctgaagatggccgcctgcgggtgaatgactgcatcctgcgggtgaatgaggtggatgtgtctgaggtgagccacagcaaggctgtggaggccctgaaggaggccggcagcatcgtgcggctgtatgtgagaagaagaagacccatcctggagaccgtggtggagatcaagctgttcaagggccccaagggcctgggcttcagcattgctggaggagtgggcaaccagcacatccctggggacaacagcatctacgtgaccaagatcattgatggaggagctgcccagaaggatggccgcctgcaggtgggggaccggctgctgatggtgaacaactacagcctggaggaggtgacccatgaggaggccgtggccatcctgaagaacaccagcgaggtggtgtacctgaaggtgggcaagcccaccaccatctacatgacagacccctacggccccccagacatcacccacagctacagcccccccatggagaaccacctgctgagcggcaacaacggcaccctggagtacaagaccagcctgccccccatcagccctggccgctacagccccatccccaagcacatgctggtggatgatgactacacccggcccccagagcctgtgtacagcacagtgaacaagctgtgtgacaagccagccagccccaggcactacagccctgtggagtgtgacaagagcttcctgctgagcgccccctacagccactaccacctgggcctgctgcctgattctgagatgaccagccacagccagcacagcacagccacccggcagcccagcatgaccctgcagagagctgtgtccctggagggggagcccaggaaggtggtgctgcacaagggcagcacaggcctgggcttcaacatcgtgggcggggaggatggagagggcatctttgtgtccttcatcctggccggcggccctgctgacctgtctggagagctgcagagaggagaccagatcctgtctgtgaatggcatcgacctgcggggggccagccatgagcaggccgccgccgccctgaagggagctggccagacagtgaccatcatcgcccagtaccagcctgaggactatgccaggtttgaggccaagatccatgacctgcgggagcagatgatgaaccacagcatgagcagcggcagcggcagcctgcggaccaaccagaagaggagcctgtatgtgcgggccatgtttgattatgacaagagcaaggacagcggcctgcccagccagggcctgtccttcaagtatggagacatcctgcacgtgatcaatgccagtgatgatgagtggtggcaggccaggagagtgatgctggagggggacagcgaggagatgggcgtcatccccagcaagagaagagtggagaggaaggagcgggcccggctgaagacagtgaagttcaatgccaagccaggagtgattgacagcaagggcagcttcaatgacaagaggaagaagagcttcatcttcagcaggaagttccccttctacaagaacaaggagcagagcgagcaggagaccagtgaccctgagcggggccaggaggacctgatcctgtcctatgagcctgtgacccggcaggagatcaactacaccaggcctgtgatcatcctgggccccatgaaggaccgcatcaatgatgacctgatcagcgagttcccagacaagtttggcagctgtgtgccccacaccacccggcccaagagggactatgaggtggatggccgggactaccactttgtgatcagccgggagcagatggagaaggacatccaggagcacaagttcatcgaggccggccagtacaatgacaacctgtatggcacctctgtgcagagcgtgcgctttgtggccgagcggggcaagcactgcatcctggatgtgtctggaaatgccatcaagaggctgcaggtggcccagctgtaccccatcgccatcttcatcaagcccaggagcctggagcccctgatggagatgaacaagaggctgacagaggagcaggccaagaagacctatgaccgggccatcaagctggagcaggagtttggagagtacttcaccgccatcgtgcagggcgacaccctggaggacatctacaaccagtgcaagctggtgattgaggagcagagcggccccttcatctggatccccagcaaggagaagctgtag

SEQ ID NO: 341911 - DNA, 2928 bp, Artificial Sequence
  derived and/or modified sequence
tttggcttcatcgtgtctgtgcacttccagagctacctgaacatccaggagttctatgaggtgaccctgctgaacagccagaagagctgtgagcagaagattgaggaggccaaccaggtgctgcagaagtgggagaagaccagcctgctggccccctgccacgaccggctgcagaagagcagcgagctgacagactgcagcggcagcaaagaaaatgccagctgcatcgagcagaacaaggagaaccagagctttgaaaatgaaacagatgagaccaccacccagaaccagggccgctgcccagcccagaactgcagcgtggaggccccagcctggatgcctgtgcaccactgcaccaagtaccgctaccaggatgaagatgcccctcatgaccacagcctgccccggctgacccatgaggtgcggggccctgagctggtgcacgtgtctgagaagaacctgagccagattgaaaatgtgcacggctacgtgctgcagagccacatcagccccctgaaggccagccctgcccccatcatcgtgaacacagacaccctggacaccatcccctacgtgaatggaacagaaattgaatatgaatttgaggagatcaccctggagcggggcaacagcggcctgggcttcagcattgctgggggcacagacaacccccacatcggagatgaccccggcatcttcatcaccaagatcatccctggaggagctgctgctgaagatggccgcctgcgggtgaatgactgcatcctgcgggtgaatgaggtggatgtgtctgaggtgagccacagcaaggctgtggaggccctgaaggaggccggcagcatcgtgcggctgtatgtgagaagaagaagacccatcctggagaccgtggtggagatcaagctgttcaagggccccaagggcctgggcttcagcattgctggaggagtgggcaaccagcacatccctggggacaacagcatctacgtgaccaagatcattgatggaggagctgcccagaaggatggccgcctgcaggtgggggaccggctgctgatggtgaacaactacagcctggaggaggtgacccatgaggaggccgtggccatcctgaagaacaccagcgaggtggtgtacctgaaggtgggcaagcccaccaccatctacatgacagacccctacggccccccagacatcacccacagctacagcccccccatggagaaccacctgctgagcggcaacaacggcaccctggagtacaagaccagcctgccccccatcagccctggccgctacagccccatccccaagcacatgctggtggatgatgactacacccggcccccagagcctgtgtacagcacagtgaacaagctgtgtgacaagccagccagccccaggcactacagccctgtggagtgtgacaagagcttcctgctgagcgccccctacagccactaccacctgggcctgctgcctgattctgagatgaccagccacagccagcacagcacagccacccggcagcccagcatgaccctgcagagagctgtgtccctggagggggagcccaggaaggtggtgctgcacaagggcagcacaggcctgggcttcaacatcgtgggcggggaggatggagagggcatctttgtgtccttcatcctggccggcggccctgctgacctgtctggagagctgcagagaggagaccagatcctgtctgtgaatggcatcgacctgcggggggccagccatgagcaggccgccgccgccctgaagggagctggccagacagtgaccatcatcgcccagtaccagcctgaggactatgccaggtttgaggccaagatccatgacctgcgggagcagatgatgaaccacagcatgagcagcggcagcggcagcctgcggaccaaccagaagaggagcctgtatgtgcgggccatgtttgattatgacaagagcaaggacagcggcctgcccagccagggcctgtccttcaagtatggagacatcctgcacgtgatcaatgccagtgatgatgagtggtggcaggccaggagagtgatgctggagggggacagcgaggagatgggcgtcatccccagcaagagaagagtggagaggaaggagcgggcccggctgaagacagtgaagttcaatgccaagccaggagtgattgacagcaagggcagcttcaatgacaagaggaagaagagcttcatcttcagcaggaagttccccttctacaagaacaaggagcagagcgagcaggagaccagtgaccctgagcggggccaggaggacctgatcctgtcctatgagcctgtgacccggcaggagatcaactacaccaggcctgtgatcatcctgggccccatgaaggaccgcatcaatgatgacctgatcagcgagttcccagacaagtttggcagctgtgtgccccacaccacccggcccaagagggactatgaggtggatggccgggactaccactttgtgatcagccgggagcagatggagaaggacatccaggagcacaagttcatcgaggccggccagtacaatgacaacctgtatggcacctctgtgcagagcgtgcgctttgtggccgagcggggcaagcactgcatcctggatgtgtctggaaatgccatcaagaggctgcaggtggcccagctgtaccccatcgccatcttcatcaagcccaggagcctggagcccctgatggagatgaacaagaggctgacagaggagcaggccaagaagacctatgaccgggccatcaagctggagcaggagtttggagagtacttcaccgccatcgtgcagggcgacaccctggaggacatctacaaccagtgcaagctggtgattgaggagcagagcggccccttcatctggatccccagcaaggagaagctgtag

SEQ ID NO: 341912 - DNA, 2928 bp, Artificial Sequence
  derived and/or modified sequence
atgggcatcttcaagagcagcctgttccaggccctgctggacatccaggagttctacgaagttaccctgctgaacagtcagaagtcgtgtgagcagaagatcgaggaggccaatcaggtgctgcagaaatgggagaagacctctttgttagcaccctgtcacgacagactccaaaaatctagtgaactgactgactgtagtggaagcaaggaaaatgcttcctgtattgagcaaaacaaggagaaccagtccttcgagaacgagacagatgaaacgactacgcaaaaccagggtcgatgcccggcgcagaactgcagcgttgaggctccggcatggatgcctgtacatcattgtaccaaataccgctatcaagatgaagacgcgccgcatgaccattcgttgccccgcctgacacacgaggtgaggggacctgagttggttcacgtgagcgagaaaaacctgtcccagattgagaacgtccacggatacgttcttcagagccacatctcccccctcaaagcttctccagcacctataatcgtgaacacggacaccctggacaccataccttacgtgaacggtactgagatagaatatgaatttgaagagattaccttggaaaggggtaattcgggcctcggcttttcaatagctggaggaaccgataatccacatatcggggacgatccaggtatcttcattacaaaaattattcccggcggagcggcggccgaggacggccggctgagagtcaatgactgtatcctgcgcgtgaatgaagtggatgtgtctgaagtaagtcatagtaaagcagttgaagctctcaaggaggcaggtagtattgttcgcctatacgtacgcagacgccggcccatcctggaaacggtggttgagattaaattgttcaaggggccgaagggcctggggttctccatcgctgggggagtaggcaaccagcacattcctggagataactccatctacgtcactaaaatcatcgatggcggtgcagcccagaaggacggacgacttcaggtgggtgaccgactactcatggtcaataactacagtttggaagaagtgacccatgaggaggccgtggctatcttgaagaacacctcggaggttgtctacttgaaggtgggcaagcctaccacaatctacatgactgacccatacggccccccagacatcactcactcctattcaccccccatggaaaatcatctgttgtcgggcaacaacgggacactcgaatacaagacttcactgcctcccattagtcctggacggtattcccccatcccaaagcatatgcttgtggacgacgattatactagacccccagagcctgtttattcaaccgtgaataaattatgtgataaaccggcctccccacgccactacagccctgtggaatgcgataagtcattcttactatctgcaccctactcccattatcaccttgggctgctgccagactctgaaatgacctctcacagccagcactccaccgcaacacgacagccgtctatgaccctgcagcgagccgtgtccctggagggcgagccacggaaagtggtgcttcataaagggtcaacaggcctcggtttcaacatcgtcggcggcgaggacggggaggggatattcgtcagcttcatactggcaggtggtccggctgatttaagtggagagttgcagcgcggtgatcagattctgtcggtgaatggcatcgacttgaggggcgcttctcatgagcaggcagccgctgcccttaagggagccggacaaacagtgaccatcatagcgcagtaccagcccgaagattatgctaggttcgaggcaaagatccacgacttacgggagcagatgatgaaccactccatgtcctcaggcagcggcagtcttagaacaaatcagaagaggagcttgtacgtgagagccatgttcgattatgataaaagtaaggatagcggcctgcccagccaaggcctctctttcaaatacggggacatactacacgtgattaatgcttctgatgacgagtggtggcaggctagaagagtgatgcttgaaggcgactccgaggagatgggggtgatacccagtaaacggagagtcgagcggaaggaaagagctcggctgaaaactgttaaattcaatgctaagcctggcgtgatagattcaaaagggtcatttaacgataaacggaagaagtcctttattttctctagaaaatttcctttttacaagaacaaggagcagtcagagcaggaaacctccgatcccgaacgcggccaggaagatctgattttgtcatatgagccggtgacaagacaggagatcaattacacccgtccagtaattatccttgggcctatgaaggaccggatcaatgacgatcttatcagcgaattccctgataaattcggcagctgtgtgcctcacaccacacggcccaaacgagactatgaggtcgatgggagagactatcactttgtaatttctagggagcagatggagaaagatatccaggagcataagttcatcgaggcgggacagtacaacgataatctatacggcacttcagtccaatcagtccgcttcgtcgccgagcggggaaaacattgcatactggatgtcagcgggaacgccatcaagcggctacaagtggcccaattgtatcccattgctatattcattaagccgcggtccctggagcctttaatggagatgaacaaacgcctcaccgaggagcaggccaaaaaaacctacgaccgagctatcaagttagaacaagagtttggcgagtatttcacagccatcgtgcagggggatacgcttgaggatatatacaatcaatgcaagctggtaatcgaggagcaatccgggccttttatttggatcccaagtaaagagaagctctag

SEQ ID NO: 341913 - DNA, 2928 bp, Artificial Sequence
  derived and/or modified sequence
atgggcatcttcaagagcagcctgttccaggccctgctggacatccaggagttctatgaggtgaccctactgaatagtcagaagagttgcgagcaaaaaattgaggaagctaatcaggtcctgcagaagtgggaaaagacatctctcctggctccgtgtcacgaccgcttacagaagagcagcgagctgaccgattgcagtggaagtaaggaaaacgcctcctgcatcgagcagaacaaggagaatcagtcgttcgagaatgaaacagatgagacaactactcagaaccaaggtcggtgccctgctcagaactgttccgttgaagcacctgcgtggatgcccgtgcaccactgcactaagtatagataccaggacgaagacgcaccccacgaccatagtcttccaaggctgactcacgaggtaaggggccctgagctcgtgcacgtgtccgaaaagaacctctcgcaaattgaaaatgtacatgggtacgttctccagtcacacatttctcctctgaaagcaagccccgcacctatcatagtcaataccgacacactcgatacaataccctatgtaaatgggaccgaaattgagtacgagtttgaggagattactctagagcgaggcaactccggtctcgggtttagtatcgcaggcggtacagacaatccccacattggcgatgatcccggaatcttcatcactaagatcattccagggggagcagcagcagaggacggccgtctgcgcgtcaatgactgtatcctcagggtaaacgaggtcgacgtctcagaagtgtctcacagcaaggctgtcgaggccctgaaggaagccggctcaattgtgcggctgtatgtgcgacgacgccgccctattctcgagacagtcgtagagattaagctctttaaggggcctaaaggacttggctttagcattgccggtggcgtcgggaaccagcatatcccaggggataactcaatttacgtaaccaagatcatagatgggggggctgcccagaaagacggcaggctgcaggtgggggatcgtctgctcatggtgaataactactccttggaagaggtcactcatgaagaggcggtcgcaatccttaaaaacactagcgaggtggtgtaccttaaagtggggaagcccacgaccatttacatgacggacccatacggccccccagacatcactcattcttattcacctccaatggaaaaccacctgctaagcggcaacaatggtacactggaatataaaacatccttaccaccaattagccctggcagatatagccctattccaaaacatatgctggtagacgatgactatacgaggccccccgaaccagtttactcaaccgtgaataaattatgtgacaagcctgcatctcccagacactatagtcctgtagaatgcgacaagagtttcctgctctccgctccttacagccactatcatcttggattgctgccagatagcgagatgaccagccactcccaacatagcacagctacgaggcagccgtccatgacgttacagcgagcagttagtctagagggtgaaccaagaaaggtagtgctccataaggggagcaccggtctagggttcaacattgtggggggagaagacggagaaggcattttcgtaagctttatactggcgggtggcccagctgatctatccggggagctgcagaggggcgaccagatcttgagcgtcaacggaatcgatctgcggggcgcttctcacgagcaggcagccgccgcacttaagggggccggccagactgtgaccattatcgcgcaatatcagcccgaagattatgctcgttttgaggctaagatccatgacctcagagaacagatgatgaaccactccatgtcttctgggagtggctcattgcggacgaaccaaaaacgcagcttatatgttagggccatgttcgattacgataagtccaaggatagcggtctcccaagccagggcctgtcttttaagtacggagatattttacacgtgatcaacgctagtgatgatgagtggtggcaggctcgcagggtgatgcttgaaggggattctgaggagatgggcgtgattccttcgaagaggagggtcgaacgcaaggaacgcgcacggctgaagaccgtgaagtttaacgcaaagcccggcgtaatcgatagtaagggcagctttaatgataaacgcaaaaaaagtttcattttcagtcgaaaattccccttttacaaaaacaaggaacaatctgagcaggaaactagtgatcctgagaggggccaagaggacctaatcttgagctatgagccagttactagacaagaaataaactatacacggcctgttatcattttaggacccatgaaagaccgtatcaacgacgatctgatctccgagttccctgacaagttcggtagctgtgttccgcacacaacacgcccaaagcgcgactacgaggtggacggacgggactaccacttcgtgatctcccgcgaacagatggaaaaggatattcaagaacacaagtttattgaggccgggcagtacaatgataatctatacggaacaagtgtgcaatcagtaaggttcgttgccgagcgagggaagcattgcattttagatgtctctgggaacgcaatcaaacggctccaggtggcgcagctgtatcccatcgccatttttataaagccacgaagcctggagccgttgatggagatgaataagaggctcactgaggagcaggctaagaagacctatgaccgggcaatcaagttggaacaggagttcggcgagtacttcacagccatcgtgcaaggcgacaccctggaggacatctataaccagtgtaagctagtgatcgaggaacaatctggtccattcatatggataccaagtaaggaaaaactgtag

SEQ ID NO: 341914 - DNA, 2928 bp, Artificial Sequence
  derived and/or modified sequence
ttcggcttcatcgtgagcgtgcacttccagagctacctgaacatccaggagttttacgaagtcacactgctgaacagccagaaatcctgtgaacagaagatcgaagaagcgaaccaggttctgcaaaagtgggagaaaacatccttactggccccatgccacgatcgcctccaaaagtcatccgagctgactgattgctccggttccaaagagaatgctagttgcatagaacagaacaaagaaaaccagagctttgaaaatgagaccgatgagacgacgacccagaaccaggggcgctgcccggcacaaaactgttctgtcgaagctcctgcctggatgcctgtgcatcattgcaccaagtatcgctaccaggacgaagatgcgccgcatgaccactcattgccacggttaactcacgaggtcagagggccggaactggttcacgtaagcgaaaagaatctatcacaaatcgagaacgtgcatgggtatgtgctccagagccatatatccccattgaaggctagccccgcacctatcatcgttaacacagacacacttgatactattccttatgtaaatggcacagagattgagtacgagttcgaagagatcactctcgaaaggggcaactcaggtttaggctttagcatagcaggaggaactgataatcctcacatcggggacgatcctgggatattcattacaaaaatcattccaggcggcgctgcagccgaagacggtaggcttcgggtcaacgattgcatactgcgagttaatgaggtggacgttagcgaagtgtcccacagcaaagccgtcgaagctctcaaggaagctggtagcattgtcaggttatacgtccggaggcggcgtccgatcctggagaccgtggttgagatcaagctgtttaagggcccaaaaggattaggatttagcatcgccggtggtgtgggcaaccagcacattcccggggacaactccatttacgttaccaagattattgacggaggagctgctcagaaggatggaaggctccaggtgggcgaccggctgctgatggttaataactatagcctcgaggaagtgacccacgaggaggctgtggccatcttaaagaataccagtgaggtggtgtatctaaaggtcggaaaacctaccactatctacatgacagacccatacgggcctccagatatcactcactcgtactctccccctatggaaaatcaccttttgagtggcaacaatggtacgcttgaatacaagacatctctgcccccgatatctcccggtcgctactcccctataccaaaacacatgctggttgacgatgactataccagaccaccagagccagtatattccaccgtgaacaagctgtgtgataagcctgcttcaccccgtcactactcccctgtggaatgcgacaaatcctttctgttgagtgcaccctacagccattaccatctcggtttgctgccagattccgagatgacatctcattctcaacacagcaccgctacccgtcaaccttctatgacactgcagagggctgtttctctcgaaggcgagccgagaaaggtggttttacacaaggggagcaccggactgggtttcaacatcgtaggcggcgaagatggggaaggaatcttcgtgtcgttcatcctggcgggaggacccgccgacctcagcggagagttgcagcggggggatcagattctttcagtgaatggaatagatctccgtggtgccagccacgaacaggccgcagctgctctaaagggcgcagggcagaccgtgaccatcatcgctcagtaccagccagaggactatgctagatttgaagcaaagattcacgacctgcgggagcagatgatgaatcattccatgtcaagcgggtctggaagtctccgcaccaatcagaagcggtcgctgtacgttcgggccatgtttgattacgacaaaagcaaagattccggcttaccatcacaggggcttagtttcaaatatggggatattctgcacgtcattaacgcctctgatgatgaatggtggcaggctaggcgtgttatgttggaaggagattccgaggagatgggtgtcataccatccaagcgccgtgtggaacggaaggagagggctaggttgaaaacagtgaagtttaacgccaagcccggcgtcattgacagcaaaggcagctttaacgataagagaaagaaaagctttatcttttcaaggaagtttcctttttataagaataaagagcagtctgaacaagagaccagtgatcctgaacgtggccaggaagaccttatattgtcgtatgaacccgtgacgcgtcaggaaattaattatactcggccagtgattattctcggacctatgaaggaccggatcaatgatgatttaatcagtgaatttcccgacaaatttggcagctgcgttccccatacaactcggccaaagcgtgactatgaagtggacgggcgagactaccacttcgtcattagccgagagcaaatggaaaaggatatccaggagcacaagttcattgaagccggccagtataatgacaacctgtacgggactagcgtgcagtctgttcggttcgtggccgagcgcggcaaacattgtattctcgacgtctccgggaacgccattaaaagactacaagtggctcagctgtacccaatcgcaattttcatcaagccacggtccctcgagcccttgatggagatgaacaaacgcctgacggaggagcaggccaagaagacatacgatcgcgccatcaaactcgagcaggagttcggtgagtactttacagctatcgtccagggggacactttggaggatatttacaatcagtgtaaactggttattgaggagcaaagcgggcctttcatctggatccccagtaaagagaagctgtag

SEQ ID NO: 341915 - DNA, 2928 bp, Artificial Sequence
  derived and/or modified sequence
atgggtatctttaagagctcactctttcaggccttgctcgacatccaggagttctacgaggtcacactactgaacagccagaaaagctgtgagcagaagatcgaggaggccaaccaggtcctccaaaagtgggagaagacttctctgcttgccccttgtcacgataggttgcaaaagtcgagtgaactgaccgattgtagcggatcgaaagagaatgccagctgcattgagcagaacaaagagaatcaaagctttgagaacgagacggacgaaacaactacacagaatcaagggagatgtcctgctcagaattgctccgtggaggcacccgcttggatgccggtccaccactgcaccaagtatcggtatcaggatgaagacgctccacacgatcatagtctcccccgacttacccatgaagttagaggtcccgaactcgtgcacgtaagtgagaagaacctcagccagattgaaaacgtacacggctatgtcctgcaatcccatatatccccattgaaggcatccccagccccaattattgtgaacacagacacactagacactattccatacgtgaatggaaccgaaatcgagtacgagttcgaggagattacgctggaaagggggaactccggtctaggatttagcatagccggaggtacggacaacccacatattggtgacgaccccggtatctttatcactaagattattcccggaggtgccgctgccgaggatggcagattgcgtgtgaacgactgcatcctgagagttaacgaggtggacgtctctgaggtatcacactctaaggcggtggaggctttgaaggaggcgggtagcatagtcaggctctatgtgaggagaaggcggccaatcctggaaacagtggtcgaaataaagctttttaagggcccaaaaggattgggcttttctatcgccggaggtgtgggcaaccagcatatccccggtgacaatagtatctatgtcactaaaataatcgatgggggagcagcacaaaaagacgggagactacaggtcggcgatagattactgatggtcaacaattatagccttgaagaggtgactcatgaggaggcggtggcaatcctaaagaacacctccgaggtagtgtacctcaaggtcgggaagccaaccactatttatatgaccgatccctacggaccacccgacatcacgcatagttactcccctccgatggagaatcacctcctttcaggcaataacggcacactggagtacaagacctcactgccacccatatcgcccggtcggtattccccaatccctaaacacatgctagtggatgacgattacactcgccctcccgaacctgtctatagcactgtgaataaattgtgcgataaacccgctagccccaggcactatagtcccgtggagtgtgataagagttttcttctatccgccccatattcccactaccacctcggcctcttgccagactctgaaatgacctctcactctcagcactctaccgccacaaggcagccgagtatgactctccagagagcagttagtctcgaaggtgagccaagaaaggtggttcttcacaaaggctctacaggcttggggttcaatattgtgggaggggaggacggcgagggaattttcgtgagcttcattctagccggaggaccggctgatctgagtggcgagctccagagaggtgatcagatcctgtctgtcaacggaatcgacctccgcggtgccagtcatgagcaggctgccgctgcactaaagggtgccggacagaccgtgactataattgcccagtaccagcccgaagattacgcaagatttgaagcaaagatacacgatttacgagaacagatgatgaatcactccatgtcaagcggatcagggtcccttcgtaccaatcagaaaagatccctctacgtgagggccatgtttgattacgacaaaagtaaagattcgggccttcctagtcagggcctttctttcaaatatggcgacattttacatgtcattaacgctagcgacgatgagtggtggcaggccagacgcgtcatgctcgagggggattcggaggaaatgggcgtcatcccctcaaaaaggcgcgttgagcggaaagaaagagctcgactcaaaacagtcaagtttaacgcgaaacctggagtgatcgattctaagggtagttttaacgacaagcgaaagaagagcttcatttttagtagaaagttccccttctacaagaacaaagagcaaagcgagcaagagaccagcgaccctgaacggggacaggaagacctaatccttagctacgagcctgtgacacgtcaagagattaactacacccggcctgtgattattctgggcccaatgaaggaccgtatcaatgatgacttgatcagcgagttccctgataagtttggatcctgcgtgccacataccactagacctaagagggattatgaggtagacggcagggattatcacttcgtcatctcgagagagcagatggagaaggatattcaggagcacaaatttatcgaagccggacagtataatgacaacctgtacggcacatctgtgcaatctgtgcgcttcgtggctgagcgtggcaaacattgtatcctcgacgtgtccgggaacgccatcaaacgcctacaggtggcacaactgtaccccattgctatttttataaagccgaggtctctggaacccctgatggagatgaataaacgcctcaccgaggaacaggccaagaagacctatgatagagccatcaaactggaacaagagtttggcgagtactttactgccatcgttcagggcgataccctagaggatatctataaccagtgtaagctagttatcgaagagcagtctggtccgtttatctggattccatctaaagaaaaactttag

SEQ ID NO: 341916 - DNA, 2928 bp, Artificial Sequence
  derived and/or modified sequence
atgggcatatttaaatccagcctgttccaagccttactggatatacaagaattttatgaagtaactcttctcaatagccaaaaatcttgtgaacagaaaatcgaggaagctaaccaggtcctgcaaaaatgggaaaaaacctcactgttggccccttgccatgatagacttcagaaatcaagcgaattgacagattgctctgggagtaaagaaaacgccagttgtattgaacagaacaaggaaaatcaatctttcgagaatgagactgacgaaaccaccactcagaatcagggcagatgcccagctcagaactgttcggtcgaggctcctgcatggatgccggtccaccattgcactaaataccgctatcaggacgaggacgctccacacgatcactcattgcctcggcttacgcacgaggtgcgaggcccagagctggtgcacgtgtcagaaaagaacttaagccagatagagaatgtccatgggtatgtcctgcaatcccacatttcgccactgaaagccagccctgctccaatcatcgtcaacactgacactctggacacaatcccatacgtgaacggcacagagatagagtacgagtttgaggagattacactggagcgaggcaatagtggattgggattttctatcgctggaggtactgacaaccctcatatcggggatgatcctgggatcttcatcaccaagatcattcctggcggagcagcggctgaggatggtagacttcgtgtgaatgactgcatcctgcgcgtgaacgaggttgacgtaagtgaggtgtcccactccaaggctgtggaagcactgaaggaggctggaagcatcgtgcggctctacgtgaggcgccgtagacccatcctggagaccgttgtcgagataaaacttttcaaaggtcccaaggggctgggttttagtatcgccggaggagtgggcaatcagcacatccccggagacaattccatctacgtaactaagatcatagacgggggagctgctcagaaggacggaagactccaggtgggggaccgcctcctcatggttaacaactactccctggaagaagtgacacacgaagaagctgtggctattctcaagaatacgtcagaggtagtctacttaaaggttgggaagcccactaccatctacatgaccgacccctacggccctcccgatattactcatagttacagtcctccaatggaaaatcacctgctaagcggaaataacgggacacttgagtacaagaccagccttcccccaatctctccgggacggtatagcccaattcccaaacacatgctcgtggacgacgattacacacgtccgccagagcctgtgtattcaaccgtcaacaagctgtgtgacaagcctgcttctcctcgtcactactcacctgtcgagtgcgacaaaagctttcttctctcagccccttattctcactatcacctgggtttgcttcctgactctgaaatgacttctcacagccagcacagcactgcaacgcgccagccctcgatgacgctccaaagagccgtctccctggaaggggagcctcgaaaagtggttctacacaaaggatctacaggcctcggcttcaatatagtcggcggagaggatggcgaaggcatattcgtctctttcatcctggcaggcggtccggcagatctgagtggagagctccagcgaggtgaccagattctgtctgtcaacgggattgacttacgtggcgcttcccatgaacaggcagccgcagctctcaagggtgctggccagactgtgaccatcattgctcagtatcagcccgaggactacgcccgatttgaagccaaaatccatgacctcagggagcagatgatgaaccacagtatgtcaagcgggagcgggtccctgaggaccaaccaaaaaagatctttgtatgtacgggcaatgttcgattacgacaagagtaaggattcaggattgccaagccagggcctgtcctttaaatatggcgacatacttcatgtgattaatgctagcgacgatgaatggtggcaagcacgcagagtgatgctggaaggcgacagcgaggaaatgggggttatcccctctaagcgccgagtggagcggaaggaacgagcacgcctgaagacagttaaattcaatgccaaaccaggagttattgacagtaaaggatcatttaatgacaagcgcaagaagtcttttatattcagcagaaagtttccattttacaagaataaggaacagtctgagcaggagacttccgatccggaacgaggccaagaggacctgatcctttcatacgaacctgtcaccaggcaggaaattaattataccagaccagtgattatcttggggcctatgaaggatcggatcaatgacgacctgatcagtgagttcccagataagttcgggagttgcgtcccccataccaccagaccaaagcgggactacgaagtggacggacgagattaccacttcgtgatctccagggagcagatggagaaagatattcaggaacataaattcattgaagcagggcagtacaacgataatctgtatggcaccagcgtccaaagcgtcagattcgtcgccgagagaggtaagcactgcattctggacgtgtcgggcaatgcgattaaacggctccaggtggcgcagctgtatcctattgctattttcatcaagcctaggagtctggagcctttgatggaaatgaacaagaggttgaccgaggagcaggccaagaagacatacgatagagccatcaaactggaacaggaatttggagagtattttacagcaatcgtgcagggggacactctcgaagacatctacaatcagtgtaaacttgtgattgaagaacaaagcggtccatttatttggatcccaagtaaggagaaactctag

SEQ ID NO: 341917 - DNA, 2928 bp, Artificial Sequence
  derived and/or modified sequence
ttcggctttattgttagtgtgcactttcagtcctatctgaacattcaggagttctatgaagtgactttgctcaattcccagaagtcttgcgagcagaagatagaggaggcgaatcaagtgctacagaagtgggagaaaacatctctacttgccccttgccatgaccgcttacagaagagcagtgagctgaccgactgcagcggctcgaaggaaaacgcatcctgtattgagcagaataaagagaatcagagctttgaaaacgaaaccgatgaaacaaccactcagaatcaggggcgatgccctgcccagaattgttcagtggaggcccctgcatggatgcccgtgcatcactgcacgaagtatcgataccaggatgaggacgcaccccacgatcattccttaccacgtttgacccatgaggtgcgcggaccggaactggtccatgtatctgaaaaaaacctgtcgcagattgagaatgtgcacggctacgtgctgcagtcccacatttcgcccctcaaggcttctcctgctcccatcatcgttaatacagataccttggatacaatcccctatgtaaatggcaccgagatcgaatacgaattcgaggaaatcacactggagcgcggaaactccggtctagggtttagcattgctgggggaaccgacaatccccacataggggacgacccaggcatcttcatcacaaaaatcattccaggcggagccgcagctgaagatggcagattacgcgtaaatgactgcattctgcgcgtcaatgaagtggacgtctccgaagtgtcgcattcaaaagcagtagaggcgcttaaagaagcaggcagcatagtccggctttatgtgcgcaggcggcgaccgatcctggaaacagtcgtcgagatcaaattgttcaaaggccctaaaggcctcggattttctatcgccggaggggtggggaaccagcacattcccggtgacaacagtatttacgtcaccaaaataatagacggcggtgccgctcagaaagacggcaggctacaggtgggagacaggctactgatggtgaacaattattccctcgaagaggtaacacatgaggaagccgtggcaatattgaagaacacaagtgaggtcgtctacctcaaagttggtaagccaaccacaatttatatgaccgatccctacggccctccagatattacgcacagctatagtccaccaatggaaaaccacctgctttcaggtaacaatggcacactcgagtacaagacctctttgccacctatatcccccggtcgatattcgcccatccccaagcacatgctggtggatgacgactatacaagaccacccgagcccgtctattctacagtgaacaagctgtgtgataagccagcctcgcctaggcactatagccctgtggaatgcgataagagtttcctgcttagcgcgccttattcgcactatcacttgggtctgctgcctgattccgagatgacaagtcactcacagcactccacagcaactcggcagcctagcatgaccctgcagcgtgccgtgtcattagaaggagagccacgcaaggtggttttgcataaaggcagcacaggtctggggtttaatatcgtaggtggcgaagacggagagggaattttcgtgtcatttatcctagcgggtggaccagccgatttgtccggagagctgcagcgaggagaccagattttaagcgtgaatgggatcgacctcaggggagcatcccacgagcaagccgctgcagctcttaaaggcgctggccagacggttaccataattgcgcagtatcaaccagaggactacgccaggttcgaggccaagattcacgatctacgggaacagatgatgaaccattctatgagcagcgggtccgggagcttaaggaccaatcagaaacggagcctgtatgtgcgcgcaatgtttgattacgataagtcaaaggattcagggcttccgagccaaggcctgtcctttaaatatggcgacatcctccacgtcattaacgcgtctgatgatgaatggtggcaggctagacgcgtgatgctggaaggggacagtgaagaaatgggcgtgatcccgagtaaaaggagggtggagagaaaagagagggccagactcaagacggtcaaattcaacgcaaagcctggggtgattgatagtaagggaagctttaacgataaaagaaaaaagtccttcattttttctagaaaattcccattttacaaaaacaaggaacagagcgaacaggagacctctgatcccgagaggggacaggaagatttaatcctcagttatgagccagttacgaggcaggaaattaattacactcgtcccgtgatcatcctggggcctatgaaagaccggattaacgacgacttaataagcgagtttccggataagttcggaagctgcgttcctcatacaaccaggcctaagagggactacgaggtcgacggtcgcgactatcacttcgtgatctcaagggagcagatggagaaagatatccaggagcacaagttcatcgaagctgggcagtacaatgataacctgtatggcacaagcgtccagagcgtgagattcgtagccgaacgagggaagcactgcattctggacgtgagtggcaatgccatcaaacgtctgcaggtcgcccagctctatcctatagctatatttatcaaacccaggagcttagagccgctgatggagatgaataaaagactaaccgaggagcaggccaagaagacctatgatcgtgcgatcaagctcgagcaggaatttggagagtacttcactgctattgtccagggggatacgttggaagacatatataatcaatgtaagctagtgatcgaggaacaatcaggtccttttatctggatcccttccaaagagaagctttag

SEQ ID NO: 341918 - DNA, 2928 bp, Artificial Sequence
  derived and/or modified sequence
atgggcatcttcaagagcagcctgttccaggccctgctggacatccaggagttctacgaggtgaccctgctgaacagccagaagagctgcgagcagaagatcgaggaggccaaccaggtgctgcagaagtgggagaagaccagcctgctggccccctgccacgacagactgcagaagagcagcgagctgaccgactgcagcggcagcaaggagaacgccagctgcatcgagcagaacaaggagaaccagagcttcgagaacgagaccgacgagaccaccacccagaaccagggcagatgccccgcccagaactgcagcgtggaggcccccgcctggatgcccgtgcaccactgcaccaagtacagataccaggacgaggacgccccccacgaccacagcctgcccagactgacccacgaggtgagaggccccgagctggtgcacgtgagcgagaagaacctgagccagatcgagaacgtgcacggctacgtgctgcagagccacatcagccccctgaaggccagccccgcccccatcatcgtgaacaccgacaccctggacaccatcccctacgtgaacggcaccgagatcgagtacgagttcgaggagatcaccctggagagaggcaacagcggcctgggcttcagcatcgccggcggcaccgacaacccccacatcggcgacgaccccggcatcttcatcaccaagatcatccccggcggcgccgccgccgaggacggcagactgagagtgaacgactgcatcctgagagtgaacgaggtggacgtgagcgaggtgagccacagcaaggccgtggaggccctgaaggaggccggcagcatcgtgagactgtacgtgagaagaagaagacccatcctggagaccgtggtggagatcaagctgttcaagggccccaagggcctgggcttcagcatcgccggcggcgtgggcaaccagcacatccccggcgacaacagcatctacgtgaccaagatcatcgacggcggcgccgcccagaaggacggcagactgcaggtgggcgacagactgctgatggtgaacaactacagcctggaggaggtgacccacgaggaggccgtggccatcctgaagaacaccagcgaggtggtgtacctgaaggtgggcaagcccaccaccatctacatgaccgacccctacggcccccccgacatcacccacagctacagcccccccatggagaaccacctgctgagcggcaacaacggcaccctggagtacaagaccagcctgccccccatcagccccggcagatacagccccatccccaagcacatgctggtggacgacgactacaccagaccccccgagcccgtgtacagcaccgtgaacaagctgtgcgacaagcccgccagccccagacactacagccccgtggagtgcgacaagagcttcctgctgagcgccccctacagccactaccacctgggcctgctgcccgacagcgagatgaccagccacagccagcacagcaccgccaccagacagcccagcatgaccctgcagagagccgtgagcctggagggcgagcccagaaaggtggtgctgcacaagggcagcaccggcctgggcttcaacatcgtgggcggcgaggacggcgagggcatcttcgtgagcttcatcctggccggcggccccgccgacctgagcggcgagctgcagagaggcgaccagatcctgagcgtgaacggcatcgacctgagaggcgccagccacgagcaggccgccgccgccctgaagggcgccggccagaccgtgaccatcatcgcccagtaccagcccgaggactacgccagattcgaggccaagatccacgacctgagagagcagatgatgaaccacagcatgagcagcggcagcggcagcctgagaaccaaccagaagagaagcctgtacgtgagagccatgttcgactacgacaagagcaaggacagcggcctgcccagccagggcctgagcttcaagtacggcgacatcctgcacgtgatcaacgccagcgacgacgagtggtggcaggccagaagagtgatgctggagggcgacagcgaggagatgggcgtgatccccagcaagagaagagtggagagaaaggagagagccagactgaagaccgtgaagttcaacgccaagcccggcgtgatcgacagcaagggcagcttcaacgacaagagaaagaagagcttcatcttcagcagaaagttccccttctacaagaacaaggagcagagcgagcaggagaccagcgaccccgagagaggccaggaggacctgatcctgagctacgagcccgtgaccagacaggagatcaactacaccagacccgtgatcatcctgggccccatgaaggacagaatcaacgacgacctgatcagcgagttccccgacaagttcggcagctgcgtgccccacaccaccagacccaagagagactacgaggtggacggcagagactaccacttcgtgatcagcagagagcagatggagaaggacatccaggagcacaagttcatcgaggccggccagtacaacgacaacctgtacggcaccagcgtgcagagcgtgagattcgtggccgagagaggcaagcactgcatcctggacgtgagcggcaacgccatcaagagactgcaggtggcccagctgtaccccatcgccatcttcatcaagcccagaagcctggagcccctgatggagatgaacaagagactgaccgaggagcaggccaagaagacctacgacagagccatcaagctggagcaggagttcggcgagtacttcaccgccatcgtgcagggcgacaccctggaggacatctacaaccagtgcaagctggtgatcgaggagcagagcggccccttcatctggatccccagcaaggagaagctgtag

SEQ ID NO: 341919 - DNA, 2928 bp, Artificial Sequence
  derived and/or modified sequence
ttcggcttcatcgtgagcgtgcacttccagagctacctgaacatccaggagttctacgaggtgaccctgctgaacagccagaagagctgcgagcagaagatcgaggaggccaaccaggtgctgcagaagtgggagaagaccagcctgctggccccctgccacgacagactgcagaagagcagcgagctgaccgactgcagcggcagcaaggagaacgccagctgcatcgagcagaacaaggagaaccagagcttcgagaacgagaccgacgagaccaccacccagaaccagggcagatgccccgcccagaactgcagcgtggaggcccccgcctggatgcccgtgcaccactgcaccaagtacagataccaggacgaggacgccccccacgaccacagcctgcccagactgacccacgaggtgagaggccccgagctggtgcacgtgagcgagaagaacctgagccagatcgagaacgtgcacggctacgtgctgcagagccacatcagccccctgaaggccagccccgcccccatcatcgtgaacaccgacaccctggacaccatcccctacgtgaacggcaccgagatcgagtacgagttcgaggagatcaccctggagagaggcaacagcggcctgggcttcagcatcgccggcggcaccgacaacccccacatcggcgacgaccccggcatcttcatcaccaagatcatccccggcggcgccgccgccgaggacggcagactgagagtgaacgactgcatcctgagagtgaacgaggtggacgtgagcgaggtgagccacagcaaggccgtggaggccctgaaggaggccggcagcatcgtgagactgtacgtgagaagaagaagacccatcctggagaccgtggtggagatcaagctgttcaagggccccaagggcctgggcttcagcatcgccggcggcgtgggcaaccagcacatccccggcgacaacagcatctacgtgaccaagatcatcgacggcggcgccgcccagaaggacggcagactgcaggtgggcgacagactgctgatggtgaacaactacagcctggaggaggtgacccacgaggaggccgtggccatcctgaagaacaccagcgaggtggtgtacctgaaggtgggcaagcccaccaccatctacatgaccgacccctacggcccccccgacatcacccacagctacagcccccccatggagaaccacctgctgagcggcaacaacggcaccctggagtacaagaccagcctgccccccatcagccccggcagatacagccccatccccaagcacatgctggtggacgacgactacaccagaccccccgagcccgtgtacagcaccgtgaacaagctgtgcgacaagcccgccagccccagacactacagccccgtggagtgcgacaagagcttcctgctgagcgccccctacagccactaccacctgggcctgctgcccgacagcgagatgaccagccacagccagcacagcaccgccaccagacagcccagcatgaccctgcagagagccgtgagcctggagggcgagcccagaaaggtggtgctgcacaagggcagcaccggcctgggcttcaacatcgtgggcggcgaggacggcgagggcatcttcgtgagcttcatcctggccggcggccccgccgacctgagcggcgagctgcagagaggcgaccagatcctgagcgtgaacggcatcgacctgagaggcgccagccacgagcaggccgccgccgccctgaagggcgccggccagaccgtgaccatcatcgcccagtaccagcccgaggactacgccagattcgaggccaagatccacgacctgagagagcagatgatgaaccacagcatgagcagcggcagcggcagcctgagaaccaaccagaagagaagcctgtacgtgagagccatgttcgactacgacaagagcaaggacagcggcctgcccagccagggcctgagcttcaagtacggcgacatcctgcacgtgatcaacgccagcgacgacgagtggtggcaggccagaagagtgatgctggagggcgacagcgaggagatgggcgtgatccccagcaagagaagagtggagagaaaggagagagccagactgaagaccgtgaagttcaacgccaagcccggcgtgatcgacagcaagggcagcttcaacgacaagagaaagaagagcttcatcttcagcagaaagttccccttctacaagaacaaggagcagagcgagcaggagaccagcgaccccgagagaggccaggaggacctgatcctgagctacgagcccgtgaccagacaggagatcaactacaccagacccgtgatcatcctgggccccatgaaggacagaatcaacgacgacctgatcagcgagttccccgacaagttcggcagctgcgtgccccacaccaccagacccaagagagactacgaggtggacggcagagactaccacttcgtgatcagcagagagcagatggagaaggacatccaggagcacaagttcatcgaggccggccagtacaacgacaacctgtacggcaccagcgtgcagagcgtgagattcgtggccgagagaggcaagcactgcatcctggacgtgagcggcaacgccatcaagagactgcaggtggcccagctgtaccccatcgccatcttcatcaagcccagaagcctggagcccctgatggagatgaacaagagactgaccgaggagcaggccaagaagacctacgacagagccatcaagctggagcaggagttcggcgagtacttcaccgccatcgtgcagggcgacaccctggaggacatctacaaccagtgcaagctggtgatcgaggagcagagcggccccttcatctggatccccagcaaggagaagctgtag

SEQ ID NO: 341920 - DNA, 5139 bp, Artificial Sequence
  derived and/or modified sequence
acagaagaaaaaaatgaaagggacagcaagctggattctgagttactgaggggaagactcagcctggatttcaaaactgaacactgaagtggtttgcaacagttacctggctcttggcctcaatccagctggatcaaactgagacctgaaaagagatattgactcctgtggcagtggaaagacccaagaatgccagtcaagaagacaggtgggccataagatactgaccgagctttatcattactggaagaatactgcaaaaaattaaggaaaccagaggagcagctgttgaaaaatgcggttaaaaaggtgatgggtatctttaagagcagcttattccaagctttgctagatatccaagaattttatgaggtgacattgctaaattctcaaaaaagttgtgagcagaagatagaagaagccaatcaagttttacagaaatgggagaagacatcccttcttgctccgtgccatgacagacttcaaaaatcttcagagcttacagattgcagtggatcaaaggaaaatgcttcatgtattgagcaaaataaagaaaatcagagttttgaaaatgaaactgatgagacgacaactcaaaaccaaggcagatgcccagcccagaattgttcagtggaagcccctgcttggatgcctgtccaccactgtactaagtatcgatatcaagatgaggacgctccacatgatcattccttacctcgactaacccacgaagtaagaggcccagaactcgtgcatgtatcagaaaagaacctctctcaaatagaaaatgtccatggatatgtcttgcagtctcatatttctcctctgaaggccagtcctgctcctataattgtcaacacagatactttggacacaattccttatgtcaatgggacagaaattgaatatgaatttgaagaaattacactggagagggggaattctggcctgggattcagtattgctggggggacagataatccccacattggagatgaccctggcatatttattacgaagattataccaggaggtgctgcagcagaggatggcagactcagggtcaatgattgtatcttgcgggtgaatgaggttgatgtgtcagaggtttcccacagtaaagcggtggaagccctgaaggaagcagggtctatcgttcggctgtatgtgcgtagaagacgacctattttggagaccgttgtggaaatcaaactgttcaaaggccctaaaggtttaggcttcagtattgcaggaggtgtggggaaccaacacattcctggagacaacagcatttatgtaactaaaattatagatggaggagctgcacaaaaagatggaaggttgcaagtaggagatagactactaatggtaaacaactacagtttagaagaagtaacacacgaagaggcagtagcaatattaaagaacacatcagaggtagtttatttaaaagttggcaaacccactaccatttatatgactgatccttatggtccacctgatattactcactcttattctccaccaatggaaaaccatctactctctggcaacaatggcactttagaatataaaacctccctgccacccatctctccaggaaggtactcaccaattccaaagcacatgcttgttgacgacgactacaccaggcctccggaacctgtttacagcactgtgaacaaactatgtgataagcctgcttctcccaggcactattcccctgttgagtgtgacaaaagcttcctcctctcagctccctattcccactaccacctaggcctgctacctgactctgagatgaccagtcattcccaacatagcaccgcaactcgtcagccttcaatgactctccaacgggccgtctccctggaaggagagcctcgcaaggtagtcctgcacaaaggctccactggcctgggcttcaacattgtcggtggggaagatggagaaggtatttttgtgtccttcattctggctggtggaccagcagacctaagtggggagctccagagaggagaccagatcctatcggtgaatggcattgacctccgtggtgcatcccacgagcaggcagctgctgcactaaagggggctggacagacagtgacgattatagcacaatatcaacctgaagattacgctcgatttgaggccaaaatccatgacctacgagagcagatgatgaaccacagcatgagctccgggtccggatccctgcgaaccaatcagaaacgctccctctacgtcagagccatgttcgactacgacaagagcaaggacagtgggctgccaagtcaaggacttagttttaaatatggagatattctccacgttatcaatgcctctgatgatgagtggtggcaagccaggagagtcatgctggagggagacagtgaggagatgggggtcatccccagcaaaaggagggtggaaagaaaggaacgtgcccgattgaagacagtgaagtttaatgccaaacctggagtgattgattcgaaagggtcattcaatgacaagcgtaaaaagagcttcatcttttcacgaaaattcccattctacaagaacaaggagcagagtgagcaggaaaccagtgatcctgaacgaggacaagaagacctcattctttcctatgagcctgttacaaggcaggaaataaactacacccggccggtgattatcctggggcccatgaaggatcggatcaatgacgacttgatatctgaattccctgataaatttggctcctgtgtgcctcatactacgaggccaaagcgagactacgaggtggatggcagagactatcactttgtcatttccagagaacaaatggagaaagatatccaagagcacaagtttatagaagccggccagtacaatgacaatttatatggaaccagtgtgcagtctgtgagatttgtagcagaaagaggcaaacactgtatacttgatgtatcaggaaatgctatcaagcggttacaagttgcccagctctatcccattgccatcttcataaaacccaggtctctggaacctcttatggagatgaataagcgtctaacagaggaacaagccaagaaaacctatgatcgagcaattaagctagaacaagaatttggagaatattttacagctattgtccaaggagatactttagaagatatatataaccaatgcaagcttgttattgaagagcaatctgggcctttcatctggattccctcaaaggaaaagttataaattagctactgcgcctctgacaacgacagaagagcatttagaagaacaaaatatatataacatactacttggaggcttttatgtttttgttgcatttatgtttttgcagtcaatgtgaattcttacgaatgtacaacacaaactgtatgaagccatgaaggaaacagaggggccaaagggtgggacagaaaagacattgcagtatgaaggaaggctttggtttgctcaaagtgccaggtgtagggatgaacctctgacgggctttctgcccaagagatgagatgagagcctcctcaccccagcagatgtccagagctgatttagctgcagagctctctgtgtcttttgctttaaagaaaaattgccagcactcgaacctcatcagccttcccattacccacatctgtaattggtacactttgaattttataactatgcacatcttttgatttcttaacaagcaaatgaaagaaagaaggaaaaaagaaaggaatccctttggagatgacatactatcagggaaggataagtgtgtagttttttgactggcatctgcaaagacaagaatttcataaaatttgcaagtgtatggaggactaacctcactgacaggaggggattccacctgggattagctttatgattgttgattgcctattttgccatttataaactgaaagaaggcactaaagatgagaataatttatacaataaaaatatattaaatgtatagaaacaaatttctataggttaaaaaagttttgtgaaatattttgtaaagactaatattgaaagactaaatgtatgcaacatcagcagatgatcaaattcaagacctgaaagttgcactctcccttttgttgccaatgatctgttaagagcatctgagttccttttaagtctgacaaagacttcttcctcacttacctcccttccacattagtgatacactctcatgcagcacatcccttaatgagttgccctcatggatatttttggaagacatttggttaatgcatttttttatgctgatggcttttcagagacaaacttatgcaaatgatctaaagggaagtttttgctttcctctagttaaataacctgagcctgccatgcaaatagttgaataactttgttcctagttactgacatacaattcttaaaggaccatttagcattttggccaacaatgagtaattaggattagtacctttttgttttacagagtaactgagagttttgtaacatccagagatggtactagagccaatgagagatctgttcctagatgcactatttctttgaggaagagagagaagagaagtgtctggttgggggtgagggggtgcagacttttttgtttctatgtacagagcaaagagatagagtcacaaggaaagacaattaatgactttgagctcaaccaactgaactgcctttcttggagctgcacctggaccaagtttattttttaacaattataataacgatgatttaaaaaaagaaacctcccaaagcctataaactgaactagaagagttggtttcccactttagagtggatggcgacatcagcattgcttttgcccatggtgtttggggagagacttttcagtgataataaccactctactctgggttctgtgcatgcccagactaagccccatcgccttatttctggggtacatccagacctggcagggattctgccacactgtgcagcaaaccagcatgtaggctgggtaggagagcaagagatagagccatcagagtgatggggcttcttcacagtaagaacatcggagcttagaatgagagtctctttccaaaaacaggcattgttcatcttacgctaaacatcattgtctgcctggctacagtcaccaaaacaaaacagaaa

SEQ ID NO: 341921 - DNA, 3680 bp, Artificial Sequence
  derived and/or modified sequence
atgggtatctttaagagcagcttattccaagctttgctagatatccaagaattttatgaggtgacattgctaaattctcaaaaaagttgtgagcagaagatagaagaagccaatcaagttttacagaaatgggagaagacatcccttcttgctccgtgccatgacagacttcaaaaatcttcagagcttacagattgcagtggatcaaaggaaaatgcttcatgtattgagcaaaataaagaaaatcagagttttgaaaatgaaactgatgagacgacaactcaaaaccaaggcagatgcccagcccagaattgttcagtggaagcccctgcttggatgcctgtccaccactgtactaagtatcgatatcaagatgaggacgctccacatgatcattccttacctcgactaacccacgaagtaagaggcccagaactcgtgcatgtatcagaaaagaacctctctcaaatagaaaatgtccatggatatgtcttgcagtctcatatttctcctctgaaggccagtcctgctcctataattgtcaacacagatactttggacacaattccttatgtcaatgggacagaaattgaatatgaatttgaagaaattacactggagagggggaattctggcctgggattcagtattgctggggggacagataatccccacattggagatgaccctggcatatttattacgaagattataccaggaggtgctgcagcagaggatggcagactcagggtcaatgattgtatcttgcgggtgaatgaggttgatgtgtcagaggtttcccacagtaaagcggtggaagccctgaaggaagcagggtctatcgttcggctgtatgtgcgtagaagacgacctattttggagaccgttgtggaaatcaaactgttcaaaggccctaaaggtttaggcttcagtattgcaggaggtgtggggaaccaacacattcctggagacaacagcatttatgtaactaaaattatagatggaggagctgcacaaaaagatggaaggttgcaagtaggagatagactactaatggtaaacaactacagtttagaagaagtaacacacgaagaggcagtagcaatattaaagaacacatcagaggtagtttatttaaaagttggcaaacccactaccatttatatgactgatccttatggtccacctgatattactcactcttattctccaccaatggaaaaccatctactctctggcaacaatggcactttagaatataaaacctccctgccacccatctctccaggaaggtactcaccaattccaaagcacatgcttgttgacgacgactacaccaggcctccggaacctgtttacagcactgtgaacaaactatgtgataagcctgcttctcccaggcactattcccctgttgagtgtgacaaaagcttcctcctctcagctccctattcccactaccacctaggcctgctacctgactctgagatgaccagtcattcccaacatagcaccgcaactcgtcagccttcaatgactctccaacgggccgtctccctggaaggagagcctcgcaaggtagtcctgcacaaaggctccactggcctgggcttcaacattgtcggtggggaagatggagaaggtatttttgtgtccttcattctggctggtggaccagcagacctaagtggggagctccagagaggagaccagatcctatcggtgaatggcattgacctccgtggtgcatcccacgagcaggcagctgctgcactaaagggggctggacagacagtgacgattatagcacaatatcaacctgaagattacgctcgatttgaggccaaaatccatgacctacgagagcagatgatgaaccacagcatgagctccgggtccggatccctgcgaaccaatcagaaacgctccctctacgtcagagccatgttcgactacgacaagagcaaggacagtgggctgccaagtcaaggacttagttttaaatatggagatattctccacgttatcaatgcctctgatgatgagtggtggcaagccaggagagtcatgctggagggagacagtgaggagatgggggtcatccccagcaaaaggagggtggaaagaaaggaacgtgcccgattgaagacagtgaagtttaatgccaaacctggagtgattgattcgaaagggtcattcaatgacaagcgtaaaaagagcttcatcttttcacgaaaattcccattctacaagaacaaggagcagagtgagcaggaaaccagtgatcctgaacgaggacaagaagacctcattctttcctatgagcctgttacaaggcaggaaataaactacacccggccggtgattatcctggggcccatgaaggatcggatcaatgacgacttgatatctgaattccctgataaatttggctcctgtgtgcctcatactacgaggccaaagcgagactacgaggtggatggcagagactatcactttgtcatttccagagaacaaatggagaaagatatccaagagcacaagtttatagaagccggccagtacaatgacaatttatatggaaccagtgtgcagtctgtgagatttgtagcagaaagaggcaaacactgtatacttgatgtatcaggaaatgctatcaagcggttacaagttgcccagctctatcccattgccatcttcataaaacccaggtctctggaacctcttatggagatgaataagcgtctaacagaggaacaagccaagaaaacctatgatcgagcaattaagctagaacaagaatttggagaatattttacagctattgtccaaggagatactttagaagatatatataaccaatgcaagcttgttattgaagagcaatctgggcctttcatctggattccctcaaaggaaaagttataaattagctactgcgcctctgacaacgacagaagagcatttagaagaacaaaatatatataacatactacttggaggcttttatgtttttgttgcatttatgtttttgcagtcaatgtgaattcttacgaatgtacaacacaaactgtatgaagccatgaaggaaacagaggggccaaagggtgggacagaaaagacattgcagtatgaaggaaggctttggtttgctcaaagtgccaggtgtagggatgaacctctgacgggctttctgcccaagagatgagatgagagcctcctcaccccagcagatgtccagagctgatttagctgcagagctctctgtgtcttttgctttaaagaaaaattgccagcactcgaacctcatcagccttcccattacccacatctgtaattggtacactttgaattttataactatgcacatcttttgatttcttaacaagcaaatgaaagaaagaaggaaaaaagaaaggaatccctttggagatgacatactatcagggaaggataagtgtgtagttttttgactggcatctgcaaagacaagaatttcataaaatttgcaagtgtatggaggactaacctcactgacaggaggggattccacctgggattagctttatgattgttgattgcctattttgccatttataaactgaaagaaggcactaaagatgagaataatttatacaataaaaatatattaaatgtatagaaacaaatttctataggtt

SEQ ID NO: 341922 - DNA, 2928 bp, Artificial Sequence
  derived and/or modified sequence
tttggttttatagtctctgttcattttcaaagttacttaaatatccaagaattttatgaggtgacattgctaaattctcaaaaaagttgtgagcagaagatagaagaagccaatcaagttttacagaaatgggagaagacatcccttcttgctccgtgccatgacagacttcaaaaatcttcagagcttacagattgcagtggatcaaaggaaaatgcttcatgtattgagcaaaataaagaaaatcagagttttgaaaatgaaactgatgagacgacaactcaaaaccaaggcagatgcccagcccagaattgttcagtggaagcccctgcttggatgcctgtccaccactgtactaagtatcgatatcaagatgaggacgctccacatgatcattccttacctcgactaacccacgaagtaagaggcccagaactcgtgcatgtatcagaaaagaacctctctcaaatagaaaatgtccatggatatgtcttgcagtctcatatttctcctctgaaggccagtcctgctcctataattgtcaacacagatactttggacacaattccttatgtcaatgggacagaaattgaatatgaatttgaagaaattacactggagagggggaattctggcctgggattcagtattgctggggggacagataatccccacattggagatgaccctggcatatttattacgaagattataccaggaggtgctgcagcagaggatggcagactcagggtcaatgattgtatcttgcgggtgaatgaggttgatgtgtcagaggtttcccacagtaaagcggtggaagccctgaaggaagcagggtctatcgttcggctgtatgtgcgtagaagacgacctattttggagaccgttgtggaaatcaaactgttcaaaggccctaaaggtttaggcttcagtattgcaggaggtgtggggaaccaacacattcctggagacaacagcatttatgtaactaaaattatagatggaggagctgcacaaaaagatggaaggttgcaagtaggagatagactactaatggtaaacaactacagtttagaagaagtaacacacgaagaggcagtagcaatattaaagaacacatcagaggtagtttatttaaaagttggcaaacccactaccatttatatgactgatccttatggtccacctgatattactcactcttattctccaccaatggaaaaccatctactctctggcaacaatggcactttagaatataaaacctccctgccacccatctctccaggaaggtactcaccaattccaaagcacatgcttgttgacgacgactacaccaggcctccggaacctgtttacagcactgtgaacaaactatgtgataagcctgcttctcccaggcactattcccctgttgagtgtgacaaaagcttcctcctctcagctccctattcccactaccacctaggcctgctacctgactctgagatgaccagtcattcccaacatagcaccgcaactcgtcagccttcaatgactctccaacgggccgtctccctggaaggagagcctcgcaaggtagtcctgcacaaaggctccactggcctgggcttcaacattgtcggtggggaagatggagaaggtatttttgtgtccttcattctggctggtggaccagcagacctaagtggggagctccagagaggagaccagatcctatcggtgaatggcattgacctccgtggtgcatcccacgagcaggcagctgctgcactaaagggggctggacagacagtgacgattatagcacaatatcaacctgaagattacgctcgatttgaggccaaaatccatgacctacgagagcagatgatgaaccacagcatgagctccgggtccggatccctgcgaaccaatcagaaacgctccctctacgtcagagccatgttcgactacgacaagagcaaggacagtgggctgccaagtcaaggacttagttttaaatatggagatattctccacgttatcaatgcctctgatgatgagtggtggcaagccaggagagtcatgctggagggagacagtgaggagatgggggtcatccccagcaaaaggagggtggaaagaaaggaacgtgcccgattgaagacagtgaagtttaatgccaaacctggagtgattgattcgaaagggtcattcaatgacaagcgtaaaaagagcttcatcttttcacgaaaattcccattctacaagaacaaggagcagagtgagcaggaaaccagtgatcctgaacgaggacaagaagacctcattctttcctatgagcctgttacaaggcaggaaataaactacacccggccggtgattatcctggggcccatgaaggatcggatcaatgacgacttgatatctgaattccctgataaatttggctcctgtgtgcctcatactacgaggccaaagcgagactacgaggtggatggcagagactatcactttgtcatttccagagaacaaatggagaaagatatccaagagcacaagtttatagaagccggccagtacaatgacaatttatatggaaccagtgtgcagtctgtgagatttgtagcagaaagaggcaaacactgtatacttgatgtatcaggaaatgctatcaagcggttacaagttgcccagctctatcccattgccatcttcataaaacccaggtctctggaacctcttatggagatgaataagcgtctaacagaggaacaagccaagaaaacctatgatcgagcaattaagctagaacaagaatttggagaatattttacagctattgtccaaggagatactttagaagatatatataaccaatgcaagcttgttattgaagagcaatctgggcctttcatctggattccctcaaaggaaaagttataa

SEQ ID NO: 341923 - protein, 334 aa, Artificial Sequence
  derived and/or modified sequence
MMNHSMSSGSGSLRTNQKRSLYVRAMFDYDKSKDSGLPSQGLSFKYGDILHVINASDDEWWQARRVMLEGDSEEMGVIPSKRRVERKERARLKTVKFNAKPGVIDSKGDIPGLGDDGYGTKTLRGQEDLILSYEPVTRQEINYTRPVIILGPMKDRINDDLISEFPDKFGSCVPHTTRPKRDYEVDGRDYHFVISREQMEKDIQEHKFIEAGQYNDNLYGTSVQSVRFVAERGKHCILDVSGNAIKRLQVAQLYPIAIFIKPRSLEPLMEMNKRLTEEQAKKTYDRAIKLEQEFGEYFTAIVQGDTLEDIYNQCKLVIEEQSGPFIWIPSKEKL

SEQ ID NO: 341924 - protein, 348 aa, Artificial Sequence
  derived and/or modified sequence
MMNHSMSSGSGSLRTNQKRSLYVRAMFDYDKSKDSGLPSQGLSFKYGDILHVINASDDEWWQARRVMLEGDSEEMGVIPSKRRVERKERARLKTVKFNAKPGVIDSKGDIPGLGDDGYGTKTLKHVSSNASDSESSYRGQEDLILSYEPVTRQEINYTRPVIILGPMKDRINDDLISEFPDKFGSCVPHTTRPKRDYEVDGRDYHFVISREQMEKDIQEHKFIEAGQYNDNLYGTSVQSVRFVAERGKHCILDVSGNAIKRLQVAQLYPIAIFIKPRSLEPLMEMNKRLTEEQAKKTYDRAIKLEQEFGEYFTAIVQGDTLEDIYNQCKLVIEEQSGPFIWIPSKEKL

SEQ ID NO: 341925 - protein, 620 aa, Artificial Sequence [sequence omitted]

SEQ ID NO: 341926 - protein, 94 aa, Artificial Sequence
  derived and/or modified sequence
MMNHSMSSGSGSLRTNQKRSLYVRAMFDYDKSKDSGLPSQGLSFKYGDILHVINASDDEWWQARRVMLEGDSEEMGVIPSKRRVERKERARLKT

SEQ ID NO: 341927 - DNA, 1825 bp, Artificial Sequence
  derived and/or modified sequence
atttcagttaggctgctggggctgtgggtgccatcttgtcaccttggaggaagagcccacctgagaacgacatcaactcagagggaagtcagcagagccaagaggccgggagaggtgattcccggtgacatcatctggctcctgggtgcagccatggtagagttggcctcgaacgttgtccctggcatggaggtgaccagaggtcaccctcacatgtcagcagacacctccagctgtgtcattcttgcttcttgttggcaaagtttgtaggggtagtattctcagttggcattcctagctgagatgtgtagctgggaggtcaccacgccgcagggccttgggaccagttctgcctccgaggagtcccttactgatgatcataggctcctcaaggtcatcagccagggcagctttgcagaagtcaaggcagctggcccagcacattctcactgggaccaagatggctgtggaggtcaccccaacagggcagcagggctcctgcagcccccaggatctgtactgcagggtccatatgatgaaggcccttaatcacccgaagatcatcagacccacgtggctggcaccgagaacaggctgttcctagtcatggattaagccagctcgggagagctatccgacttcaccctccaattctccttgaagggggaagaggcctgaggcaagttccagcaaataggatattccatgcagtgaggcttccagaaggaaattatccacagggatctgaagccagagaacttccctgaggaggctcagcacgacatggaaacaacagactctggctttgataccagattcaccgtaggctgaaagctgatccccttcggtgggagctcctcttacgcagcctcggaactgttcccggaggcaaaagtacgatggactccggtgggcgtgtggagcctgggagtcactgtctacaccatggtggccgaggactgccatctgttgggcagacttttgtggggctgaggaggacactaatactctgtgaacgatgacaggagatcccgtttctcatttccatagaactagaacgcctcataaacacaattctggcccttgactccagggagaggccctcactagaccacatcatggggcgcccatgcgttaacatgggtcaggaggagacataaataaggccatactgggagctgctccccgatcacccggcgtctggaaagctctcgtggtgtccccgggagatgaggccaaccacgtcccatccttgtaggaacaaaaatgtaggaacaaaaatttttagtagagacggggtttctccattttggtcagggtggtctcgaactcctgaccacaggtgatccactcgcctcggcctcccaaagtgctgggattacaggcgtgaaccactgcgcccggcccacaacatggatttttcttactataaacatcaagctacacttgccacagtcttttaccgctgtggtctcatttgtctccaccagagggagaaaggagactcaataaaaactgcatggttctcggccgggcatggtgcctcacgcctgtaatcccagcactttgggaggccgaggcgggtggatcactgacgtcaggagttcgagaccagaccagcctggccaacatggtgaaaccctgtctctacaactactactactaataataataatacaaaaattagctggacgtggtggtgtgcacctgtgatcccagctactcgggaggctgaggcaggagaatcacttgaacccgggaggcaaaggttacagtgatccgaaatcacaccattacactccagccttgggcaacactccatctc

SEQ ID NO: 341928 - protein, 779 aa, Artificial Sequence
  derived and/or modified sequence
MSSARTPLPTLNERDTEQPTLGHLDSKPSSKSNMIRGRNSATSADEQPHIGNYRLLKTIGKGNFAKVKLARHILTGKEVAVKIIDKTQLNSSSLQKLFREVRIMKVLNHPNIVKLFEVIETEKTLYLVMEYASGGEVFDYLVAHGRMKEKEARAKFRQIVSAVQYCHQKFIVHRDLKAENLLLDADMNIKIADFGFSNEFTFGNKLDTFCGSPPYAAPELFQGKKYDGPEVDVWSLGVILYTLVSGSLPFDGQNLKELRERVLRGKYRIPFYMSTDCENLLKKFLILNPSKRGTLEQIMKDRWMNVGHEDDELKPYVEPLPDYKDPRRTELMVSMGYTREEIQDSLVGQRYNEVMATYLLLGYKSSELEGDTITLKPRPSADLTNSSAPSPSHKVQRSVSANPKQRRFSDQAAGPAIPTSNSYSKKTQSNNAENKRPEEDRESGRKASSTAKVPASPLPGLERKKTTPTPSTNSVLSTSTNRSRNSPLLERASLGQASIQNGKDSLTMPGSRASTASASAAVSAARPRQHQKSMSASVHPNKASGLPPTESNCEVPRPSTAPQRVPVASPSAHNISSSGGAPDRTNFPRGVSSRSTFHAGQLRQVRDQQNLPYGVTPASPSGHSQGRRGASGSIFSKFTSKFVRRNLNEPESKDRVETLRPHVVGSGGNDKEKEEFREAKPRSLRFTWSMKTTSSMEPNEMMREIRKVLDANSCQSELHEKYMLLCMHGTPGHEDFVQWEMEVCKLPRLSLNGVRFKRISGTSMAFKNIASKIANELKL

SEQ ID NO: 341929 - protein, 745 aa, Artificial Sequence
  derived and/or modified sequence
MIRGRNSATSADEQPHIGNYRLLKTIGKGNFAKVKLARHILTGKEVAVKIIDKTQLNSSSLQKLFREVRIMKVLNHPNIVKLFEVIETEKTLYLVMEYASGGEVFDYLVAHGRMKEKEARAKFRQIVSAVQYCHQKFIVHRDLKAENLLLDADMNIKIADFGFSNEFTFGNKLDTFCGSPPYAAPELFQGKKYDGPEVDVWSLGVILYTLVSGSLPFDGQNLKELRERVLRGKYRIPFYMSTDCENLLKKFLILNPSKRGTLEQIMKDRWMNVGHEDDELKPYVEPLPDYKDPRRTELMVSMGYTREEIQDSLVGQRYNEVMATYLLLGYKSSELEGDTITLKPRPSADLTNSSAPSPSHKVQRSVSANPKQRRFSDQAGPAIPTSNSYSKKTQSNNAENKRPEEDRESGRKASSTAKVPASPLPGLERKKTTPTPSTNSVLSTSTNRSRNSPLLERASLGQASIQNGKDSLTMPGSRASTASASAAVSAARPRQHQKSMSASVHPNKASGLPPTESNCEVPRPSTAPQRVPVASPSAHNISSSGGAPDRTNFPRGVSSRSTFHAGQLRQVRDQQNLPYGVTPASPSGHSQGRRGASGSIFSKFTSKFVRRNLNEPESKDRVETLRPHVVGSGGNDKEKEEFREAKPRSLRFTWSMKTTSSMEPNEMMREIRKVLDANSCQSELHEKYMLLCMHGTPGHEDFVQWEMEVCKLPRLSLNGVRFKRISGTSMAFKNIASKIANELKL

SEQ ID NO: 341930 - DNA, 2238 bp, Artificial Sequence
  derived and/or modified sequence
atgatcaggggacggaactcagctacgagcgcagatgagcagccacatattggcaactatcgtttactgaagactataggaaagggaaatttcgccaaagtaaagcttgctcgccacatcttgacaggaaaggaggtggccgtgaagatcattgacaagacccagctgaactcatcctccctgcagaagctctttcgggaggtacgcattatgaaagtgctcaatcaccccaacatagtgaaactgttcgaggtaattgagacagagaaaacactatatcttgtgatggagtacgcaagtggcggcgaggtgttcgactacttggtagcccacgggagaatgaaagagaaggaggctagggctaagttccggcaaattgtttccgccgtccaatactgccaccaaaagttcatcgtccaccgtgatttaaaggctgagaacctgctattggacgcagatatgaatatcaagatagccgattttgggttcagtaacgaattcacatttggtaataagttggatactttttgcggcagccccccgtacgcagccccggaactgttccaggggaagaaatatgatggccccgaagtagatgtgtggagtctgggtgtgatcttgtatacactcgtgtctggctccctgcccttcgatggccaaaatttgaaagagcttcgcgagagggttctgagaggcaagtaccggatccccttctatatgtccaccgattgtgaaaacctgctgaagaagtttctgatcctgaaccctagtaagagaggtacgctggaacagattatgaaggatagatggatgaacgtgggtcatgaagacgatgagctgaagccctacgtggaacccctgccagattacaaggatccaaggcgtacagagttgatggtgtctatgggctataccagagaggagatacaggacagcctggtaggccagcgctacaacgaagtcatggctacatatctcctccttggctataagtcctccgaactcgaaggtgacaccattaccctaaaacccaggccctcagccgatctgaccaactccagtgccccctccccttcccataaggtccaacggtccgtgtcagcgaaccccaagcagagaagatttagtgaccaggcgggtcccgcaatccctacaagtaactcatactctaaaaagacccagtctaacaacgcagaaaataaaagacctgaggaggaccgcgagagcggcagaaaggctagctctacagcaaaagtccctgcttctcctttgcctggacttgagagaaagaagactaccccaacaccttctaccaacagtgtgttgagtacgagcactaatcgctcacgtaacagcccacttcttgagcgcgcttcccttggacaggcttcaatccagaatggcaaagactctctgacaatgcccggatcacgtgcgtctacagcttccgcgagtgccgccgtgtcagctgcgcgcccaaggcaacatcagaagagcatgtcggcttctgtgcaccctaacaaggcatccggacttcccccaaccgaatcaaactgtgaagtccccaggccctcaaccgcacctcagcgtgtgccagtggcttctccctcagcccacaatatctcgagcagcggaggtgcaccagatcggactaatttcccgcggggagtttcttctcgctcaacattccatgccggacagttaaggcaggttcgggatcagcaaaatctcccatacggagtgacccccgcatcaccatctggccactctcagggccggcgcggtgctagcggatctattttcagtaaatttactagtaagttcgtaaggcggaacctgaacgaaccagagagcaaagatcgtgtggagacactgcggccccacgtagtgggctccggaggcaacgataaggaaaaagaggagttccgtgaagccaagccccgtagtctgagatttacatggagtatgaagacaactagcagtatggagcccaacgagatgatgcgtgagattcggaaggttctcgacgctaacagctgccagtcagagctgcatgagaaatacatgctgctctgtatgcacggaacaccaggacatgaggatttcgtgcagtgggagatggaggtgtgtaaactgccgcgcttgagcctaaatggcgtccgtttcaagcgtatttcaggcactagcatggccttcaagaatattgcatccaagatagcaaacgaacttaagctgtag

SEQ ID NO: 341931 - DNA, 2238 bp, Artificial Sequence
  derived and/or modified sequence
atgatccggggcagaaattctgccaccagcgcagatgagcagccccacatcggcaactaccgcctgctgaagaccatcggcaagggcaactttgccaaggtgaagctggcccggcacatcctgaccgggaaggaggtggccgtgaagatcatcgacaagacccagctgaacagcagcagcctgcagaagctgttccgggaggtgcgcatcatgaaggtgctgaaccaccccaacatcgtgaagctgtttgaagtcatcgagacagagaagaccctgtacctggtgatggagtatgccagcggcggggaggtgtttgactacctggtggcccacggccgcatgaaggagaaggaggcccgggccaagttccggcagatcgtgtctgctgtgcagtactgccaccagaagttcatcgtgcaccgggacctgaaggccgagaacctgctgctggatgctgacatgaacatcaagattgctgactttggcttcagcaatgagttcacctttggaaacaagctggacaccttctgtggcagccccccctatgctgcccctgagctgttccagggcaagaagtatgatggccctgaggtggatgtgtggagcctgggcgtcatcctgtacaccctggtgtctggcagcctgccctttgatggccagaacctgaaggagctgcgggagcgggtgctgcggggcaagtaccgcatccccttctacatgagcacagactgtgagaacctgctgaagaagttcctgatcctgaaccccagcaagaggggcaccctggagcagatcatgaaggaccgctggatgaatgtgggccatgaagatgatgagctgaagccctacgtggagcccctgcctgactacaaggaccccaggagaacagagctgatggtgtccatgggctacacccgggaggagatccaggacagcctggtgggccagcgctacaatgaggtgatggccacctacctgctgctgggctacaagagcagcgagctggagggggacaccatcaccctgaagccccggcccagcgctgacctgaccaacagcagcgcccccagccccagccacaaggtgcagaggtctgtgtctgccaaccccaagcagaggcgcttcagtgaccaggccggccctgccatccccaccagcaacagctacagcaagaagacccagagcaacaatgctgagaacaagaggccagaagaagatcgggagagcggcaggaaggccagcagcacagccaaggtgcctgccagccccctgcccggcctggagaggaagaagaccacccccacccccagcaccaacagcgtgctgagcaccagcaccaacagaagcaggaacagccccctgctggagcgggccagcctgggccaggccagcatccagaatggcaaggacagcctgaccatgcctggcagccgggccagcacagccagcgccagcgctgctgtgtctgctgcccggccccggcagcaccagaagtccatgtctgcctctgtgcaccccaacaaggccagcggcctgcccccaacagagagcaactgtgaggtgccccggcccagcacagccccccagagggtgcctgtggccagccccagcgcccacaacatcagcagcagcggcggggccccagacaggaccaacttcccccggggcgtgagcagccgcagcaccttccacgccggccagctgcggcaggtgcgggaccagcagaacctgccctatggagtgaccccagccagccccagcggccacagccagggcagaagaggagccagcggcagcatcttcagcaagttcaccagcaagtttgtgagaagaaacctgaatgaacctgagagcaaggacagagtggagaccctgcggccccacgtggtgggcagcggcggcaatgacaaggagaaggaggagttccgggaggccaagcccaggagcctgcgcttcacctggagcatgaagaccaccagctccatggagcccaatgagatgatgagggagatcaggaaggtgctggatgccaacagctgccagagcgagctgcacgagaagtacatgctgctgtgcatgcacggcaccccaggccacgaggactttgtgcagtgggagatggaggtgtgcaagctgccccggctgagcctgaatggagtgcgcttcaagaggatcagcggcacctccatggccttcaagaacatcgccagcaagatcgccaatgagctgaagctgtag

SEQ ID NO: 341932 - DNA, 2862 bp, Artificial Sequence
  derived and/or modified sequence
cttcctgccctattcccctcctgccccttccctcccaccttgcttctggtgtgctgtcctggaattgcacgcgcttcctgaccaccaggctctggcccttgagaagccagcggggctttgtccctgttgctctccttgccaaacccagtctctctgctagtggtggtttcggttgcgacaccgtccaggttcccaggcaggaaccgctcggcctggctgcttagctacttttcactgaggaggtggtggaaggtgtcgcctgctctggctgagtaagggtggctggctgagccggcagcccccgccctaggcctggctcttcccggcctctgtactttgccctcgctgcctgacaggttctgctgtgggctctgctgaatggaagtcgctggtagtccttttccctttctccagtcggcccaccttgggacaccttgactccaagcccagcagtaagtccaacatgattcggggccgcaactcagccacctctgctgatgagcagccccacattggaaactaccggctcctcaagaccattggcaagggtaattttgccaaggtgaagttggcccgacacatcctgactgggaaagaggtagctgtgaagatcattgacaagactcaactgaactcctccagcctccagaaactattccgcgaagtaagaataatgaaggttttgaatcatcccaacatagttaaattatttgaagtgattgagactgagaaaacgctctaccttgtcatggagtacgctagtggcggagaggtatttgattacctagtggctcatggcaggatgaaagaaaaagaggctcgagccaaattccgccagatagtgtctgctgtgcagtactgtcaccagaagtttattgtccatagagacttaaaggcagaaaacctgctcttggatgctgatatgaacatcaagattgcagactttggcttcagcaatgaattcacctttgggaacaagctggacaccttctgtggcagtcccccttatgctgccccagaactcttccagggcaaaaaatatgatggacccgaggtggatgtgtggagcctaggagttatcctctatacactggtcagcggatccctgccttttgatggacagaacctcaaggagctgcgggaacgggtactgaggggaaaataccgtattccattctacatgtccacggactgtgaaaacctgcttaagaaatttctcattcttaatcccagcaagagaggcactttagagcaaatcatgaaagatcgatggatgaatgtgggtcacgaagatgatgaactaaagccttacgtggagccactccctgactacaaggacccccggcggacagagctgatggtgtccatgggttatacacgggaagagatccaggactcgctggtgggccagagatacaacgaggtgatggccacctatctgctcctgggctacaagagctccgagctggaaggcgacaccatcaccctgaaaccccggccttcagctgatctgaccaatagcagcgccccatccccatcccacaaggtacagcgcagcgtgtcggccaatcccaagcagcggcgcttcagcgaccaggctggtcctgccattcccacctctaattcttactctaagaagactcagagtaacaacgcagaaaataagcggcctgaggaggaccgggagtcagggcggaaagccagcagcacagccaaggtgcctgccagccccctgcccggtctggagaggaagaagaccaccccaaccccctccacgaacagcgtcctctccaccagcacaaatcgaagcaggaattccccacttttggagcgggccagcctcggccaggcctccatccagaatggcaaagacagcctaaccatgccagggtcccgggcctccacggcttctgcttctgccgcagtctctgcggcccggccccgccagcaccagaaatccatgtcggcctccgtgcaccccaacaaggcctctgggctgccccccacggagagtaactgtgaggtgccgcggcccagcacagccccccagcgtgtccctgttgcctccccatccgcccacaacatcagcagcagtggtggagccccagaccgaactaacttcccccggggtgtgtccagccgaagcaccttccatgctgggcagctccgacaggtgcgggaccagcagaatttgccctacggtgtgaccccagcctctccctctggccacagccagggccggcggggggcctctgggagcatcttcagcaagttcacctccaagtttgtacgcaggaacctgaatgaacctgaaagcaaagaccgagtggagacgctcagacctcacgtggtgggcagtggcggcaacgacaaagaaaaggaagaatttcgggaggccaagccccgctccctccgcttcacgtggagtatgaagaccacgagctccatggagcccaacgagatgatgcgggagatccgcaaggtgctggacgcgaacagctgccagagcgagctgcatgagaagtacatgctgctgtgcatgcacggcacgccgggccacgaggacttcgtgcagtgggagatggaggtgtgcaaactgccgcggctctctctcaacggggttcgatttaagcggatatcgggcacctccatggccttcaaaaacattgcctccaaaatagccaacgagctgaagctttaacaggctgccaggagcgggggcggcgggggcgggccagctggacgggctgccggccgctgcgccgccccacctgggcgagactgcagcgatggattggtgtgtctcccctgctggcacttctcccctccctggcccttctcagttttctcttacatgtttgt

SEQ ID NO: 341933 - DNA, 2238 bp, Artificial Sequence
  derived and/or modified sequence
atgatccggggccggaacagcgccaccagcgccgacgagcagccccacatagggaattatcgcttgttaaagacgatcggcaaggggaatttcgctaaggtgaaactcgcaaggcacattttaaccggcaaggaggtggctgtcaaaattattgacaaaactcagctgaattccagtagccttcagaagctgttccgggaagtaaggattatgaaagtgctgaaccaccccaacattgtgaagctgttcgaggtgattgagactgaaaagactctgtatctggtcatggagtacgcttccgggggggaagttttcgattacctggtggcccacggtcggatgaaggagaaagaagcccgggccaagtttcggcagatcgtgagtgccgtccagtattgccaccaaaaatttattgtgcatagggatttgaaagccgaaaatttgctgttggatgccgatatgaatatcaaaatcgctgacttcgggttctccaatgaattcaccttcggtaataagctcgacacgttctgtgggtcaccgccctacgctgcgcctgaactgttccagggtaagaaatatgacgggccggaggtggatgtgtggagtctcggcgtgattctgtacactctggtttctgggagtctccccttcgacgggcagaatttgaaggagctcagagagagggtgctgaggggaaagtaccggattcctttttacatgtccactgactgcgagaatctgctcaaaaagttcttaatcctgaaccctagcaaacggggaacactggaacaaattatgaaagacaggtggatgaacgtgggccacgaggacgatgaacttaaaccctacgtggaaccccttcccgattataaagatcctaggaggacagagctgatggtgtctatgggttacaccagggaggaaattcaggattcacttgtgggacagaggtataatgaagtcatggccacatatcttctattaggctacaagtcctccgagctcgagggcgacaccatcaccctaaaaccaagaccttcagccgacttaacaaacagcagtgcccccagcccctcacataaggtccagcgctccgtgagcgccaatcctaaacagcggaggttcagtgaccaggccggccctgccatcccaactagcaatagttatagtaagaaaactcagagcaacaatgccgagaataagcggccagaagaggacagagagtctggtagaaaagcctcctccacagccaaagtgccagcatctccgctgcctgggctcgagagaaagaaaaccactcctactccatccacgaattccgtgctctccacctctactaacagaagccgcaactcccccctgcttgaaagggcttctttagggcaggcttccatccagaatgggaaggactcccttaccatgccagggtctcgcgcctccaccgcaagcgcctccgctgccgtttctgcagcgcgaccgagacagcaccaaaagtcaatgtccgcctccgtacatcctaataaggcctcgggcctcccgcctaccgaaagcaactgtgaagtgccgcggccatcgactgctccacaacgagtaccagtggcctcaccatcagcccacaacatttcctcctcagggggcgcgccagataggacaaatttcccaaggggagtcagtagtagatcgacctttcacgctggacagttacgccaagtgcgtgatcagcagaacctgccctatggcgtaaccccagcctcaccaagcgggcattcacagggccggaggggagccagtggcagcattttcagcaaatttacctctaaatttgttcgtcggaacttgaatgagccagaatctaaggaccgagtggagacactgcgccctcatgtggtcgggtccggcggcaacgacaaggagaaggaagaattcagagaggccaagcctcgtagtctgaggtttacatggtcaatgaaaactacatcatccatggagcctaacgagatgatgcgcgaaatcagaaaagtgctcgacgcgaatagctgccagagtgaattgcatgagaagtacatgctgctatgcatgcacgggactcctggacacgaggacttcgtgcaatgggaaatggaggtgtgcaagctgccccggctttcccttaatggggttcgttttaagagaatttctgggacgtcaatggcatttaagaacatcgccagtaaaattgccaatgaattaaagttgtag

SEQ ID NO: 341934 - DNA, 2238 bp, Artificial Sequence
  derived and/or modified sequence
atgattcgcggtagaaatagcgcaactagtgccgacgagcagccacacatcggcaactaccggttgctgaaaacaattggcaaagggaacttcgctaaggtcaaactggctaggcacatcctcaccggcaaagaggtggccgttaagatcatcgataaaacccagctgaatagctcatcactgcagaagctgttcagagaggtgagaatcatgaaggtgcttaaccatcccaacatcgttaagctattcgaagttattgagactgagaagaccctgtacctggtgatggaatatgcttccggaggggaggtgttcgattacctcgtcgcccatggacggatgaaggaaaaggaagccagagctaaattccgccagattgtctctgccgtgcagtactgccatcagaagtttatcgtgcacagagacctgaaagccgagaatcttctcctggacgcggatatgaacattaaaattgcggacttcggatttagtaacgagttcacctttggaaacaagcttgacactttttgcggatcaccaccttatgcagccccagagcttttccagggaaaaaagtatgatggacccgaagtggatgtgtggtccctgggcgtcatactatatactctggtgtctggaagtctcccattcgatggtcagaacttaaaagagctccgggagcgggtgctgagagggaagtatcgcattccattctatatgtcaactgattgcgaaaacctgctaaagaaatttctgatcctcaacccttccaaaagggggaccttggagcagatcatgaaggacaggtggatgaatgtcggtcatgaggacgacgagttaaaaccgtatgtggagcctctgcccgattataaggatcctcgacgaaccgagcttatggtgtccatgggttacactagagaggagatacaggattcccttgtggggcagcgctataatgaggtgatggcgacttatctgctgctgggatacaaatcttctgaactggaaggagacacaatcacactgaaacccagaccatccgccgatcttacaaactcatctgccccttccccttcacataaagtgcagaggtccgtttcagcaaaccctaagcaacggcgattctcagatcaagcaggacctgccatccctacttcgaattcctatagtaaaaagactcagagcaataatgcagaaaataagcgaccggaggaggaccgtgagagcggtcgaaaggcgtcctctaccgccaaggtccctgcatcaccactcccgggattggaacgaaaaaagacaaccccaacacctagtacaaatagcgtgctgtccacatcaaccaatcgtagcagaaactcgccgctgttagaaagggctagcctggggcaagcttctatccagaacggtaaggattcactgaccatgcctggatcaagggcctccaccgcatccgcctcagccgcagtgagtgccgctcgacctcggcagcaccagaagtccatgtcagcttctgtccacccaaataaagcatccggacttcccccaacggagagtaactgtgaggttccacgcccatccaccgctccccaacgcgtacctgtggcatctccatcagctcacaatatttccagctcaggcggagccccagatcgcactaattttcccagaggcgtatcgtcccgttccaccttccacgctggccagctaagacaggtgagagaccaacagaacctgccctacggcgtaactcccgcttctccaagcgggcactcccagggccgacgaggcgcttctgggagcattttttcgaagttcacatccaagtttgtgcgtaggaatctgaatgagccagagtccaaggatcgcgtggaaaccctccgtccccatgtcgtgggtagcgggggaaatgataaagagaaagaggaattccgcgaggccaagccacgatccctgaggttcacatggtcaatgaaaactacttcaagcatggaacctaacgagatgatgagagagattaggaaggtgctcgacgccaacagttgccagtcagagcttcatgaaaagtatatgttgctctgtatgcacggcaccccagggcatgaagactttgtgcagtgggaaatggaggtctgcaagctgccgagattgtccctaaatggcgtccgcttcaagcgcatctctggaacgagtatggcctttaagaatatcgctagcaagattgctaatgagttgaagctgtag

SEQ ID NO: 341935 - DNA, 2238 bp, Artificial Sequence
  derived and/or modified sequence
atgatcagaggcagaaacagcgccaccagcgccgacgagcagccccacatcggcaactacagactgctgaagaccatcggcaagggcaacttcgccaaggtgaagctggccagacacatcctgaccggcaaggaggtggccgtgaagatcatcgacaagacccagctgaacagcagcagcctgcagaagctgttcagagaggtgagaatcatgaaggtgctgaaccaccccaacatcgtgaagctgttcgaggtgatcgagaccgagaagaccctgtacctggtgatggagtacgccagcggcggcgaggtgttcgactacctggtggcccacggcagaatgaaggagaaggaggccagagccaagttcagacagatcgtgagcgccgtgcagtactgccaccagaagttcatcgtgcacagagacctgaaggccgagaacctgctgctggacgccgacatgaacatcaagatcgccgacttcggcttcagcaacgagttcaccttcggcaacaagctggacaccttctgcggcagccccccctacgccgcccccgagctgttccagggcaagaagtacgacggccccgaggtggacgtgtggagcctgggcgtgatcctgtacaccctggtgagcggcagcctgcccttcgacggccagaacctgaaggagctgagagagagagtgctgagaggcaagtacagaatccccttctacatgagcaccgactgcgagaacctgctgaagaagttcctgatcctgaaccccagcaagagaggcaccctggagcagatcatgaaggacagatggatgaacgtgggccacgaggacgacgagctgaagccctacgtggagcccctgcccgactacaaggaccccagaagaaccgagctgatggtgagcatgggctacaccagagaggagatccaggacagcctggtgggccagagatacaacgaggtgatggccacctacctgctgctgggctacaagagcagcgagctggagggcgacaccatcaccctgaagcccagacccagcgccgacctgaccaacagcagcgcccccagccccagccacaaggtgcagagaagcgtgagcgccaaccccaagcagagaagattcagcgaccaggccggccccgccatccccaccagcaacagctacagcaagaagacccagagcaacaacgccgagaacaagagacccgaggaggacagagagagcggcagaaaggccagcagcaccgccaaggtgcccgccagccccctgcccggcctggagagaaagaagaccacccccacccccagcaccaacagcgtgctgagcaccagcaccaacagaagcagaaacagccccctgctggagagagccagcctgggccaggccagcatccagaacggcaaggacagcctgaccatgcccggcagcagagccagcaccgccagcgccagcgccgccgtgagcgccgccagacccagacagcaccagaagagcatgagcgccagcgtgcaccccaacaaggccagcggcctgccccccaccgagagcaactgcgaggtgcccagacccagcaccgccccccagagagtgcccgtggccagccccagcgcccacaacatcagcagcagcggcggcgcccccgacagaaccaacttccccagaggcgtgagcagcagaagcaccttccacgccggccagctgagacaggtgagagaccagcagaacctgccctacggcgtgacccccgccagccccagcggccacagccagggcagaagaggcgccagcggcagcatcttcagcaagttcaccagcaagttcgtgagaagaaacctgaacgagcccgagagcaaggacagagtggagaccctgagaccccacgtggtgggcagcggcggcaacgacaaggagaaggaggagttcagagaggccaagcccagaagcctgagattcacctggagcatgaagaccaccagcagcatggagcccaacgagatgatgagagagatcagaaaggtgctggacgccaacagctgccagagcgagctgcacgagaagtacatgctgctgtgcatgcacggcacccccggccacgaggacttcgtgcagtgggagatggaggtgtgcaagctgcccagactgagcctgaacggcgtgagattcaagagaatcagcggcaccagcatggccttcaagaacatcgccagcaagatcgccaacgagctgaagctgtag

SEQ ID NO: 341936 - protein, 773 aa, Artificial Sequence
  derived and/or modified sequence
MSSARTPLPTLNERDTEQPTLGHLDSKPSSKSNMIRGRNSATSADEQPHIGNYRLLKTIGKGNFAKVKLARHILTGKEVAVKIIDKTQLNSSSLQKLFREVRIMKVLNHPNIVKLFEVIETEKTLYLVMEYASGGEVFDYLVAHGRMKEKEARAKFRQIVSAVQYCHQKFIVHRDLKAENLLLDADMNIKIADFGFSNEFTFGNKLDTFCGSPPYAAPELFQGKKYDGPEVDVWSLGVILYTLVSGSLPFDGQNLKELRERVLRGKYRIPFYMSTDCENLLKKFLILNPSKRGTLEQIMKDRWMNVGHEDDELKPYVEPLPDYKDPRRTELMVSMGYTREEIQDSLVGQRYNEVMATYLLLGYKSSELEGDTITLKPRPSADLTNSSAPSPSHKVQRSVSANPKQRRFSDQAAGPAIPTSNSYSKKTQSNNAENKRPEEDRESGRKASSTAKVPASPLPGLERKKTTPTPSTNSVLSTSTNRSRNSPLLERASLGQASIQNGKDSLTMPGSRASTASASAAVSAARPRQHQKSMSASVHPNKASGLPPTESNCEVPRPSTAPQRVPVASPSAHNISSSGGAPDRTNFPRGVSSRSTFHAGQLRQVRDQQNLPYGVTPASPSGHSQGRRGASGSIFSKFTSKFVRRNLSFRFARRPHVVGSGGNDKEKEEFREAKPRSLRFTWSMKTTSSMEPNEMMREIRKVLDANSCQSELHEKYMLLCMHGTPGHEDFVQWEMEVCKLPRLSLNGVRFKRISGTSMAFKNIASKIANELKL

SEQ ID NO: 341937 - protein, 161 aa, Artificial Sequence
  derived and/or modified sequence
MIRGRNSATSADEQPHIGNYRLLKTIGKGNFAKVKLARHILTGKEVAVKIIDKTQLNSSSLQKLFREVRIMKVLNHPNIVKLFEVIETEKTLYLVMEYASGGEVFDYLVAHGRMKEKEARAKFRQIVSAVQYCHQKFIVHRDLKAENLLLDADMNIKIADF

SEQ ID NO: 341938 - protein, 61 aa, Artificial Sequence [sequence omitted]

SEQ ID NO: 341939 - DNA, 2076 bp, Artificial Sequence
  derived and/or modified sequence
atgatcaggggtcgtaatagtgccacgagtgccgatgagcagcctcacatagggaattatcgacttctcaagacgattggcaagggcaatttcgctaaagtgaagctggctagacacatattgaccggcaaggaagtggctgtcaaaatcattgataaaacacaactcaactcctcatccctacaaaagttatttcgtgaggtgcgaattatgaaagtgctcaaccaccccaacatagtcaaactgttcgaagtaattgagacggaaaagacactttatctggttatggaatacgcctccggtggggaagtctttgattatttagtagcccacggtcgaatgaaagagaaagaagcaagggctaaatttcgccagattgtttccgccgtccagtattgtcaccagaagtttattgtgcacagagatctcaaggctgagaacctgctcctggacgccgacatgaatatcaaaatagccgattttggattttctaacgagtttacctttggaaacaagctagacactttttgcggctcccctccatacgcggctcccgagctattccaaggcaagaaatacgacgggccagaggtggacgtatggtcattgggggtgatactgtataccctggtgagtggcagtttgcccttcgatggccagaatcttaaggaactgagggagagagtactccgagggaagtatcgcatacctttctacatgagtaccgattgtgagaatctgcttaaaaagttcttaattttaaacccgtccaaaagggggactcttgaacaaatcatgaaagatcggtggatgaacgttgggcatgaagacgacgaactcaaaccgtatgtggaacctctacccgattacaaggatccacggagaactgaactaatggtttccatgggctacacacgggaagaaatccaggacagcctcgtcggccagagatacaatgaggtaatggcaacctatctcctgctagggtacaagagttccgagctggagggcgacacgatcacccttaaaccacgaccttctgccgatctcaccaattcgtccgctcccagcccttcgcacaaagtgcagagatccgtgtccgccaaccctaaacagcgtcgattctccgatcaagcaggacccgccattcctacttccaatagttactcaaagaaaacacaatcgaataatgcagagaataaaaggccagaggaagatagagaaagcggcaggaaggcctcaagcaccgccaaggtaccagcctcccctttacccggcttggaaaggaagaaaacaactcctacacctagtacgaactccgttctgtctacctctacaaatcgatctcggaattcaccacttctggagcgcgccagcctggggcaggccagcattcaaaacgggaaagacagtaccgcaccccagcgggtccccgtggcatccccctccgcccataacatctcatcctcgggcggcgctccagataggactaactttcctcgaggagtttcgtcacggagcacattccacgcaggacagcttagacaggtgagggaccagcaaaaccttccgtacggggtgacccccgcctcaccatctggacactcccagggcaggaggggagccagcggttccatttttagcaagttcacctcgaaattcgttcggcgcaacctcaatgaaccagaaagtaaggatagggtcgaaacactgcgcccccatgtggtaggttctggcgggaacgacaaggaaaaagaggaatttcgcgaagcaaagccccggtcgctgcgctttacctggtccatgaagaccacctcttcaatggaacctaacgaaatgatgagagagatcagaaaggtgctggatgctaactcttgtcaaagcgagctgcacgagaagtacatgctgctctgcatgcacgggaccccagggcacgaggactttgtacaatgggagatggaagtatgtaaactccctcgactatcattaaacggcgtacggtttaaacggataagtggcacctccatggccttcaagaatattgcatcgaaaatcgctaacgagcttaaactgtag

SEQ ID NO: 341940 - DNA, 2076 bp, Artificial Sequence
  derived and/or modified sequence
atgatccgcggtagaaatagcgctacaagtgctgatgagcaaccacacatcgggaattaccgtttgctgaagactattggcaaaggcaactttgctaaagtgaaactggccaggcacattctcacaggcaaggaggtggccgttaagattattgacaagactcagctgaactcatcctctctccagaagctgttcagagaagttcggataatgaaagtcctgaaccaccctaatatcgtcaagctgttcgaggtgatcgaaacggagaagactctctacttggtaatggagtacgcctcaggaggcgaagtattcgattacctggtggcccatggccgaatgaaagaaaaggaggcccgggcaaagtttcgccaaatagtgagtgctgtgcaatactgtcatcagaaatttattgtccacagagatctaaaggcagaaaacttgctactggacgccgatatgaacataaaaattgcggacttcggcttctcaaacgaattcacctttggaaataagttggatacattctgtggctcgcctccgtatgctgcccccgagttatttcagggcaaaaaatacgatggtccagaggttgacgtatggagtctgggcgtaatcctgtacacactagtcagcggttccttgccatttgatggccagaatttgaaggagctgagagagagagtgctgcgcggtaaatataggatccccttttacatgtcaaccgactgtgaaaacctactgaagaagttcctaatcctgaacccttctaagcgcggaacactggaacagataatgaaagaccgctggatgaatgtcggccacgaagacgacgagctgaagccttatgttgaacctcttccagattataaggatccccgcaggacagagctgatggtgagtatggggtacacgcgcgaggagatacaggatagtctggttgggcagagatacaacgaggtgatggcgacttatctgctccttggttataaaagctcagagctcgagggcgatactattacgttgaagccccgtccctcagccgatctcactaacagctcagcaccgtcccctagtcacaaggtccagaggagtgtgagtgcaaaccctaagcagagacggttctccgaccaggctggcccagccatccctactagcaattcctactcaaaaaagactcagtcaaataacgctgaaaacaaacggcctgaagaggaccgagagagtggtcgcaaagcgagctctacagcaaaggtgcccgcatcccctctccccggcctcgagcgtaaaaaaacaacccctacaccctcaaccaactcagtgctctctacatcgaccaatagatcgcggaactctcctcttcttgagcgagcaagtctgggccaggccagcatccagaacggcaaggatagcacagcccctcagcgcgtgcccgttgcatctccatctgctcataatatcagtagctccggaggtgcccccgaccggacaaacttcccacgcggagtgtcctctagatctacctttcacgcaggacagctgaggcaggtccgggaccagcagaacctgccatatggcgttacccccgcctctccttcaggtcactctcaaggacgaagaggggcttcaggctcaatcttttcgaagtttactagcaagtttgtgagacgaaatctcaatgaacccgagagcaaggaccgcgtggagaccctgcggccacatgtggtgggatccggtggcaacgataaggagaaggaggaatttcgggaggctaaaccccggagtctccgctttacatggtccatgaaaacgacaagttcgatggaacccaatgagatgatgcgagagattcggaaagtattggatgccaacagttgccagtcagaactgcacgagaaatacatgctgctctgtatgcacggcacccccgggcacgaggactttgtgcagtgggagatggaagtctgcaagctgcctagactaagcctgaacggagtgaggtttaagcgcatcagcggtaccagcatggcctttaagaacatcgcatctaagatagctaacgaactcaagttatag

SEQ ID NO: 341941 - DNA, 2076 bp, Artificial Sequence
  derived and/or modified sequence
atgatccggggcagaaattctgccaccagcgcagatgagcagccccacatcggcaactaccgcctgctgaagaccatcggcaagggcaactttgccaaggtgaagctggcccggcacatcctgaccgggaaggaggtggccgtgaagatcatcgacaagacccagctgaacagcagcagcctgcagaagctgttccgggaggtgcgcatcatgaaggtgctgaaccaccccaacatcgtgaagctgtttgaagtcatcgagacagagaagaccctgtacctggtgatggagtatgccagcggcggggaggtgtttgactacctggtggcccacggccgcatgaaggagaaggaggcccgggccaagttccggcagatcgtgtctgctgtgcagtactgccaccagaagttcatcgtgcaccgggacctgaaggccgagaacctgctgctggatgctgacatgaacatcaagattgctgactttggcttcagcaatgagttcacctttggaaacaagctggacaccttctgtggcagccccccctatgctgcccctgagctgttccagggcaagaagtatgatggccctgaggtggatgtgtggagcctgggcgtcatcctgtacaccctggtgtctggcagcctgccctttgatggccagaacctgaaggagctgcgggagcgggtgctgcggggcaagtaccgcatccccttctacatgagcacagactgtgagaacctgctgaagaagttcctgatcctgaaccccagcaagaggggcaccctggagcagatcatgaaggaccgctggatgaatgtgggccatgaagatgatgagctgaagccctacgtggagcccctgcctgactacaaggaccccaggagaacagagctgatggtgtccatgggctacacccgggaggagatccaggacagcctggtgggccagcgctacaatgaggtgatggccacctacctgctgctgggctacaagagcagcgagctggagggggacaccatcaccctgaagccccggcccagcgctgacctgaccaacagcagcgcccccagccccagccacaaggtgcagaggtctgtgtctgccaaccccaagcagaggcgcttcagtgaccaggccggccctgccatccccaccagcaacagctacagcaagaagacccagagcaacaatgctgagaacaagaggccagaagaagatcgggagagcggcaggaaggccagcagcacagccaaggtgcctgccagccccctgcccggcctggagaggaagaagaccacccccacccccagcaccaacagcgtgctgagcaccagcaccaacagaagcaggaacagccccctgctggagcgggccagcctgggccaggccagcatccagaatggcaaggacagcacagccccccagagggtgcctgtggccagccccagcgcccacaacatcagcagcagcggcggggccccagacaggaccaacttcccccggggcgtgagcagccgcagcaccttccacgccggccagctgcggcaggtgcgggaccagcagaacctgccctatggagtgaccccagccagccccagcggccacagccagggcagaagaggagccagcggcagcatcttcagcaagttcaccagcaagtttgtgagaagaaacctgaatgaacctgagagcaaggacagagtggagaccctgcggccccacgtggtgggcagcggcggcaatgacaaggagaaggaggagttccgggaggccaagcccaggagcctgcgcttcacctggagcatgaagaccaccagctccatggagcccaatgagatgatgagggagatcaggaaggtgctggatgccaacagctgccagagcgagctgcacgagaagtacatgctgctgtgcatgcacggcaccccaggccacgaggactttgtgcagtgggagatggaggtgtgcaagctgccccggctgagcctgaatggagtgcgcttcaagaggatcagcggcacctccatggccttcaagaacatcgccagcaagatcgccaatgagctgaagctgtag

SEQ ID NO: 341942 - DNA, 2112 bp, Artificial Sequence
  derived and/or modified sequence
cccagcagtaagtccaacatgattcggggccgcaactcagccacctctgctgatgagcagccccacattggaaactaccggctcctcaagaccattggcaagggtaattttgccaaggtgaagttggcccgacacatcctgactgggaaagaggtagctgtgaagatcattgacaagactcaactgaactcctccagcctccagaaactattccgcgaagtaagaataatgaaggttttgaatcatcccaacatagttaaattatttgaagtgattgagactgagaaaacgctctaccttgtcatggagtacgctagtggcggagaggtatttgattacctagtggctcatggcaggatgaaagaaaaagaggctcgagccaaattccgccagatagtgtctgctgtgcagtactgtcaccagaagtttattgtccatagagacttaaaggcagaaaacctgctcttggatgctgatatgaacatcaagattgcagactttggcttcagcaatgaattcacctttgggaacaagctggacaccttctgtggcagtcccccttatgctgccccagaactcttccagggcaaaaaatatgatggacccgaggtggatgtgtggagcctaggagttatcctctatacactggtcagcggatccctgccttttgatggacagaacctcaaggagctgcgggaacgggtactgaggggaaaataccgtattccattctacatgtccacggactgtgaaaacctgcttaagaaatttctcattcttaatcccagcaagagaggcactttagagcaaatcatgaaagatcgatggatgaatgtgggtcacgaagatgatgaactaaagccttacgtggagccactccctgactacaaggacccccggcggacagagctgatggtgtccatgggttatacacgggaagagatccaggactcgctggtgggccagagatacaacgaggtgatggccacctatctgctcctgggctacaagagctccgagctggaaggcgacaccatcaccctgaaaccccggccttcagctgatctgaccaatagcagcgccccatccccatcccacaaggtacagcgcagcgtgtcggccaatcccaagcagcggcgcttcagcgaccaggctggtcctgccattcccacctctaattcttactctaagaagactcagagtaacaacgcagaaaataagcggcctgaggaggaccgggagtcagggcggaaagccagcagcacagccaaggtgcctgccagccccctgcccggtctggagaggaagaagaccaccccaaccccctccacgaacagcgtcctctccaccagcacaaatcgaagcaggaattccccacttttggagcgggccagcctcggccaggcctccatccagaatggcaaagacagcacagccccccagcgtgtccctgttgcctccccatccgcccacaacatcagcagcagtggtggagccccagaccgaactaacttcccccggggtgtgtccagccgaagcaccttccatgctgggcagctccgacaggtgcgggaccagcagaatttgccctacggtgtgaccccagcctctccctctggccacagccagggccggcggggggcctctgggagcatcttcagcaagttcacctccaagtttgtacgcaggaacctgaatgaacctgaaagcaaagaccgagtggagacgctcagacctcacgtggtgggcagtggcggcaacgacaaagaaaaggaagaatttcgggaggccaagccccgctccctccgcttcacgtggagtatgaagaccacgagctccatggagcccaacgagatgatgcgggagatccgcaaggtgctggacgcgaacagctgccagagcgagctgcatgagaagtacatgctgctgtgcatgcacggcacgccgggccacgaggacttcgtgcagtgggagatggaggtgtgcaaactgccgcggctctctctcaacggggttcgatttaagcggatatcgggcacctccatggccttcaaaaacattgcctccaaaatagccaacgagctgaagctttaacaggctgccaggagcggg

SEQ ID NO: 341943 - DNA, 2076 bp, Artificial Sequence
  derived and/or modified sequence
atgatccggggccggaacagcgccaccagcgccgacgagcagccccacataggcaactatcggctcctgaagacaatcgggaagggcaattttgccaaagtgaagcttgcccgccacatactcaccggtaaagaggtagccgttaaaatcatcgacaagacacagcttaactcatcgagcctccagaagctgttccgtgaggttcgtatcatgaaggttctaaatcaccccaatatcgtcaagctgttcgaagttatcgagactgaaaaaaccttgtatcttgtcatggaatatgcgtctggcggagaagtgtttgactacctggtggctcatggcagaatgaaggagaaggaggccagggcgaagttccggcagattgtctcggcagtacaatattgtcatcagaagttcatcgtccatcgggatctgaaggctgagaacctgcttttggacgccgatatgaatatcaaaattgccgattttggcttctctaacgaattcactttcggtaacaagttagacaccttctgcggcagcccaccttacgctgcccccgagttattccagggaaagaaatacgacggacctgaagtagatgtgtggagcttaggagtgatactttacacattggtgtccggaagtttgccattcgatggacagaacctaaaggagttgcgcgagcgcgtgcttagagggaaatacaggatccccttttatatgagcaccgattgtgagaacctgctaaaaaaattcctaatcttgaacccctctaagcgggggactctggagcagattatgaaagatcgctggatgaacgtcggacacgaggatgatgaactcaagccctacgtcgagcccttgcccgattataaggatccgcggcggactgaactaatggtgtccatgggctacacacgggaagaaatccaagactccttagtgggacagcgttacaacgaagtcatggccacctatcttttactcggttacaagtcatccgaattggaaggggacaccatcaccttaaaaccacggccctcagcggacctgacgaatagttctgccccctcgccatcccacaaagtacaacgatcagtgtcagctaacccaaaacaacgccggtttagtgaccaggctgggcccgcaatacccacctcaaactcctacagcaaaaagactcagagcaacaacgcggagaataagaggccagaggaagatcgcgaaagcgggaggaaggcttcgagcaccgcaaaggtgcctgcctctccgcttcctggattggagcgcaagaaaacgactcctacgccaagcactaattcagtgctctcgacttctaccaataggtccagaaattcccctctgttggaacgggctagcctggggcaggcgtccatccagaacggtaaggacagcacagctccacaacgcgtgcctgtagcatcccctagcgctcataatatttcctcttccggcggagcacccgataggactaactttcctaggggggtgagctctaggtccaccttccatgctggtcaactcaggcaggttagagaccagcaaaatctaccctacggagtgactcccgcctctccttcagggcacagccaggggcggcgcggggcctctggctcaatctttagcaaatttactagtaagtttgtgagacggaacctgaatgagcccgagtctaaggaccgggtagagacactgaggcctcacgttgtgggaagcgggggcaatgataaggaaaaggaagaattcagggaagccaaaccacggagcttgcggtttacctggtccatgaagaccactagttccatggagcccaatgagatgatgcgcgagatccgtaaagtgttagatgcgaacagctgccagtctgaactccacgagaaatatatgctgctttgtatgcacggcacgcccgggcacgaggattttgtgcagtgggagatggaggtctgtaagcttccacgtctgtctctgaacggtgtgcgcttcaaacggatcagcgggacttctatggcattcaagaatatcgctagtaagatagcaaacgagctgaagctgtag

SEQ ID NO: 341944 - DNA, 2076 bp, Artificial Sequence
  derived and/or modified sequence
atgatccggggccggaacagcgccaccagcgccgacgagcagccccacattgggaattatcggcttttaaagactattggcaaggggaattttgcgaaggtgaaattggcccgtcacatccttactggcaaagaagtggctgttaaaatcatcgataaaacacagctgaatagttcctctctccagaagctctttcgagaggtccggattatgaaggtactaaaccacccaaacattgtgaaactttttgaagtgattgagacggaaaagaccctttaccttgtgatggaatacgcaagcggtggcgaagtttttgattacctcgttgctcacgggcgtatgaaggagaaggaggctagggccaaatttaggcagatcgtgagtgccgtccagtactgtcatcaaaagttcattgtacaccgggatttgaaggcagaaaacctcctgctggatgccgacatgaacatcaagatcgctgacttcgggttttcgaacgagtttacattcggtaataagctcgataccttctgcgggagtccaccttatgcagctccagagttgtttcaggggaaaaaatatgatggccccgaagtggatgtttggagcctcggtgtcatcttgtataccctggtctctggatctctgcctttcgacggccaaaacttgaaagaattaagggaaagggtgctcagaggcaaatatcgtattcctttctacatgagcactgactgcgagaacctcttgaaaaagtttttaattctgaacccctccaagcgggggactctcgagcaaatcatgaaggaccgatggatgaacgttggccacgaggacgacgaattaaaaccatacgtcgagcctctgccggattacaaagatccaaggagaactgagctgatggtgtccatgggctacacacgggaagagatccaggacagccttgtagggcagagatataatgaagttatggccacatacctgttgctggggtacaagtcttctgaactagaaggagatactattaccctaaagccgagaccttccgccgacctgactaacagctcggccccatcgccgtcacataaggttcaacgcagtgtctctgctaatcccaagcaacgccgattcagcgaccaagctgggcccgccattcctacctccaattcatatagtaaaaagacacaatccaataatgcagaaaataaaagacctgaggaagacagagaatccggacggaaggcctcctccaccgccaaagtgccggcttccccactgccagggttggagcggaagaagaccactcctacaccctcaaccaattctgtcctgagcacctctaccaatcgaagccggaactctccgcttctggagcgggctagcctcggacaagcgtcaatccaaaacggaaaagactccactgctcctcaacgcgttcccgtggcaagcccttctgcccataacatctcttcaagtggcggtgccccagaccgcaccaattttccgaggggcgtgagttcaaggagcactttccatgccggacagctcagacaggtgagagatcagcagaatttaccttatggagtgacgcctgccagcccatctgggcactcccagggtcgcagaggagccagcgggtctattttttccaagtttacatccaagtttgtgcggcgcaatttaaatgagcctgaatcaaaagaccgggtcgaaacgctgagaccccacgtggttggctccgggggaaacgataaggaaaaagaagagttccgtgaagcaaagccaagatctcttcgctttacctggtctatgaagaccacgtcgagcatggaacctaacgaaatgatgcgcgaaataaggaaggttctcgacgccaattcttgccagtctgagctccatgaaaaatacatgctgttgtgtatgcacggaacacctggtcatgaggatttcgtgcagtgggagatggaagtctgcaaacttcccagactatcactgaatggagtgcggttcaagaggatatctggcactagtatggcctttaaaaatatcgcaagtaaaatagccaacgagctaaaactctag

SEQ ID NO: 341945 - DNA, 2076 bp, Artificial Sequence
  derived and/or modified sequence
atgatccggggaaggaactccgccacctcagccgacgaacagccacatattggcaactatcgcctgctaaagacaattggcaagggcaactttgctaaagtgaaattagctaggcacatcctcaccggtaaagaagtggccgttaaaatcatcgacaaaacacagttgaatagctctagccttcagaagttgttccgggaggtcagaatcatgaaggtgttgaaccatcccaacatcgtaaaattatttgaagtgatagagaccgaaaaaaccctctacctagtgatggaatatgcgtcaggtggcgaggtcttcgactacctcgtcgcacatggtcggatgaaagaaaaggaggcacgggcaaaatttcggcagattgtgtctgccgtgcagtactgtcatcaaaagtttattgttcacagagatcttaaagccgagaatttactgctggacgctgacatgaatattaaaattgccgattttgggttcagcaacgaatttaccttcggtaataagctcgatacattctgtgggtcccccccatacgccgcacccgaactgtttcaggggaagaaatatgacggccctgaggtcgacgtatggagcctcggcgtgattctctatactctggtttccggtagcctgccatttgacggtcagaatctgaaagaactgagggagcgggtgttgcgaggcaaatatcgcattcccttttatatgagtaccgactgtgagaacctgttaaaaaagttccttatactgaatcccagcaagagggggactctggagcagatcatgaaagaccgatggatgaacgtggggcatgaggatgacgagctgaagccctacgtggagccacttccagattataaagaccctcgcaggactgagttgatggtttcgatgggatatacaagggaagagattcaggacagccttgtggggcaacgatacaacgaagtaatggccacctatttgctactcggctataagtcaagcgagctggagggagacacaatcactctgaaaccgaggccatctgcggacctcacgaacagctcggccccatctccctctcataaagtgcagcgttcagtgtccgccaaccccaaacagcgccgattctcagatcaggccggacctgcaattccaaccagcaattcttatagtaagaaaacccagtccaacaacgccgagaacaagaggcctgaggaggatagggaaagtggaagaaaagccagctcaaccgccaaagtccctgcatccccgctgccgggactggagaggaagaaaaccactcctactccaagcaccaactccgtcttatctacatccactaatcgcagccgcaattcacctctacttgagcgagcctcactgggccaggccagcatccagaatggcaaggattctactgcgccacaacgcgtgccagtcgcatctccatccgcccataatatctcaagcagcgggggagcccctgaccggacaaactttcccaggggcgtttcaagccgttccactttccacgctggccagctgaggcaggtgcgagaccagcagaacttgccgtacggggtcactcctgccagccctagtgggcattcccaaggccgaaggggcgcaagtggtagcatattttcgaagttcacttctaagttcgtgcggaggaaccttaatgagcctgaatcaaaggatcgagtagagactctgaggccccacgtagtcggatcaggaggaaacgacaaggaaaaagaagagttcagggaagcaaaaccaaggtcgctaagatttacctggagcatgaagaccacaagctctatggagccgaatgagatgatgcgggaaattaggaaggttctggacgccaactcctgtcagagtgagctccatgagaaatacatgctcttgtgcatgcacgggacacctggccatgaggatttcgtgcaatgggaaatggaggtctgtaagctgccaagactctctctaaacggcgtgagatttaagagaatcagcgggaccagtatggcctttaaaaacatagcaagcaagatcgctaacgagctcaaactgtag

SEQ ID NO: 341946 - DNA, 2076 bp, Artificial Sequence
  derived and/or modified sequence
atgatccggggacgaaactccgcgacctcagctgacgagcagcctcacattgggaactataggctgctgaagaccatcggaaagggcaacttcgctaaggtgaaattggccaggcatattctgacaggtaaggaagtcgctgtaaagatcatcgataaaactcagttaaactctagcagtcttcaaaagctctttcgggaggtccggataatgaaagtgctgaatcatcccaacatagtgaaactcttcgaagtcattgaaacggagaaaaccttatacctcgtaatggaatacgcctctggaggagaggttttcgactacctcgtggctcacggccgtatgaaggaaaaggaagccagggcaaagtttagacaaattgtaagtgctgtgcaatactgtcaccagaaattcatcgtccacagggatttgaaagccgaaaatcttctgttggatgccgacatgaatataaaaatcgccgacttcgggttttctaacgagtttacgttcggcaacaagttggacactttttgcggctcacctccctacgccgctccggagctgttccaggggaagaaatacgatgggccagaggtagatgtttggtccctgggggttattttatacacactcgtgagcggttccctgccgtttgacggccagaacctcaaggagttacgcgagcgggtgctcagagggaagtacagaataccgttctatatgagtacagattgtgaaaatttactgaaaaaatttttgatcctcaatcctagtaaacgcggaaccctcgagcaaataatgaaagatcgttggatgaatgtaggccatgaagatgatgaacttaagccctacgtcgaacccctgcccgactataaagatcccagaaggaccgagctgatggtgagtatgggctatacgcgtgaggaaatacaggatagcctggtcggtcagcgatataacgaggtgatggccacttacttgttgctcggctataagagctccgagctcgagggggacactatcacactgaagcccaggccctcagctgatcttaccaattcctccgcgccttcaccgtcccacaaagtgcaacgttctgtgtcagctaacccaaaacagcgacgcttcagtgatcaggcagggcctgcaatccctacatccaacagctacagcaaaaaaactcagagcaataacgcagaaaacaagcgcccagaggaggacagggagagcggacgcaaggccagctccaccgctaaggtacccgcaagtcctcttcccggactagaacggaaaaagaccacacctacccctagcacaaactccgtgctaagcactagcactaataggtcacgcaacagcccactactcgagagagcttccctcgggcaggcgtccatccagaacggcaaggatagcacagctcctcagcgagtgcccgtggctagtccaagtgcccataacatctcaagctccggtggtgcccctgatcggaccaactttcccaggggcgtgagctcccgttcaacttttcacgcgggacaactgaggcaagtaagagatcagcagaacctgccttacggcgtcacccccgcatcaccaagtggccattcacaagggaggcggggtgcctctgggtcaattttctctaaattcacatctaaatttgtgaggaggaatctaaatgagcctgaatccaaggatagagtagagactctgaggcctcacgtggtgggtagtggaggtaatgacaaggaaaaggaagaattcagagaggcaaaaccgaggtccctacgttttacgtggtccatgaaaaccacatcctccatggagccaaacgagatgatgcgagaaattcgcaaggtgctcgatgccaatagctgccaatcagaactccacgagaagtatatgcttttgtgcatgcacgggacacctggccacgaggacttcgtccagtgggaaatggaggtttgcaagctgcccagactgtcgctgaacggcgtcaggtttaagcgcatatcagggacttcaatggcatttaagaacatcgctagtaagatagcgaatgaattaaagctgtag

SEQ ID NO: 341947 - DNA, 2076 bp, Artificial Sequence
  derived and/or modified sequence
atgatcagaggcagaaacagcgccaccagcgccgacgagcagccccacatcggcaactacagactgctgaagaccatcggcaagggcaacttcgccaaggtgaagctggccagacacatcctgaccggcaaggaggtggccgtgaagatcatcgacaagacccagctgaacagcagcagcctgcagaagctgttcagagaggtgagaatcatgaaggtgctgaaccaccccaacatcgtgaagctgttcgaggtgatcgagaccgagaagaccctgtacctggtgatggagtacgccagcggcggcgaggtgttcgactacctggtggcccacggcagaatgaaggagaaggaggccagagccaagttcagacagatcgtgagcgccgtgcagtactgccaccagaagttcatcgtgcacagagacctgaaggccgagaacctgctgctggacgccgacatgaacatcaagatcgccgacttcggcttcagcaacgagttcaccttcggcaacaagctggacaccttctgcggcagccccccctacgccgcccccgagctgttccagggcaagaagtacgacggccccgaggtggacgtgtggagcctgggcgtgatcctgtacaccctggtgagcggcagcctgcccttcgacggccagaacctgaaggagctgagagagagagtgctgagaggcaagtacagaatccccttctacatgagcaccgactgcgagaacctgctgaagaagttcctgatcctgaaccccagcaagagaggcaccctggagcagatcatgaaggacagatggatgaacgtgggccacgaggacgacgagctgaagccctacgtggagcccctgcccgactacaaggaccccagaagaaccgagctgatggtgagcatgggctacaccagagaggagatccaggacagcctggtgggccagagatacaacgaggtgatggccacctacctgctgctgggctacaagagcagcgagctggagggcgacaccatcaccctgaagcccagacccagcgccgacctgaccaacagcagcgcccccagccccagccacaaggtgcagagaagcgtgagcgccaaccccaagcagagaagattcagcgaccaggccggccccgccatccccaccagcaacagctacagcaagaagacccagagcaacaacgccgagaacaagagacccgaggaggacagagagagcggcagaaaggccagcagcaccgccaaggtgcccgccagccccctgcccggcctggagagaaagaagaccacccccacccccagcaccaacagcgtgctgagcaccagcaccaacagaagcagaaacagccccctgctggagagagccagcctgggccaggccagcatccagaacggcaaggacagcaccgccccccagagagtgcccgtggccagccccagcgcccacaacatcagcagcagcggcggcgcccccgacagaaccaacttccccagaggcgtgagcagcagaagcaccttccacgccggccagctgagacaggtgagagaccagcagaacctgccctacggcgtgacccccgccagccccagcggccacagccagggcagaagaggcgccagcggcagcatcttcagcaagttcaccagcaagttcgtgagaagaaacctgaacgagcccgagagcaaggacagagtggagaccctgagaccccacgtggtgggcagcggcggcaacgacaaggagaaggaggagttcagagaggccaagcccagaagcctgagattcacctggagcatgaagaccaccagcagcatggagcccaacgagatgatgagagagatcagaaaggtgctggacgccaacagctgccagagcgagctgcacgagaagtacatgctgctgtgcatgcacggcacccccggccacgaggacttcgtgcagtgggagatggaggtgtgcaagctgcccagactgagcctgaacggcgtgagattcaagagaatcagcggcaccagcatggccttcaagaacatcgccagcaagatcgccaacgagctgaagctgtag

SEQ ID NO: 341948 - protein, 112 aa, Artificial Sequence
  derived and/or modified sequence
MIRGRNSATSADEQPHIGNYRLLKTIGKGNFAKVKLARHILTGKEVAVKIIDKTQLNSSSLQKLFREVRIMKVLNHPNIVKLFEVIETEKTLYLVMEYASGGEVFDYLVAHG

SEQ ID NO: 341949 - protein, 91 aa, Artificial Sequence
  derived and/or modified sequence
MGGQRNTSVGNIVQRWRDHVVCQKAGVIYSGRKAQEHGTGRTDFTPAQRLMMPTLGHLDSKPSSKSNMIRGRNSATSADEQPHIGNYRLLK

SEQ ID NO: 341950 - DNA, 186 bp, Artificial Sequence
  derived and/or modified sequence
atggaggttgcagggagcccgttcccatttctacagagtgtcgcttgtctgctcacactcgctcatatacctgcagtaggaaacattctgcagcatcggagacgtggggctggccctacgcttgggcaccttgactcaaagccttccagtaaaagcaatatgatcagggggcgcaatagtgcctag

SEQ ID NO: 341951 - DNA, 186 bp, Artificial Sequence
  derived and/or modified sequence
atggaggtggccggcagccccttccccttcctgcagagcgtggcctgcctgctgaccctggcccacatcccagctgtgggcaacatcctgcagcacagaagaagaggagctggccccaccctgggccacctggacagcaagcccagcagcaagagcaacatgatccggggcaggaacagcgcctag

SEQ ID NO: 341952 - DNA, 1022 bp, Artificial Sequence
  derived and/or modified sequence
atggaagtcgctggtagtccttttccctttctccagtcggtggcttgcctccttaccctggctcacatccctgctgtgggaaacatcttacagcatagaagaaggggtgcagggcccaccttgggacaccttgactccaagcccagcagtaagtccaacatgattcggggccgcaactcagccacctctgctgatgagcagccccacattggaaactaccggctcctcaagaccattggcaagggtaattttgccaaggtgaagttggcccgacacatcctgactgggaaagaggtagctgtgaagatcattgacaagactcaactgaactcctccagcctccagaaactattccgcgaagtaagaataatgaaggttttgaatcatcccaacatagttaaattatttgaagtgattgagactgagaaaacgctctaccttgtcatggagtacgctagtggcggagaggtatttgattacctagtggctcatggcaggatgaaagaaaaagaggctcgagccaaattccgccagatagtgtctgctgtgcagtactgtcaccagaagtttattgtccatagagacttaaaggcagaaaacctgctcttggatgctgatatgaacatcaagattgcagactttggcttcagcaatgaattcacctttgggaacaagctggacaccttctgtggcagtcccccttatgctgccccagaactcttccagggcaaaaaatatgatggacccgaggtggatgtgtggagcctaggagttatcctctatacactggtcagcggatccctgccttttgatggacagaacctcaaggagctgcgggaacgggtactgaggggaaaataccgtattccattctacatgtccacggactgtgaaaacctgcttaagaaatttctcattcttaatcccagcaagagaggcactttagagcaaatcatgaaagatcgatggatgaatgtgggtcacgaagatgatgaactaaagccttacgtggagccactccc

SEQ ID NO: 341953 - DNA, 186 bp, Artificial Sequence
  derived and/or modified sequence
atggaggtggccggcagccccttccccttcctgcagagcgtggcctgcctgctgaccttggctcacatcccagccgtgggtaatatcctgcagcacaggcgaagaggggctgggccaacactggggcatcttgacagtaaacctagctcgaaatcaaatatgatccgggggcgaaattctgcttag

SEQ ID NO: 341954 - DNA, 186 bp, Artificial Sequence
  derived and/or modified sequence
atggaagtagctggctcccccttcccctttttgcaatccgtggcctgtcttctgacactggctcatatccccgctgttggaaacatactgcagcatagacgtcgaggagcaggtcctactctaggacatctagacagcaagccgtcttccaaatccaatatgattagagggcgaaactccgcctag

SEQ ID NO: 341955 - DNA, 186 bp, Artificial Sequence
  derived and/or modified sequence
atggaggtggccggcagccccttccccttcctgcagagcgtggcctgcctgctgaccctggcccacatccccgccgtgggcaacatcctgcagcacagaagaagaggcgccggccccaccctgggccacctggacagcaagcccagcagcaagagcaacatgatcagaggcagaaacagcgcctag

SEQ ID NO: 341956 - protein, 468 aa, Artificial Sequence
  derived and/or modified sequence
MWLYRRYYSNVCQRTLSFTIFLILFLAFIETPSSLTSTADVRYRAAPWEPPCGLTESVEVLCLLVFAADLSVKGYLFGWAHFQKNLWLLGYLVVLVVSLVDWTVSLSLVCHEPLRIRRLLRPFFLLQNSSMMKKTLKCIRWSLPEMASVGLLLAIHLCLFTMFGMLLFAGGKQDDGQDRERLTYFQNLPESLTSLLVLLTTANNPDVMIPAYSKNRAYAIFFIVFTVIGSLFLMNLLTAIIYSQFRGYLMKSLQTSLFRRRLGTRAAFEVLSSMVGEGGAFPQATRRGPSTSLRFCRAPSSSSATTTLTTWGTSSPWQTWCPFACSWCWMQMCCLLSVMTSSWGFSTASSLCTTCWRCCSRSLPWACEGTCPTPATCLTGSSPLSCWRPEMVGLLSLWDMTRMLNMLIVFRFLRIIPSMKLMAVVASTVLGLVQNMRAFGGILVPGPCQWLGALWELRAAGVLGQQLR

SEQ ID NO: 341957 - protein, 444 aa, Artificial Sequence
  derived and/or modified sequence
MENSGKANKKDTHDGPPKEIKLPTSEALLDYQCQIKEDAVEQFMFQIKTLRKKNQKYHERNSRLKEEQIWHIRHLLKELSEEKAEGLPVVTREDVEEAMKEKWKFERDQEKNLRDMRMQISNAEKLFLEKLSEKEYWEEYKNVGSERHAKLITSLQNDINTVKENAEKMSEHYKITLEDTRKKIIKETLLQLDQKKEWATQNAVKLIDKGSYLEIWENDWLKKEVAIHRKEVEELKNAIHELEAENLVLIDQLSNCRLVDLKIPRYPVLHSCPTSNPRHLLLLPLESCLISARRCWRLYLTQAAGLEVPPEEMSLELPETHIEEKSELQPTEVESRDLMSSSDESTILHLSHENSIEDLQYVKIDKEENSGTEFGDTDMKYLLYEDEKDFKDYVNLGPLGVKLMSVESKKMPIHFQEKEIPVKLYKDVRSPESHITYKMMKSFL

SEQ ID NO: 341958 - DNA, 1335 bp, Artificial Sequence
  derived and/or modified sequence
atggagaacagcggcaaggccaacaagaaggacacccacgacggcccccccaaggagatcaagctgcccaccagcgaggccctgctggactaccagtgccagatcaaggaggacgccgtggagcagttcatgttccagatcaagaccctgagaaagaagaaccagaagtaccacgagagaaacagcagactgaaggaggagcagatctggcacatcagacacctgctgaaggagctgagcgaggagaaggccgagggcctgcccgtggtgaccagagaggacgtggaggaggccatgaaggagaagtggaagttcgagagagaccaggagaagaacctgagagacatgagaatgcagatcagcaacgccgagaagctgttcctggagaagctgagcgagaaggagtactgggaggagtacaagaacgtgggcagcgagagacacgccaagctgatcaccagcctgcagaacgacatcaacaccgtgaaggagaacgccgagaagatgagcgagcactacaagatcaccctggaggacaccagaaagaagatcatcaaggagaccctgctgcagctggaccagaagaaggagtgggccacccagaacgccgtgaagctgatcgacaagggcagctacctggagatctgggagaacgactggctgaagaaggaggtggccatccacagaaaggaggtggaggagctgaagaacgccatccacgagctggaggccgagaacctggtgctgatcgaccagctgagcaactgcagactggtggacctgaagatccccagataccccgtgctgcacagctgccccaccagcaaccccagacacctgctgctgctgcccctggagagctgcctgatcagcgccagaagatgctggagactgtacctgacccaggccgccggcctggaggtgccccccgaggagatgagcctggagctgcccgagacccacatcgaggagaagagcgagctgcagcccaccgaggtggagagcagagacctgatgagcagcagcgacgagagcaccatcctgcacctgagccacgagaacagcatcgaggacctgcagtacgtgaagatcgacaaggaggagaacagcggcaccgagttcggcgacaccgacatgaagtacctgctgtacgaggacgagaaggacttcaaggactacgtgaacctgggccccctgggcgtgaagctgatgagcgtggagagcaagaagatgcccatccacttccaggagaaggagatccccgtgaagctgtacaaggacgtgagaagccccgagagccacatcacctacaagatgatgaagagcttcctgtag

SEQ ID NO: 341959 - DNA, 2358 bp, Artificial Sequence
  derived and/or modified sequence
aaatgcagggcgcagcagccgctgcagtggagccggtaggcctggccggcgggctgaaaggaagtgcgagctgtccgcccagggccgggtatccgcccctgcaggctgtggaggggatgtcaggagactggctggcctcttttcttggcccccgactccttccagtctgacactgaagactttataagcttccccccgaccaccctccacgggctccactctccacgggcctgggcttgcgccgcttcgagatcagcctgggggtcgcgccctcctggtcttgtccacgaagcgccgttcttgggccgttaggagctgctgggaagggctctgataggcccactcctcttctccacccaggagatgagaaggagggcaggcctttttaatctgatcagaatgttaacccatctctccgccttgcggtagaacccctggatacattatttgccctctcgaaaggcaggctctgaatttgattcaggtatatttcttcatagctaaccagcacaatggaaaactcagggaaagcaaataaaaaggatacacatgacgggccaccaaaagaaattaaactgcctaccagtgaagcacttctagactatcaatgtcaaataaaggaagatgccgtggagcaattcatgtttcaaataaagacacttaggaaaaagaaccaaaaatatcatgaaagaaatagccgcttaaaagaagaacagatttggcacatacggcatctactaaaggaactgagtgaagagaaggcagagggattgccagttgtaacaagagaggatgttgaagaagcgatgaaggaaaaatggaagtttgaaagagaccaggaaaaaaacttgagagatatgcgcatgcaaataagtaatgctgagaaactatttcttgagaaactcagtgaaaaggaatattgggaggagtacaagaatgtagggagtgaacgacatgctaaactcattacctccttacaaaatgacatcaacacagttaaagagaatgcagagaaaatgtcagaacactataaaatcactctggaagatactagaaagaaaataatcaaggaaactttgttgcaactggaccaaaagaaggaatgggccacacagaatgctgtaaagctcattgacaagggcagttatctagagatctgggagaatgactggctcaaaaaagaggttgcaattcacaggaaggaagttgaagaattaaaaaatgctattcatgaactggaagcagaaaatttggtgcttattgatcaactatccaactgtagacttgtggatctcaagatacccaggtatccagtgctacattcctgtcccacctctaatcctcgtcatctgctgctgctgcctttggaatcatgtctaatctctgccaggcgttgctggcgactatatcttacccaagctgctggactagaagtgccacctgaagaaatgtctttggaattgccagaaacacatatagaagagaagtcagaattgcaacccacagaagtagaaagtagagacttgatgtcctcatcagatgagagcactatcttacatcttagtcatgaaaatagcatcgaagatctccagtatgtgaagatagataaagaggaaaactcaggcacagagtttggggacactgatatgaagtacttactatatgaggatgagaaggatttcaaggattatgtaaacttgggccccctgggagtgaagcttatgagtgtggagagcaagaaaatgcccattcattttcaagagaaggaaattccagtcaaactctataaagatgtcaggagcccagaaagccacatcacatataagatgatgaagtcttttctctaagacggaaagctgcaaaggaaacacaacttttccttataaatgttctttgggaactgaagtatatccgttgcccattttacttacactttggctcatttttaaaccagctgttatttctaaaggtcatatttacatttaaaatcaaaggtattcagctattcatttacttgcatggtatgagtgaccaaaacggaagcacgctttgtatttctacactgaagtattcagaagcatgacagtgggttcaaggtagtctctgaggttccttttcacacacaaaaaattcactgattaatctgtgattccagtatgaaatagttccattagaaatgtttctaagaaaaacttagaagtttgcatagcattgtctacacatctttccctctgaggatgctcaatgtgatagacagccagtctataatgcaagccaattctccgtagtttaaccctgtgtattagtctgttctcatgctgctaataaagacataattgaaactgggtaatttataaa

SEQ ID NO: 341960 - DNA, 1335 bp, Artificial Sequence
  derived and/or modified sequence
atggagaactcagggaaagctaataaaaaggatacccacgacggaccacctaaggaaataaagctccctaccagcgaggccctgcttgactatcaatgtcagatcaaggaggacgctgtggagcagtttatgttccagataaaaacgctacgcaaaaaaaaccagaagtatcatgagcgcaacagccggctgaaagaggagcaaatctggcacataagacatctgctaaaagagctgtcagaagaaaaagctgagggcttgcctgtcgtcacccgcgaggacgtggaagaagccatgaaggagaaatggaaatttgagcgcgatcaggaaaaaaacttaagagatatgagaatgcagattagtaatgccgagaaattgttcttggaaaaactgagtgagaaagaatattgggaagagtataagaatgtcggtagcgaacgacatgcaaagctcatcacaagcttacagaacgacattaacacggtcaaagagaacgccgagaagatgagcgaacattacaaaattacacttgaagacacgaggaaaaaaatcattaaggagactctcctgcaactggatcagaaaaaggagtgggcaacgcagaacgcggtgaaattaattgacaaagggtcctacctcgagatatgggagaacgactggctcaaaaaagaggtcgccatccaccgtaaagaggtggaggagctgaagaacgcaatccacgaacttgaagcagagaatctggtgctcatcgaccagctgtcgaattgccgtctggtggatctgaagattcctagatacccagttctacactcctgccccacatcaaatcctagacatctactgttgctgcctttagagagctgcttgatctctgcacgccggtgctggcgtctgtatctaacccaggccgccgggctggaagtcccgcctgaggagatgagtctggaattgcctgagacacatatagaggagaaatctgagttacagcccaccgaagtggaaagcagagacctgatgagctccagtgatgagtccaccattctccatctcagccacgaaaactctatcgaagacctacaatacgtgaaaattgataaagaggagaacagcggcaccgagttcggggatactgatatgaagtatttgctctacgaggacgaaaaggatttcaaagactacgtgaacctgggtccactcggcgtcaaactgatgagcgtggaaagtaaaaagatgcctattcattttcaagagaaggagatccctgtcaagctgtacaaagacgtgcgcagcccagagagccacatcacctacaaaatgatgaaaagttttctttag

SEQ ID NO: 341961 - DNA, 1335 bp, Artificial Sequence
  derived and/or modified sequence
atggagaacagcggcaaggccaacaagaaggacacccatgatggcccccccaaggagatcaagctgcccaccagcgaggccctgctggactaccagtgccagatcaaggaggatgctgtggagcagttcatgttccagatcaagaccctgaggaagaagaaccagaagtaccacgagaggaacagccggctgaaggaggagcagatctggcacatccgccacctgctgaaggagctgtctgaggagaaggccgagggcctgcctgtggtgaccagagaagatgtggaggaggccatgaaggagaagtggaagtttgagcgggaccaggagaagaacctgcgggacatgaggatgcagatcagcaatgctgagaagctgttcctggagaagctgtctgagaaggagtactgggaggagtacaagaatgtgggcagcgagagacatgccaagctgatcaccagcctgcagaatgacatcaacacagtgaaggaaaatgctgagaagatgtctgagcactacaagatcaccctggaggacaccaggaagaagatcatcaaggagaccctgctgcagctggaccagaagaaggagtgggccacccagaatgctgtgaagctgattgacaagggcagctacctggagatctgggagaatgactggctgaagaaggaggtggccatccacaggaaggaggtggaggagctgaagaatgccatccacgagctggaggccgagaacctggtgctgattgaccagctgagcaactgccgcctggtggacctgaagatcccccgctaccctgtgctgcacagctgccccaccagcaaccccaggcacctgctgctgctgcccctggagagctgcctgatcagcgcccggcgctgctggaggctgtacctgacccaggccgccggcctggaggtgcccccagaggagatgagcctggagctgcctgagacccacatcgaggagaagtctgagctgcagcccacagaggtggagagccgggacctgatgagcagcagtgatgagagcaccatcctgcacctgagccatgaaaattccattgaggacctgcagtatgtgaagattgacaaggaggagaacagcggcacagaatttggagacacagacatgaagtacctgctgtatgaagatgagaaggacttcaaggactatgtgaacctgggccccctgggcgtgaagctgatgtctgtggagagcaagaagatgcccatccacttccaggagaaggagatccctgtgaagctgtacaaggatgtgcgcagccctgagagccacatcacctacaagatgatgaagagcttcctgtag

SEQ ID NO: 341962 - DNA, 1335 bp, Artificial Sequence
  derived and/or modified sequence
atggagaacagcggcaaggccaacaagaaggacacccacgacggcccccccaaggagattaagctccctacctctgaggccctcttggattaccaatgccagattaaagaggatgccgtggagcaatttatgttccagattaagacactacgaaaaaagaatcagaaataccacgaacggaactcaagattaaaagaggagcagatctggcacatcagacaccttctaaaagagctcagcgaggaaaaagccgagggattgcctgtggtaactcgcgaagacgtggaggaggctatgaaggagaagtggaagttcgaacgggatcaagagaaaaatctcagagacatgaggatgcagattagcaatgccgagaaattgttccttgaaaagctgtcagagaaggagtattgggaggagtacaagaacgtcgggagcgagcggcacgccaaacttataaccagcctccaaaacgacatcaacaccgtgaaggaaaatgccgagaagatgagcgaacattataagatcaccctggaggacacaagaaagaagatcattaaagaaacactgttacagctggatcagaagaaagaatgggccacccagaatgccgtcaagctaatcgacaagggatcatatctggagatctgggaaaacgattggttaaaaaaggaagttgcaattcaccgcaaagaagttgaggaactcaaaaatgccattcacgaactggaggccgaaaacctggtcttgattgaccagctttccaattgccggctggtggatttaaagatcccaaggtatcccgtcctgcactcttgccctacatccaacccccggcacctgctgctcctccctctcgagagctgcctcatcagcgcacggcgatgctggaggctttacttgactcaagcggctggcttggaagtgcccccggaagagatgtccctagaactcccagagactcacatcgaagagaaaagtgaactacagccaacagaagtggaaagtcgggatctcatgtccagctcagatgagtcaacaatcctgcacttgagtcacgagaatagcattgaagatctgcagtacgttaagatcgataaagaggaaaactcaggaacggaattcggtgatacagatatgaagtatttgttatacgaagacgagaaagatttcaaggactatgtcaacttgggcccactgggtgtaaagctaatgtccgtggagagcaagaaaatgccgatccattttcaggagaaggagatacccgtgaagctatacaaagacgttcggagccccgagagccatattacctacaaaatgatgaagtcttttctttag

SEQ ID NO: 341963 - DNA, 1335 bp, Artificial Sequence
  derived and/or modified sequence
atggaaaactcaggtaaggctaacaagaaggacacacacgatggccctccaaaagagattaaactcccaacttctgaggcactgctggattaccagtgccagattaaagaggacgcggtggaacagttcatgtttcagatcaagacattgcggaagaagaaccagaagtaccatgaaaggaactccaggctgaaagaggagcagatctggcacattcgccacttgctcaaggagctgagtgaggaaaaggcagaaggcctccccgtggtaacacgtgaagatgtggaagaggccatgaaagagaagtggaagttcgaacgggaccaggagaagaatctgagagatatgaggatgcagatttctaatgccgagaagctttttcttgaaaaactttctgaaaaggaatactgggaggaatacaagaacgtggggagtgagaggcacgctaaactgatcacttctctgcagaacgatatcaacaccgtgaaggaaaacgcagagaagatgtcagaacattataagataacattggaagatacacggaagaaaatcataaaagaaacactgttacagctcgatcagaagaaagagtgggccactcagaatgcagtcaagttaattgacaagggcagctacctcgaaatttgggagaatgactggctcaagaaggaggtagcaatccacagaaaggaggtcgaggagttgaagaacgcaatacatgaacttgaggcagagaatctggttctgatagaccagcttagtaactgtagactggttgatctgaaaattcccagatatccagttctccactcatgcccaacgagtaatcctcggcacctgctgttgctccctctggagtcgtgtctgatatctgctcgacggtgctggagactgtacctcactcaggccgctgggcttgaagttcccccagaagagatgtctctcgagctccctgagactcacatcgaagaaaagagcgaactacagccaaccgaagtcgagtctcgcgatctaatgagtagctccgatgagtcaactatactccatctttcccatgagaactctatagaagacctccagtatgtcaagatcgataaggaagagaattcaggcacagaatttggcgataccgatatgaaatatctgctgtacgaggacgagaaagacttcaaagattatgtgaacctgggtcccctcggcgtgaagctgatgagtgttgaatccaaaaagatgcctatccactttcaggagaaggagattccagtaaagctgtacaaagatgtgagatcaccagagtctcacattacctacaagatgatgaagtcattcctttag

SEQ ID NO: 341964 - protein, 313 aa, Artificial Sequence
  derived and/or modified sequence
MFQIKTLRKKNQKYHERNSRLKEEQIWHIRHLLKELSEEKAEGLPVVTREDVEEAMKEKWKFERDQEKNLREHYKITLEDTRKKIIKETLLQLDQKKEWATQNAVKLIDKGSYLEIWENDWLKKEVAIHRKEVEELKNAIHELEAENLVLIDQLSNCRLVDLKIPRRLYLTQAAGLEVPPEEMSLELPETHIEKSELQPTEVESRDLMSSSDESTILHLSHENSIEDLQYVKIDKEENSGTEFGDTDMKYLLYEDEKDFKDYVNLGPLGVKLMSVESKKMPIHFQEKEIPVKLYKDVRSPESHITYKMMKSFL

SEQ ID NO: 341965 - DNA, 942 bp, Artificial Sequence
  derived and/or modified sequence
atgttccagatcaagaccctgagaaagaagaaccagaagtaccacgagagaaacagcagactgaaggaggagcagatctggcacatcagacacctgctgaaggagctgagcgaggagaaggccgagggcctgcccgtggtgaccagagaggacgtggaggaggccatgaaggagaagtggaagttcgagagagaccaggagaagaacctgagagagcactacaagatcaccctggaggacaccagaaagaagatcatcaaggagaccctgctgcagctggaccagaagaaggagtgggccacccagaacgccgtgaagctgatcgacaagggcagctacctggagatctgggagaacgactggctgaagaaggaggtggccatccacagaaaggaggtggaggagctgaagaacgccatccacgagctggaggccgagaacctggtgctgatcgaccagctgagcaactgcagactggtggacctgaagatccccagaagactgtacctgacccaggccgccggcctggaggtgccccccgaggagatgagcctggagctgcccgagacccacatcgagaagagcgagctgcagcccaccgaggtggagagcagagacctgatgagcagcagcgacgagagcaccatcctgcacctgagccacgagaacagcatcgaggacctgcagtacgtgaagatcgacaaggaggagaacagcggcaccgagttcggcgacaccgacatgaagtacctgctgtacgaggacgagaaggacttcaaggactacgtgaacctgggccccctgggcgtgaagctgatgagcgtggagagcaagaagatgcccatccacttccaggagaaggagatccccgtgaagctgtacaaggacgtgagaagccccgagagccacatcacctacaagatgatgaagagcttcctgtag

SEQ ID NO: 341966 - DNA, 2081 bp, Artificial Sequence
  derived and/or modified sequence
aaatgcagggcgcagcagccgctgcagtggagccggtaggcctggccggcgggctgaaaggaagtgcgagctgtccgcccagggccgggtatccgcccctgcaggctgtggaggggatgtcaggagactggctggcctcttttcttggcccccgactccttccagtctgacactgaagactttataagcttccccccgaccaccctccacgggctccactctccacgggcctgggcttgcgccgcttcgagatcagcctgggggtcgcgccctcctggtcttgtccacgaagcgccgttcttgggccgttaggagctgctgggaagggctctgataggcccactcctcttctccacccaggagatgagaaggagggcaggcctttttaatctgatcagaatgttaacccatctctccgccttgcggtagaacccctggatacattatttgccctctcgaaaggcaggctctgaatttgattcaggtatatttcttcatagctaaccagcacaatggaaaactcagggaaagcaaataaaaaggatacacatgacgggccaccaaaagaaattaaactgcctaccagtgaagcacttctagactatcaatgtcaaataaaggaagatgccgtggagcaattcatgtttcaaataaagacacttaggaaaaagaaccaaaaatatcatgaaagaaatagccgcttaaaagaagaacagatttggcacatacggcatctactaaaggaactgagtgaagagaaggcagagggattgccagttgtaacaagagaggatgttgaagaagcgatgaaggaaaaatggaagtttgaaagagaccaggaaaaaaacttgagagaacactataaaatcactctggaagatactagaaagaaaataatcaaggaaactttgttgcaactggaccaaaagaaggaatgggccacacagaatgctgtaaagctcattgacaagggcagttatctagagatctgggagaatgactggctcaaaaaagaggttgcaattcacaggaaggaagttgaagaattaaaaaatgctattcatgaactggaagcagaaaatttggtgcttattgatcaactatccaactgtagacttgtggatctcaagatacccaggcgactatatcttacccaagctgctggactagaagtgccacctgaagaaatgtctttggaattgccagaaacacatatagagaagtcagaattgcaacccacagaagtagaaagtagagacttgatgtcctcatcagatgagagcactatcttacatcttagtcatgaaaatagcatcgaagatctccagtatgtgaagatagataaagaggaaaactcaggcacagagtttggggacactgatatgaagtacttactatatgaggatgagaaggatttcaaggattatgtaaacttgggccccctgggagtgaagcttatgagtgtggagagcaagaaaatgcccattcattttcaagagaaggaaattccagtcaaactctataaagatgtcaggagcccagaaagccacatcacatataagatgatgaagtcttttctctaagacggaaagctgcaaaggaaacacaacttttccttataaatgttctttgggaactgaagtatatccgttgcccattttacttacactttggctcatttttaaaccagctgttatttctaaaggtcatatttacatttaaaatcaaaggtattcagctattcatttacttgcatggtatgagtgaccaaaacggaagcacgctttgtatttctacactgaagtattcagaagcatgacagtgggttcaaggtagtctctgaggttccttttcacacacaaaaaattcactgattaatctgtgattccagtatgaaatagttccattagaaatgtttctaagaaaaacttagaagtttgcatagcattgtctacacatctttccctctgaggatgctcaatgtgatagacagccagtctataatgcaagccaattctccgtagtttaaccctgtgtattagtctgttctcatgctgctaataaagacataattgaaactg

SEQ ID NO: 341967 - DNA, 942 bp, Artificial Sequence
  derived and/or modified sequence
atgttccagataaagaccctccgcaagaaaaaccagaaatatcatgaaaggaattcaagattgaaagaagagcaaatttggcacatacgccatctgctcaaggaactcagcgaggagaaggctgaaggactccccgtggtgactagggaagatgtggaagaggccatgaaggagaaatggaagttcgagagggaccaagagaagaacttgagggagcattacaaaataacgttggaggatactcgaaagaagataattaaggagacgcttctgcagcttgaccaaaaaaaggagtgggcaacccaaaacgccgtgaaactgatcgataaaggcagctatctggaaatatgggaaaatgattggctaaagaaagaggtagccatacataggaaagaagtggaggagctcaagaatgcaattcacgagttggaggctgagaacctagtgctgattgaccagctctccaattgtaggctggtggatctaaagatcccaagacggctctacttgacgcaggctgcgggtctcgaggtgccacctgaggagatgtccctcgagctgcccgaaactcacatcgaaaagtccgaacttcagcccacggaagttgagagtagggatttgatgagctcctctgacgagtccacaattctacacctgtctcatgaaaattccatcgaggatctgcagtacgtgaaaatcgataaggaggagaattccggcacagaattcggagataccgacatgaaatacttattatatgaggacgagaaggactttaaagactacgtgaacctggggccactgggcgtcaaactgatgtccgtagagagtaagaagatgccaatccattttcaagaaaaagagattccggttaaactatataaggatgtgcggtctcctgagtcacatatcacctacaagatgatgaaaagttttctttag

SEQ ID NO: 341968 - DNA, 942 bp, Artificial Sequence
  derived and/or modified sequence
atgttccagatcaagaccctgaggaagaagaaccagaagtaccatgaaagaaacagccggctgaaggaggagcagatctggcacatccgccacctgctgaaggagctgtctgaggagaaggccgagggcctgcctgtggtgacccgggaggatgtggaggaggccatgaaggagaagtggaagtttgagcgggaccaggagaagaacctgcgggagcactacaagatcaccctggaggacaccaggaagaagatcatcaaggagaccctgctgcagctggaccagaagaaggagtgggccacccagaatgctgtgaagctgattgacaagggcagctacctggagatctgggagaatgactggctgaagaaggaggtggccatccacaggaaggaggtggaggagctgaagaatgccatccacgagctggaggccgagaacctggtgctgattgaccagctgagcaactgccgcctggtggacctgaagatcccccggcggctgtacctgacccaggccgccggcctggaggtgcccccagaggagatgagcctggagctgcctgagacccacatcgagaagtctgagctgcagcccacagaggtggagagccgggacctgatgagcagcagtgatgagagcaccatcctgcacctgagccatgagaacagcattgaggacctgcagtatgtgaagattgacaaggaggagaacagcggcacagaatttggagacacagacatgaagtacctgctgtatgaagatgagaaggacttcaaggactatgtgaacctgggccccctgggcgtgaagctgatgtctgtggagagcaagaagatgcccatccacttccaggagaaggagatccctgtgaagctgtacaaggatgtgcgcagccctgagagccacatcacctacaagatgatgaagagcttcctgtag

SEQ ID NO: 341969 - DNA, 942 bp, Artificial Sequence
  derived and/or modified sequence
atgttccagatcaagaccctgcggaagaagaaccagaagtaccacgaacggaatagcaggctgaaagaggaacaaatctggcacattcgtcatcttctgaaggaattgtcggaagagaaggccgaaggcctgcccgtagtcacccgcgaggacgtggaggaggccatgaaagaaaaatggaagtttgaacgtgatcaggagaaaaacctgagagaacactacaagattaccctggaagacacccgtaagaaaattatcaaggagacattacttcaacttgatcagaaaaaagaatgggccactcagaatgctgtgaaactgatagataagggaagctacttggagatctgggagaacgactggctgaagaaggaagttgccatccatagaaaggaagtggaagagctgaaaaatgccatccacgagcttgaagctgagaacttagtgcttattgatcagttgtcaaattgccggcttgtcgatcttaagattccacggaggctctacctaacacaggctgccggcctggaagtgccccctgaggaaatgtcattggaactgcctgagactcatatcgaaaagagtgagctgcagccaaccgaggtagaaagtagagacctcatgtcctcgtctgatgagtctacaattctgcacctgagccacgagaactccatcgaggacctgcagtacgtcaaaattgacaaagaggagaactcaggcactgagttcggcgacaccgatatgaaatatcttctgtacgaagacgaaaaggattttaaggactacgttaacctgggaccactgggcgttaaactcatgtcagtcgaatcaaaaaagatgccaatccacttccaggagaaggaaatccctgtgaagctgtataaagatgttagaagtccagaatcgcacatcacgtacaaaatgatgaagtccttcctttag

SEQ ID NO: 341970 - DNA, 942 bp, Artificial Sequence
  derived and/or modified sequence
atgtttcaaataaaaactttgcgaaagaagaatcaaaagtatcacgaaaggaactcaaggctcaaggaggaacagatttggcatatacgtcacctcctcaaagagttgagtgaggagaaggcagaaggcctgcccgtggttactagggaagatgtggaggaagctatgaaggagaagtggaaatttgaacgagatcaggaaaaaaatctgagagagcattacaagatcacgcttgaggatacacggaaaaaaatcatcaaggaaacgctccttcagctggaccagaaaaaggaatgggccactcagaatgccgtgaagctgattgataaaggaagctatttggaaatatgggagaacgactggctaaaaaaggaagtagcaattcaccgtaaggaggtggaagaactaaagaatgccattcatgaactcgaggcggagaatcttgtcctaatagatcagctcagcaactgccgactcgttgaccttaaaatcccgagacgactgtacctcacccaggccgcaggcttagaggtgccaccagaggaaatgtccctcgagctgcctgaaacccacattgagaagtcagaattgcagccgaccgaggttgaatctcgcgacctgatgtccagctctgacgaaagtacaatcctgcatctcagccatgaaaacagcattgaagatttgcagtatgtgaagatcgacaaagaggaaaactccggtaccgaatttggggacacagacatgaagtacctattgtatgaagacgagaaagactttaaagactacgttaatctgggccctcttggcgtgaagctgatgagtgttgagtctaagaagatgccaatccatttccaggagaaagagattcccgtgaagttgtacaaagatgtaagatctcccgaatcccatatcacatacaagatgatgaagagctttctgtag

SEQ ID NO: 341971 - protein, 221 aa, Artificial Sequence
  derived and/or modified sequence
MAGSQDIFDAIVMADERFHGEGYREGYEEGSSLGVMEGRQHGTLHGAKIGSEIGCYQGFAFAWKCLLHSCTTEKDSRKMKVLESLIGMIQKFPYDDPTYDKLHEDLDKIRGKFKQTGLSPSAVMVRPPSYVELPVTCWCWEAPRCNQKCTDPAARRPDPQTCASQDRLRCAPCTCHQPLASRYTQHPGLVPLPHHDRQSVPQGPRVVQTDAAARMVEQQTM

SEQ ID NO: 341972 - DNA, 666 bp, Artificial Sequence
  derived and/or modified sequence
atggccgggtctcaagatatcttcgatgccattgtcatggctgacgaaaggtttcatggggagggttatagggaaggctacgaggaaggcagctcactgggagtgatggagggaaggcaacacggcacactccacggagcaaagatcggtagcgagatcggctgctaccagggatttgcattcgcttggaaatgcctactccacagctgtacaaccgaaaaagatagccgaaaaatgaaggttctggaatcgcttatcgggatgattcagaaattcccctatgacgaccctacctacgataaactccacgaagacctcgataaaatacgagggaaatttaagcaaacaggcctcagcccgagtgcagtgatggtgcgtcctccctcatacgtggagcttccagtaacctgctggtgctgggaagcaccacgctgcaatcagaagtgcacagatcctgcagctagacgtccagatcctcagacatgcgcatcccaagatcgcttaagatgcgccccctgtacatgccatcagcccttagcaagccggtacacccaacaccccggcctcgttccactcccccatcatgatagacagtcagtcccgcagggtcccagggtggtccagaccgacgctgcggcccgaatggttgagcagcaaacaatgtag

SEQ ID NO: 341973 - DNA, 666 bp, Artificial Sequence
  derived and/or modified sequence
atggccggcagccaggacatctttgatgccatcgtgatggctgatgagcgcttccatggagagggctaccgggagggctatgaggagggcagcagcctgggcgtgatggagggccggcagcacggcaccctgcatggagccaagattggcagcgagatcggctgctaccagggctttgcctttgcctggaagtgcctgctgcacagctgcaccacagagaaggacagcaggaagatgaaggtgctggagagcctcatcggcatgatccagaagttcccctatgatgaccccacctatgacaagctgcacgaggacctggacaagatccggggcaagttcaagcagacaggcctgagccccagcgctgtgatggtgcggcccccatcctatgtggagctgcctgtgacctgctggtgctgggaggccccccgctgcaaccagaagtgcacagatcctgctgcccggcggccagacccccagacctgtgccagccaggaccggctgcgctgtgccccctgcacctgccaccagcccctggccagccgctacacccagcaccctggcctggtgcccctgccccaccacgaccggcagagcgtgccccagggcccccgggtggtgcagacagatgctgctgccaggatggtggagcagcagaccatgtag

SEQ ID NO: 341974 - DNA, 666 bp, Artificial Sequence
  derived and/or modified sequence
atggccggcagccaggacatcttcgacgccatcgtgatggccgacgagcggtttcacggtgaggggtaccgggaagggtacgaggaagggagcagcttgggggttatggagggcagacagcatggtactctccacggagcgaagatcggatctgaaataggttgctaccagggatttgcattcgcctggaaatgcctgttacactcctgtactacagagaaagattcgagaaaaatgaaggtgctcgagagcctgatcggtatgatccagaagttcccctacgatgatccgacgtacgacaaactgcacgaagacctggacaaaattcgtggaaagtttaagcagacaggcctgtcaccctccgctgtaatggtgcgccctcccagctatgttgagctgccagttacttgctggtgttgggaggcaccacgatgtaatcagaagtgtacagaccctgcagcccggagacctgatccccagacctgcgcttctcaggaccgcctgcgatgcgcaccttgtacctgtcatcaaccactagcgtccaggtatacccagcatcccggcctggttcctctccctcatcatgaccggcagtccgtaccacaggggcccagagtagtgcagacagatgctgcagcccggatggtggagcaacagacaatgtag

SEQ ID NO: 341975 - DNA, 1000 bp, Artificial Sequence
  derived and/or modified sequence
tctcgtctcctcccaagcggagcatttgtgcctgaagctgccgggtctgctacggcaccgcggggctgcagaaacccgggggccaagggcgggctgcttgccgctatggctggcagtcaggacatattcgatgccatcgtgatggcggatgagaggtttcatggggaagggtatcgggaaggctatgaagaaggcagtagtttgggtgtgatggagggaaggcagcatggcacgctgcatggagccaaaatcgggtctgagatcgggtgctaccaaggttttgcttttgcatggaaatgtctactgcacagttgcaccactgagaaggacagcagaaagatgaaggtcttagaatcattgattggaatgatccagaaattcccttatgatgaccctacttacgataaactccatgaagacttagacaagatcagaggaaaatttaaacagacgggcctttcgccttccgccgtgatggtgaggcctcccagctacgtagaactgccggttacatgttggtgctgggaagcgccgcggtgcaaccagaaatgcacagacccagccgcccgccgcccagaccctcagacttgcgcgtcacaggacagactccgctgtgccccgtgcacttgccaccagcctttggcctctcgatacacacaacatccaggacttgtgcccttgccccatcacgacagacaaagcgtccctcaaggcccccgcgtggttcagacagacgccgcagccaggatggttgagcagcaaacaatgtgaaagagatacacagaagcgatgtgaatatttccaaaccgtgcctggaagtcaacggtagcagcgcaataagaaaatggagctgcggcctgtccccggtgtgggcaccgccccttcccctcgggagcctcctcctcacacctcctcccgcctgtcctccctcacacgtcagcctccacactcttgccacctcccttcaacacttcctaaataaaaattacaagaattacat

SEQ ID NO: 341976 - DNA, 666 bp, Artificial Sequence
  derived and/or modified sequence
atggccggtagccaggatatattcgacgccattgttatggccgacgagaggtttcacggcgagggttatcgcgagggatacgaagagggcagctcgctaggcgtgatggagggtcgccagcacgggacactccatggtgccaaaatcggaagcgagatcgggtgttaccagggcttcgcgttcgcttggaagtgtctgctgcattcttgcacaactgaaaaagactctaggaagatgaaggtccttgagtcactcattgggatgatccagaagttcccctacgatgaccctacttatgacaagctccacgaggacctggacaaaataagaggcaagtttaagcagaccggcctgtcccctagtgcagtgatggtcagacctccaagctacgtggaactcccggtgacctgctggtgctgggaggccccaagatgcaatcagaaatgtacagatcctgcagctcgccgacccgatccacaaacgtgcgccagccaggacagactccgttgcgctccctgcacctgtcatcaaccacttgccagtcggtatacccagcacccgggactcgtgccccttccgcatcacgatagacaatccgtcccccaggggccacgagtcgtccagacagacgcggcagcacgcatggtcgaacaacagacgatgtag

SEQ ID NO: 341977 - DNA, 666 bp, Artificial Sequence
  derived and/or modified sequence
atggccggcagccaggacatcttcgacgccatcgtgatggccgacgagagattccacggcgagggctacagagagggctacgaggagggcagcagcctgggcgtgatggagggcagacagcacggcaccctgcacggcgccaagatcggcagcgagatcggctgctaccagggcttcgccttcgcctggaagtgcctgctgcacagctgcaccaccgagaaggacagcagaaagatgaaggtgctggagagcctgatcggcatgatccagaagttcccctacgacgaccccacctacgacaagctgcacgaggacctggacaagatcagaggcaagttcaagcagaccggcctgagccccagcgccgtgatggtgagaccccccagctacgtggagctgcccgtgacctgctggtgctgggaggcccccagatgcaaccagaagtgcaccgaccccgccgccagaagacccgacccccagacctgcgccagccaggacagactgagatgcgccccctgcacctgccaccagcccctggccagcagatacacccagcaccccggcctggtgcccctgccccaccacgacagacagagcgtgccccagggccccagagtggtgcagaccgacgccgccgccagaatggtggagcagcagaccatgtag

SEQ ID NO: 341978 - DNA, 735 bp, Artificial Sequence
  derived and/or modified sequence
atggatacagaatcaaatcgcagagccaatctggccctaccccaagaaccttcttccgtgcccgccttcgaagtgctcgagatcagcccccaggaagtgagttctggccgattgctgaagagcgctagtagccctccgcttcacacatggctaaccgtgttgaagaaagaacaggaattcttgggggtgactcaaatactgacagcaatgatctgcctgtgttttggcaccgtggtgtgctctgtactggacatctcccacatcgagggggatatcttttcatccttcaaggctggctacccgttctggggcgccatattctttagcatatctgggatgttgtctatcatcagcgaacgtcggaacgccacctacctcgtccggggcagtctgggagccaacacagccagttcaatcgctgggggtaccggtatcaccattttgatcattaacctaaaaaagtccctggcctacattcacatacattcttgtcagaaattcttcgaaaccaagtgcttcatggccagtttctcgacggagatcgtggttatgatgttgtttctaaccatccttgggctcggctctgcggtttcactgacaatatgcggagctggggaagaattgaaagggaacaaagttccggaggatagggtatatgaagagctcaacatctatagcgccacctattctgagctggaggatccaggggagatgtcccctcctatcgatctgtag

SEQ ID NO: 341979 - DNA, 735 bp, Artificial Sequence
  derived and/or modified sequence
atggacacagagagcaacagaagagccaacctggccctgccccaggagcccagctctgtgcctgcctttgaggtgctggagatcagcccccaggaggtgagcagcggccgcctgctgaagagcgccagcagcccccccctgcacacctggctgactgtgctgaagaaggagcaggagttcctgggcgtgacccagatcctgacagccatgatctgcctgtgctttggaacagtggtgtgcagcgtgctggacatcagccacatcgagggggacatcttcagcagcttcaaggccggctaccccttctggggcgccatcttcttcagcatcagcggcatgctgagcatcatcagcgagaggagaaatgccacctacctggtgcggggcagcctgggcgccaacacagccagcagcattgctgggggcaccggcatcaccatcctgatcatcaacctgaagaagagcctggcctacatccacatccacagctgccagaagttctttgagaccaagtgcttcatggccagcttcagcacagaaattgtggtgatgatgctgttcctgaccatcctgggcctgggcagcgctgtgtccctgaccatctgtggggccggggaggagctgaagggcaacaaggtgcctgaagatagagtgtatgaggagctgaacatctacagcgccacctacagcgagctggaggaccctggagagatgagcccccccatcgacctgtag

SEQ ID NO: 341980 - DNA, 735 bp, Artificial Sequence
  derived and/or modified sequence
atggacaccgagagcaaccggcgggccaacctggccctgccccaggagccgtccagtgtccctgcctttgaggttctcgaaatcagcccacaagaagtgagtagcggaaggctcttgaagagtgcttcttcacctcctttacacacctggctgacagtgctaaagaaggagcaggagttcttaggggttacacaaatactaaccgccatgatttgtttgtgtttcggaacggtagtgtgctcagtgttagatatcagtcacatcgagggagacatcttcagcagttttaaggccggctacccgttttggggagctatcttcttctctatctctggaatgttaagtattatctcagagagaagaaacgctacatatctggtccgtggctctttgggggccaacaccgcatccagtattgctggaggaacgggcatcactatacttattattaaccttaagaaatccttagcatacattcatatacactcctgtcagaaatttttcgagacaaagtgctttatggcatcttttagcacggagatcgtggtgatgatgttgttccttaccattttagggctgggaagtgctgtctcactcactatctgcggtgccggagaagaactgaaggggaacaaggtgcccgaagacagggtgtacgaggagctcaacatatacagcgccacctacagcgagctggaggaccccggagagatgtcaccccccattgacctgtag

SEQ ID NO: 341981 - DNA, 735 bp, Artificial Sequence
  derived and/or modified sequence
atggatacggagagtaatcggcgtgctaacttagccttgcctcaagaaccttcatcagtccctgcttttgaagtgctggagattagtcctcaggaagtgtcttctggtcgcctgttaaaatctgcctcctccccacctcttcacacctggctgacggtgctgaagaaagagcaggaatttcttggagtaacacagattcttacagcaatgatctgtctctgttttggtaccgtggtttgcagcgtcctggatataagtcacatcgagggcgacatttttagctctttcaaggctggatatcccttttggggcgctatcttcttttctatctcaggcatgctgtcgatcatcagtgagagacgaaatgcaacatacctggttcgtggcagcttaggggctaacactgcttccagtatagcaggcggtaccgggatcaccatactgattattaacctgaagaaatccttagcttatatccacatccacagttgccagaagttcttcgagaccaagtgctttatggccagcttcagcaccgagatcgtcgtgatgatgctcttccttacaattctaggactcggttccgccgtcagcctgacaatttgtggtgccggtgaggaacttaagggcaataaggtgcccgaagatagagtgtatgaagagctgaacatatatagcgccacgtacagcgagctggaggaccccggagaaatgtcaccccctattgatctctag

SEQ ID NO: 341982 - DNA, 735 bp, Artificial Sequence
  derived and/or modified sequence
atggacaccgagagcaacagaagagccaacctggccctgccccaggagcccagcagcgtgcccgccttcgaggtgctggagatcagcccccaggaggtgagcagcggcagactgctgaagagcgccagcagcccccccctgcacacctggctgaccgtgctgaagaaggagcaggagttcctgggcgtgacccagatcctgaccgccatgatctgcctgtgcttcggcaccgtggtgtgcagcgtgctggacatcagccacatcgagggcgacatcttcagcagcttcaaggccggctaccccttctggggcgccatcttcttcagcatcagcggcatgctgagcatcatcagcgagagaagaaacgccacctacctggtgagaggcagcctgggcgccaacaccgccagcagcatcgccggcggcaccggcatcaccatcctgatcatcaacctgaagaagagcctggcctacatccacatccacagctgccagaagttcttcgagaccaagtgcttcatggccagcttcagcaccgagatcgtggtgatgatgctgttcctgaccatcctgggcctgggcagcgccgtgagcctgaccatctgcggcgccggcgaggagctgaagggcaacaaggtgcccgaggacagagtgtacgaggagctgaacatctacagcgccacctacagcgagctggaggaccccggcgagatgagcccccccatcgacctgtag

SEQ ID NO: 341983 - protein, 330 aa, Artificial Sequence
  derived and/or modified sequence
MALTHRITLANIHLAYAPTSCSPTQHTEAFVVFYFPLTHCGTTMQVAGDQLIYENWLVSGIHIQKGPQGSITRDSTFQLHVRCVFNASDFLPIQASIFPPPSPAPMTQPGPLRLELRIAKDETFSSYYGEDDYPIVRLLREPVHVEVRLLQRTDPNLVLLLHQCWGAPSANPFQQPQWPILSDGCPFKGDSYRTQMVALDGATPFQSHYQRFTVATFALLDSGSQRALRGLVYLFCSTSACHTSGLETCSTACSTGTTRQRRSSGHRNDTARPQDIVSSPGPVGFEDSYGQEPTLGPTDSNGNSSLRPLLWAVLLLPAVALVLGFGVFVA

SEQ ID NO: 341984 - DNA, 993 bp, Artificial Sequence
  derived and/or modified sequence
atggccctgacccacagaatcaccctggccaacatccacctggcctacgcccccaccagctgcagccccacccagcacaccgaggccttcgtggtgttctacttccccctgacccactgcggcaccaccatgcaggtggccggcgaccagctgatctacgagaactggctggtgagcggcatccacatccagaagggcccccagggcagcatcaccagagacagcaccttccagctgcacgtgagatgcgtgttcaacgccagcgacttcctgcccatccaggccagcatcttccccccccccagccccgcccccatgacccagcccggccccctgagactggagctgagaatcgccaaggacgagaccttcagcagctactacggcgaggacgactaccccatcgtgagactgctgagagagcccgtgcacgtggaggtgagactgctgcagagaaccgaccccaacctggtgctgctgctgcaccagtgctggggcgcccccagcgccaaccccttccagcagccccagtggcccatcctgagcgacggctgccccttcaagggcgacagctacagaacccagatggtggccctggacggcgccacccccttccagagccactaccagagattcaccgtggccaccttcgccctgctggacagcggcagccagagagccctgagaggcctggtgtacctgttctgcagcaccagcgcctgccacaccagcggcctggagacctgcagcaccgcctgcagcaccggcaccaccagacagagaagaagcagcggccacagaaacgacaccgccagaccccaggacatcgtgagcagccccggccccgtgggcttcgaggacagctacggccaggagcccaccctgggccccaccgacagcaacggcaacagcagcctgagacccctgctgtgggccgtgctgctgctgcccgccgtggccctggtgctgggcttcggcgtgttcgtggcctag

SEQ ID NO: 341985 - DNA, 993 bp, Artificial Sequence
  derived and/or modified sequence
atggcccttacacacagaattactctggctaacattcacctggcgtacgcccccacttcttgctcccccactcagcacactgaggccttcgtggttttctacttcccactcacacactgtggcaccacaatgcaggtggctggcgaccagttgatttacgaaaactggctcgtcagcgggatccatattcagaaaggccctcagggatctattactagagacagcacatttcagctacacgtgcggtgtgtgttcaatgcgtctgattttctccccatccaagccagcatcttccctccgccaagccccgcccctatgacccagcctggccctctgcggttggagctgcgtatcgctaaggacgagacatttagcagctattacggagaagatgactatcccattgtacggctgctgcgggaacccgtccatgtggaagttcgccttcttcagagaaccgacccaaatctggtgctgcttctgcatcagtgctggggcgcgccaagcgcaaatcccttccagcaaccgcagtggcccatcctgtcagacggctgccctttcaaaggggattcatatcgcactcaaatggtggccttggacggagccacccccttccagtcccactatcagcggtttacagtggctacctttgctctgctggattcagggagccaacgcgctctgcggggcttggtgtacttattttgttctaccagcgcctgccacacgtcagggctggagacctgttctactgcctgctcaacagggacaactagacagaggcgatccagcggtcaccggaatgacaccgctcgcccgcaggatatcgtatcctcacccggcccagtggggtttgaggactcgtacggccaggagccaaccttaggtcctacggacagcaatggcaactccagcctgagaccactgctttgggccgtgctcctgctgcccgcggtcgctctagtgctgggatttggcgtgtttgtagcctag

SEQ ID NO: 341986 - DNA, 993 bp, Artificial Sequence
  derived and/or modified sequence
atggccctgacccaccgcatcaccctggccaacatccacctggcctatgcccccaccagctgcagccccacccagcacacagaggcctttgtggtgttctacttccccctgacccactgcggcaccaccatgcaggtggccggggaccagctgatctatgagaactggctggtgtctggcatccacatccagaagggcccccagggcagcatcacccgggacagcaccttccagctgcacgtgcgctgtgtgttcaatgccagtgacttcctgcccatccaggccagcatcttccccccacccagccctgcccccatgacccagcccggccccctgcggctggagctgcgcatcgccaaggatgagaccttcagcagctactacggggaggatgactaccccatcgtgcggctgctgcgggagcctgtgcacgtggaggtgcggctgctgcagaggacagaccccaacctggtgctgctgctgcaccagtgctggggcgcccccagcgccaaccccttccagcagccccagtggcccatcctgagtgatggctgccccttcaagggggacagctaccgcacccagatggtggccctggatggagccacccccttccagagccactaccagcgcttcaccgtggccacctttgccctgctggacagcggcagccagagggccctgcggggcctggtgtacctgttctgcagcaccagcgcctgccacaccagcggcctggagacctgcagcacagcctgcagcacaggcaccacccggcagaggaggagcagcggccacagaaatgacacagcccggccccaggacatcgtgagcagccctggccctgtgggctttgaggacagctatggccaggagcccaccctgggccccacagacagcaatggaaacagcagcctgcggcccctgctgtgggccgtgctgctgctgcctgctgtggccctggtgctgggctttggagtgtttgtggcctag

SEQ ID NO: 341987 - DNA, 993 bp, Artificial Sequence
  derived and/or modified sequence
atggccctgacccaccggatcaccctggccaacatccacctggcctacgccccaacatcatgcagtccaacacagcatactgaagcctttgtcgttttctattttcctctgacacactgtgggacaactatgcaggttgctggagaccagctcatatacgaaaattggttggtgagcggtatacacatccagaaaggcccacagggctctattactcgagacagcacattccagctccatgtcagatgtgtatttaacgcgtcggattttctaccaattcaagcgagcatttttccaccaccttcccccgcccctatgactcaaccgggcccattgcggctggaactgagaattgccaaagacgagactttttctagctattatggcgaggacgactaccctattgttcggctgctccgtgagcccgtgcacgtagaggtcagacttcttcagcggacagatcctaatctagtgctgttgctgcatcaatgctggggtgctccaagcgctaatccatttcagcagcctcaatggcctattttgtcggatggatgccccttcaagggagactcttatagaacgcagatggtagccctggacggggccacccccttccagtctcactatcaacggttcaccgtcgccaccttcgcactgttggacagcggcagccaacgggcactacgggggctcgtgtacctgttctgctctacatcagcctgccatactagtggcctggagacgtgctccacagcttgctcaaccgggacaacgagacagagacggtcttctggccataggaacgataccgctcggcctcaagatattgtttcatcccctgggccagtaggctttgaagattcctacgggcaggagccgactcttggccccacggattcaaatgggaactcctcactgaggcctcttctctgggctgttctcttgctgcctgctgtggctctggtgctgggattcggcgtattcgtcgcatag

SEQ ID NO: 341988 - DNA, 993 bp, Artificial Sequence
  derived and/or modified sequence
atggcgttgacacataggatcaccctggctaacattcacctggcctacgctcccacttcgtgtagccccacccagcatacagaagcttttgtggtattttatttccccctcactcattgtggcaccaccatgcaggtggctggtgatcaacttatttatgagaactggcttgtctccggtatccacattcagaagggaccccaaggatctatcacaagagactccacttttcaattgcacgttcgatgtgtgttcaatgcaagtgattttctacccatccaggccagcatatttcccccaccaagtccggcaccgatgacgcagcccggtcctcttaggctagagctccggattgcgaaggatgagacattctcaagctactacggtgaggacgattatcccattgtgcgactgctcagagaaccagttcatgtagaggtgaggctgctgcagcgaacagatcccaacttagtgctattgctgcaccagtgctggggcgctcctagcgcaaacccgttccagcaaccccaatggccaatcctgagcgacggttgcccctttaagggcgactcataccggactcagatggtggcccttgacggagccacaccttttcaaagtcactatcagcggttcacggtggccacatttgcattactggatagcggatcccaacgcgctttacggggacttgtttatctgttctgtagtacgtccgcttgccatacctccgggctcgaaacttgtagtactgcatgcagcaccgggactaccaggcagagaaggtcaagcggacaccggaacgatactgcaaggccccaggatatcgtcagcagtcctggacctgtggggtttgaggactcttatggtcaagagccgaccttgggccctactgactcaaacgggaactccagcttacggcctcttttgtgggcagttctcctgctgccagcggtcgccctggtactcgggttcggggtattcgtcgcatag

SEQ ID NO: 341989 - DNA, 915 bp, Artificial Sequence
  derived and/or modified sequence
atgccccggagccctacgagttcagaagacgaaatggcccagagctttagtgattattccgttggatctgagagcgactcatccaaggaagaaaccatctacgacactatacgggccactgctgagaagccagggggcgcaagaacagaagaatcgcagggcaacaccctagttatccgggtagtaatccatgacctgcagcagaccaaatgtattaggttcaatcccgacgccaccgtctgggtcgcaaagcagcggattctgtgtactttgacgcagtctctcaaggatgtcctcaactacggccttttccagcccgcatcaaacgggcgggacggcaaattcctggatgaagagcgcttgctgagggagtacccccagcccgttggcgagggcgtccccagcttagaatttcgctataaaaagcgggtgtataaacaggcttcgctcgatgagaagcaactggctaagttacacactaaaactaatttaaagaagtgcatggaccacatccagcatcgcctggtggaaaaaattacaaaaatgctggaccggggcctggacccaaatttccacgaccccgagacaggcgaaacccccttgaccttggcagcccagctggacgactccgtagaagtcattaaggctcttaagaatggaggtgcacatctggatttcagggccaaagatggaatgaccgccctgcacaaggctgccagagccaggaatcaagtagccctgaagacgctgctggagcttggggccagtcccgactataaagactcgtacggcctaactcctttgtaccataccgcgattgtcgggggcgacccctattgttgcgaacttctgttgcatgaacacgccaccgtctgctgtaaagatgaaaatggatggcacgaaattcaccaatag

SEQ ID NO: 341990 - DNA, 915 bp, Artificial Sequence
  derived and/or modified sequence
atgcccaggagccccaccagcagtgaagatgagatggcccagagcttcagtgactacagcgtgggcagcgagagtgacagcagcaaggaggagaccatctatgacaccatccgggccacagctgagaagccaggaggagccaggacagaggagagccagggcaacaccctggtgatccgggtggtgattcatgacctgcagcagaccaagtgcatccgcttcaacccagatgccaccgtgtgggtggccaagcagaggatcctgtgcaccctgacccagagcctgaaggatgtgctgaactacggcctcttccagcctgccagcaatggaagagatggcaagttcctggatgaggagcggctgctgcgggagtacccccagcctgtgggggagggcgtgcccagcctggagttccgctacaagaagagggtgtacaagcaggccagcctggatgagaagcagctggccaagctgcacaccaagaccaacctgaagaagtgcatggaccacatccagcaccggctggtggagaagatcaccaagatgctggaccggggcctggaccccaacttccatgaccctgagaccggggagacccccctgaccctggccgcccagctggatgacagcgtggaggtgatcaaggccctgaagaatggaggagcccacctggacttccgggccaaggatggcatgacagccctgcacaaggccgcccgggccaggaaccaggtggccctgaagaccctgctggagctgggcgccagcccagactacaaggacagctatggcctgacccccctgtaccacacagccatcgtgggcggggacccctactgctgtgagctgctgctgcacgagcacgccaccgtgtgctgcaaggatgaaaatggctggcatgagatccaccagtag

SEQ ID NO: 341991 - DNA, 915 bp, Artificial Sequence
  derived and/or modified sequence
atgccccggagccccaccagcagcgaggacgagatggcccagagctttagcgactactctgtgggaagcgagtcggacagctcaaaagaggaaaccatctacgatacaatcagagctaccgccgagaagcccgggggggccaggactgaggaatctcagggtaacaccctggttattcgagttgtgattcacgacttgcagcagaccaaatgcatccgcttcaaccctgacgcaaccgtttgggtcgcgaagcaacggattctgtgtaccctgacccagagcctgaaggacgtgctgaactatggacttttccagccagcgagtaacggcagggatggtaaatttctcgacgaggagcgtctgctgcgggaataccctcagccagtcggggaaggcgtgccctctctggagtttagatacaagaaaagagtctacaaacaagccagtttggatgaaaagcagctcgccaaactgcatacaaagactaacctgaagaagtgtatggatcatatacagcatcgtctagtggaaaaaatcaccaaaatgctggacagaggactggaccccaattttcatgatcctgaaaccggagaaacccccctgacattggcagcgcagctggacgacagtgtggaggtgattaaggctctgaagaatggcggagcgcacttggactttagggcgaaagacggaatgactgctctccacaaggcagcccgggcgcgaaatcaagtagcccttaagacactccttgagctgggtgcatctcccgactacaaggactcttacggccttacccccttatatcacaccgccattgtaggcggggacccctattgttgcgagctgcttctccatgaacatgcgacagtgtgttgcaaagatgagaacggatggcacgagatccaccagtag

SEQ ID NO: 341992 - DNA, 915 bp, Artificial Sequence
  derived and/or modified sequence
atgccacgtagcccgacctcttctgaggatgagatggcccagagcttcagtgattattctgtgggatccgaatctgacagttccaaagaggaaacgatttatgatacaattcgggctactgctgagaagcctggtggtgccaggaccgaagagagccagggcaacacactcgtcatccgggtcgtgatccatgacctccaacagactaaatgcatcaggttcaatccggacgcaactgtgtgggtggcaaagcagcgaatcctctgcaccctcacccagagcctaaaagacgttttgaactatggccttttccagccggcttctaacggcagggatggcaaatttctcgacgaggaacgactgcttcgcgagtaccctcagcctgtgggagaaggtgtgcccagtctggagtttagatataagaaaagggtgtacaaacaagcttctctggacgagaaacaactcgccaaattgcacactaaaacgaatctgaaaaagtgtatggaccatatccagcaccgactggttgaaaagattacaaagatgctcgacagggggcttgacccgaactttcacgatcctgagaccggtgaaacaccactcactttggccgcacagttggacgactcagtggaagtgatcaaggccctaaagaatgggggagcccacctcgacttcagagctaaggacggcatgactgctttacacaaggcggcacgggcacgtaatcaggtggctcttaagactctgctggagctgggagcctcacccgattataaagatagctacggcctgactccactctaccatactgccattgtgggcggtgatccctattgttgcgaactgctgctacatgagcacgctaccgtctgttgtaaagatgaaaatggatggcacgaaattcaccaatag

SEQ ID NO: 341993 - DNA, 912 bp, Artificial Sequence
  derived and/or modified sequence
atgccgcgcagcccaacatccagcgaggacgagatggcccagagcttctccgactactccgtggggtcggagtcagacagctccaaagaagagaccatctatgacacgatccgggccactgcggagaagccgggcggtgccaggacggaggagagccagggcaacacgctggtgatccgcgtggtcatccatgacctgcagcagacgaaatgcattcgatttaacccggatgccacagtgtgggttgcaaagcagcggatcctgtgtacattaacccagagtttgaaagatgtcctgaactacggcctgttccagccggccagcaatgggcgtgacggcaagttcctggatgaggagcggctcctgcgcgagtacccacagcccgtgggtgagggcgttccttccctggagtttcgatacaagaagcgggtgtataaacaagccagtctcgatgagaaacagttggccaagctccacacgaagaccaatctgaagaaatgcatggatcacattcagcatcgcttggtggagaagatcaccaagatgctggaccgaggcctggatcccaatttccacgacccggagaccggagagacccccctgaccttagccgctcagctggacgactctgtggaggtcatcaaagctctcaaaaatggtggagctcacctggacttccgtgccaaagatgggatgaccgccctacacaaagctgcccgagcgaggaaccaagttgccctgaagacccttttagagcttggtgcatccccagattataaagacagttacggcctcaccccgctgtatcacacagccatcgtcggaggtgatccctactgctgcgagcttctcctgcacgaacacgccactgtgtgctgcaaagatgagaacggctggcacgagatccaccag

SEQ ID NO: 341994 - DNA, 915 bp, Artificial Sequence
  derived and/or modified sequence
atgcccagaagccccaccagcagcgaggacgagatggcccagagcttcagcgactacagcgtgggcagcgagagcgacagcagcaaggaggagaccatctacgacaccatcagagccaccgccgagaagcccggcggcgccagaaccgaggagagccagggcaacaccctggtgatcagagtggtgatccacgacctgcagcagaccaagtgcatcagattcaaccccgacgccaccgtgtgggtggccaagcagagaatcctgtgcaccctgacccagagcctgaaggacgtgctgaactacggcctgttccagcccgccagcaacggcagagacggcaagttcctggacgaggagagactgctgagagagtacccccagcccgtgggcgagggcgtgcccagcctggagttcagatacaagaagagagtgtacaagcaggccagcctggacgagaagcagctggccaagctgcacaccaagaccaacctgaagaagtgcatggaccacatccagcacagactggtggagaagatcaccaagatgctggacagaggcctggaccccaacttccacgaccccgagaccggcgagacccccctgaccctggccgcccagctggacgacagcgtggaggtgatcaaggccctgaagaacggcggcgcccacctggacttcagagccaaggacggcatgaccgccctgcacaaggccgccagagccagaaaccaggtggccctgaagaccctgctggagctgggcgccagccccgactacaaggacagctacggcctgacccccctgtaccacaccgccatcgtgggcggcgacccctactgctgcgagctgctgctgcacgagcacgccaccgtgtgctgcaaggacgagaacggctggcacgagatccaccagtag

SEQ ID NO: 341995 - protein, 620 aa, Artificial Sequence
  derived and/or modified sequence
MKPAPRLTPVRPAAASPIVSGARRRRVRCRKCKACVQGECGVCHYCRDMKKFGGPGRMKQSCVLRQCLAPRLPHSVTCSLCGEVDQNEETQDFEKKLMECCICNEIVHPGCLQMDGEGLLNEELPNCWECPKCYQEDSSEKAQKRKMEESDEEAVQAKVLRPLRSCDEPLTPPPHSPTSMLQLIHDPVSPRGMVTRSSPGAGPSDHHSASRDERFKRRQLLRLQATERTMVREKENNPSGKKELSEVEKAKIRGSYLTVTLQRPTKELHGTSIVPKLQAITASSANLRHSPRVLVQHCPARTPQRGDEEGLGGEEEEEEEEEEEDDSAEEGGAARLNGRGSWAQDGDESWMQREVWMSVFRYLSRRELCECMRVCKTWYKWCCDKRLWTKIDLSRCKAIVPQALSGIIKRQPVSLDLSWTNISKKQLTWLVNRLPGLKDLLLAGCSWSAVSALSTSSCPLLRTLDLRWAVGIKDPQIRDLLTPPADKPGQDNRSKLRNMTDFRLAGLDITDATLRLIIRHMPLLSRLDLSHCSHLTDQSSNLLTAVGSSTRYSLTELNMAGCNKLTDQTLIYLRRIANVTLIDLRGCKQITRKACEHFISDLSINSLYCLSDEKLIQKIS

SEQ ID NO: 341996 - DNA, 1863 bp, Artificial Sequence
  derived and/or modified sequence
atgaagccagctcctaggctgacgcccgtgcgacctgcggcagcatcacccatcgtttccggagcccgaaggaggcgggttcggtgcaggaaatgtaaagcgtgcgtccagggcgaatgtggagtatgccattattgtagagacatgaagaagtttggggggcctggcaggatgaagcaaagctgcgttttaaggcagtgtttggctccccgcctcccgcattctgtgacctgctccctgtgtggagaagtagaccaaaatgaagagacccaggatttcgaaaaaaagctgatggagtgttgcatttgcaacgagatcgtgcacccaggttgtctgcaaatggacggtgagggcctgttgaatgaagaactccccaactgctgggagtgtccaaaatgctaccaagaagatagttcggaaaaagcacagaagcgtaagatggaggaatctgacgaggaggcggtccaagccaaggtgttgcgcccactgagatcttgtgatgaaccactcactccacccccacactcccctacctctatgctgcaactgatccatgaccccgtatcccctcgcggcatggtgactcgctcctcgccgggtgctggtccatcggaccaccattccgcttcccgggatgagcggttcaaacgccgccagctcctcagactgcaggccacggagcgaacaatggtgcgggagaaggagaacaacccatcaggaaaaaaggaactcagtgaagtggaaaaagctaagattaggggcagctacctgaccgtgactctccagcggcctacaaaagagctgcatgggacttccatcgtgcctaaacttcaggccataacagcctcctcagcgaatttaaggcattctccgagagtcctggttcagcactgtccagcacgcacgccgcagagaggagacgaggaaggactgggaggcgaagaagaagaagaagaagaggaggaagaggaagacgacagtgcagaagagggaggtgctgcaagattaaacgggcgtggatcatgggcacaggatggggacgaaagctggatgcagcgtgaggtgtggatgtcagtgttccggtacctgtcccgaagagagctgtgcgagtgcatgagagtgtgcaaaacatggtataagtggtgttgtgataagagactgtggacaaaaatcgaccttagcagatgcaaagcaatcgttccacaggccctttccggcattataaagagacagccggtgagccttgaccttagctggacgaacatctccaagaagcagctgacctggctggtgaaccgcctacctgggctcaaggatctcctgctcgccggctgttcctggtctgcggtctccgctctttccacatcctcttgtcccctgctccgcacccttgacctcaggtgggccgtgggtatcaaagaccctcaaatccgcgacctgctgactccccccgctgacaaacccggacaggataatagaagcaaactccgcaatatgacagactttcggctagcaggattggacattacagatgctacactcagactgatcatacggcacatgccactattatctcgtctggacctgagccattgtagccacctgacagatcagtctagcaatctgcttaccgctgtcggctcatccactcgatattctcttaccgaactgaatatggcaggatgcaataaactgaccgaccaaacccttatttatctacgccgcattgcaaacgtgacgctgattgatcttcgaggctgcaagcagatcacgcgtaaggcttgcgaacactttatcagcgatctttcgataaatagcttatattgtctctcggacgaaaagctcattcaaaaaatctcctag

SEQ ID NO: 341997 - DNA, 1863 bp, Artificial Sequence
  derived and/or modified sequence
atgaagccagccccccggctgacccctgtgcggcctgctgctgccagccccatcgtgtctggggccaggagaagaagagtgcgctgcaggaagtgcaaggcctgtgtgcagggagaatgtggggtgtgccactactgccgggacatgaagaagtttggaggccctggccgcatgaagcagagctgtgtgctgcggcagtgcctggccccccggctgccccacagcgtgacctgcagcctgtgtggggaggtggaccagaatgaggagacccaggactttgagaagaagctgatggagtgctgcatctgcaatgagatcgtgcaccctggctgcctgcagatggatggagagggcctgctgaatgaggagctgcccaactgctgggagtgccccaagtgctaccaggaggacagcagcgagaaggcccagaagaggaagatggaggagagtgatgaggaggccgtgcaggccaaggtgctgcggcccctgcggagctgtgatgagcccctgaccccaccaccccacagccccacctccatgctgcagctgattcatgaccctgtgagcccccggggcatggtgaccaggagcagccctggagctggccccagcgaccaccacagcgccagcagagatgagcgcttcaagaggcggcagctgctgcggctgcaggccacagagaggaccatggtgcgggagaaggagaacaaccccagcggcaagaaggagctgtctgaggtggagaaggccaagatccggggcagctacctgactgtgaccctgcagaggcccaccaaggagctgcacggcaccagcatcgtgcccaagctgcaggccatcacagccagcagcgccaacctgcggcacagcccccgggtgctggtgcagcactgcccagcccggaccccccagagaggagatgaggagggcctgggcggggaggaggaggaggaggaggaggaggaggaggaggatgattctgctgaggagggcggggccgcccggctgaatggccggggctcctgggcccaggatggagatgagagctggatgcagcgggaggtgtggatgtctgtgttccgctacctgagcagaagagagctgtgtgagtgcatgagggtgtgcaagacctggtacaagtggtgctgtgacaagaggctgtggaccaagattgacctgagccgctgcaaggccatcgtgccccaggccctgagcggcatcatcaagaggcagcctgtgtccctggacctgtcctggaccaacatcagcaagaagcagctgacctggctggtgaaccggctgcccggcctgaaggacctgctgctggccggctgctcctggagcgctgtgtctgccctgagcaccagcagctgccccctgctgcggaccctggacctgcgctgggccgtgggcatcaaggacccccagatccgggacctgctgaccccacctgctgacaagccaggccaggacaacagaagcaagctgaggaacatgacagacttccggctggccggcctggacatcacagatgccaccctgcggctcatcatccgccacatgcccctgctgagccggctggacctgagccactgcagccacctgacagaccagagcagcaacctgctgacagctgtgggcagcagcacccgctacagcctgacagagctgaacatggccggctgcaacaagctgacagaccagaccctcatctacctgcggcgcatcgccaacgtgaccctgattgacctgcggggctgcaagcagatcaccaggaaggcctgtgagcacttcatcagtgacctgagcatcaacagcctgtactgcctgagtgatgagaagctgatccagaagatctcctag

SEQ ID NO: 341998 - DNA, 1863 bp, Artificial Sequence
  derived and/or modified sequence
atgaagcccgccccccggctgacccccgtgcggcccgccgccgccagccctattgtgtcaggagccaggcggcggagagtccgctgcaggaaatgtaaggcatgtgtgcagggtgaatgtggagtgtgtcactactgccgcgacatgaagaaatttggtggccctggacgcatgaagcagtcatgcgtacttcggcaatgtctcgcaccccggctcccacactccgtgacttgctctctgtgtggtgaggtcgaccagaacgaagagactcaggacttcgagaaaaagctgatggagtgctgcatttgtaatgaaattgtccacccgggctgcctgcagatggatggggagggcctgttgaatgaggagctgcctaattgctgggagtgtcccaaatgctaccaggaggattctagcgagaaagctcagaagagaaaaatggaggaaagcgatgaagaagccgtccaggccaaggtgctgaggcccctgcgctcctgcgatgagccccttaccccaccaccgcattcgcccacgtccatgctccagctgatccatgatccagtttcgcccagaggcatggtcacccggtcttccccaggcgccggcccttcagatcaccactcggcttctcgggacgaacgtttcaaacgaagacagcttctccggctgcaagcaaccgagaggacaatggtgagggagaaggagaataacccttccggcaagaaagagctaagcgaagtagaaaaggccaaaattcgggggtcctatctgacggtgactttacaacggcccacaaaagagctccatgggacctcaatcgtaccgaagctccaagccataaccgctagcagcgccaatcttagacattctccaagagtcctggtgcagcactgccctgcccgaacacctcaacggggtgacgaggaggggctgggcggcgaggaagaggaggaagaggaggaagaggaggaagacgattcagccgaagaagggggggcagcccggctgaacggtcgaggaagttgggctcaagacggcgatgagagctggatgcagcgggaggtgtggatgtccgtcttccgatatctgtccaggagggaactttgcgagtgcatgagggtgtgtaagacctggtacaagtggtgttgtgacaagagactgtggacaaagattgacctgtcgcggtgtaaggccatcgtgccgcaggctctgtcagggatcataaagagacagccagtgtctttggatctcagttggactaatataagtaagaagcagctgacctggctagtgaatcgtctgccagggttaaaggacctcctgcttgccggctgttcctggagtgccgttagtgctttatccaccagttcttgtcccttgttgagaaccctggacctgaggtgggctgtgggtatcaaggacccccagatcagagacctgttaacccctcctgcagataagcctggccaggacaatagatctaagttacggaacatgacagattttagactggccggcctcgacattacagacgccacactgcggttgatcatcagacacatgcctctgctgtccaggcttgatctgtcacactgttctcacctgaccgatcagtcctctaatctgcttaccgccgtgggatcttctacacgttacagtttgacagagctaaatatggccggctgcaataaattgactgatcaaaccctaatatacttgaggcggattgcaaacgtcaccctcatcgacttaagggggtgcaaacagatcacccggaaggcctgtgaacacttcatctcagatctgtcaatcaacagtttgtattgcctgtcagatgaaaaactgattcagaaaatcagctag

SEQ ID NO: 341999 - DNA, 1863 bp, Artificial Sequence
  derived and/or modified sequence
atgaaaccggcacccaggctaacacccgtcaggcccgctgccgcaagccccatcgtgtcaggagcacggcgtcggagggtgcgttgccggaagtgcaaggcatgtgttcaaggtgaatgtggcgtgtgccactactgcagagacatgaaaaagttcgggggaccaggcaggatgaaacagtcttgtgtcttgcgccagtgcctggccccacgcttacctcattcagtaacatgctcactttgcggggaggtggaccagaacgaagagactcaggattttgaaaaaaagctcatggaatgctgcatttgtaatgagattgttcaccctgggtgtctccagatggatggggagggacttctgaatgaagagcttccaaactgttgggaatgccctaagtgttatcaagaggacagttcggaaaaggcccagaagagaaaaatggaggaatcagatgaggaagccgtgcaagccaaagtgctccgtcccttgaggagttgcgacgaacctctgacacctccaccgcatagtcccacgagtatgctgcagctcatccacgatccagtcagcccaaggggcatggtaactaggagttccccaggggctggaccatcagaccaccactctgcgtcacgagacgaacggttcaaacggaggcagctccttcgcctgcaagccaccgaacggactatggtgcgcgagaaggagaacaatccttccggaaagaaggaattgagtgaggtcgagaaggctaagattcggggaagctatctgaccgtaaccctgcagagacccacaaaggagctccacgggacctccattgtgccaaagctccaagcaataaccgcttctagcgccaacctgcggcacagccctcgcgttttagtacaacactgtccggcaaggactccgcagcgaggggatgaggagggactgggcggagaggaagaggaggaagaagaggaggaagaagaggacgactctgccgaagaaggcggagctgcccgactgaacggcagaggctcttgggcccaggatggtgatgaaagttggatgcaaagggaggtctggatgtcagtgttccgctacctatcccgcagagagctgtgcgaatgtatgagagtgtgcaagacatggtataaatggtgttgcgataagcgcctgtggaccaagattgatctttctaggtgtaaggctatcgtccctcaggcacttagcggcattatcaagaggcagcctgtttcattggatctgtcttggaccaatatctcgaagaaacagttaacctggcttgtcaacagacttcctggactcaaggaccttctactagccggttgttcctggtccgcagtgtcagcccttagcacgagctcttgcccactcctccgcacactggatcttagatgggctgtgggtataaaggacccccagatcagagacctgttgacccctccagccgataagcccggtcaggacaatcggagtaaactcagaaacatgactgacttcagactagccggattggatatcacagacgcaacactgaggctgattatccggcatatgcccttgctttctaggttagatctctcgcactgctcccacctaacggaccaatccagcaacttgctgactgctgtgggctccagcacccggtattccttaacggagctgaatatggcagggtgcaataaactgactgaccagaccctgatatacctgaggagaattgccaacgttacactgatcgatctgcgcggatgtaagcagattaccaggaaagcatgcgagcattttataagcgacttatccattaactccctgtactgcctgagcgatgaaaagctaatccagaagatatcatag

SEQ ID NO: 342000 - DNA, 1863 bp, Artificial Sequence
  derived and/or modified sequence
atgaagcccgcccccagactgacccccgtgagacccgccgccgccagccccatcgtgagcggcgccagaagaagaagagtgagatgcagaaagtgcaaggcctgcgtgcagggcgagtgcggcgtgtgccactactgcagagacatgaagaagttcggcggccccggcagaatgaagcagagctgcgtgctgagacagtgcctggcccccagactgccccacagcgtgacctgcagcctgtgcggcgaggtggaccagaacgaggagacccaggacttcgagaagaagctgatggagtgctgcatctgcaacgagatcgtgcaccccggctgcctgcagatggacggcgagggcctgctgaacgaggagctgcccaactgctgggagtgccccaagtgctaccaggaggacagcagcgagaaggcccagaagagaaagatggaggagagcgacgaggaggccgtgcaggccaaggtgctgagacccctgagaagctgcgacgagcccctgaccccccccccccacagccccaccagcatgctgcagctgatccacgaccccgtgagccccagaggcatggtgaccagaagcagccccggcgccggccccagcgaccaccacagcgccagcagagacgagagattcaagagaagacagctgctgagactgcaggccaccgagagaaccatggtgagagagaaggagaacaaccccagcggcaagaaggagctgagcgaggtggagaaggccaagatcagaggcagctacctgaccgtgaccctgcagagacccaccaaggagctgcacggcaccagcatcgtgcccaagctgcaggccatcaccgccagcagcgccaacctgagacacagccccagagtgctggtgcagcactgccccgccagaaccccccagagaggcgacgaggagggcctgggcggcgaggaggaggaggaggaggaggaggaggaggaggacgacagcgccgaggagggcggcgccgccagactgaacggcagaggcagctgggcccaggacggcgacgagagctggatgcagagagaggtgtggatgagcgtgttcagatacctgagcagaagagagctgtgcgagtgcatgagagtgtgcaagacctggtacaagtggtgctgcgacaagagactgtggaccaagatcgacctgagcagatgcaaggccatcgtgccccaggccctgagcggcatcatcaagagacagcccgtgagcctggacctgagctggaccaacatcagcaagaagcagctgacctggctggtgaacagactgcccggcctgaaggacctgctgctggccggctgcagctggagcgccgtgagcgccctgagcaccagcagctgccccctgctgagaaccctggacctgagatgggccgtgggcatcaaggacccccagatcagagacctgctgaccccccccgccgacaagcccggccaggacaacagaagcaagctgagaaacatgaccgacttcagactggccggcctggacatcaccgacgccaccctgagactgatcatcagacacatgcccctgctgagcagactggacctgagccactgcagccacctgaccgaccagagcagcaacctgctgaccgccgtgggcagcagcaccagatacagcctgaccgagctgaacatggccggctgcaacaagctgaccgaccagaccctgatctacctgagaagaatcgccaacgtgaccctgatcgacctgagaggctgcaagcagatcaccagaaaggcctgcgagcacttcatcagcgacctgagcatcaacagcctgtactgcctgagcgacgagaagctgatccagaagatcagctag

SEQ ID NO: 342001 - protein, 255 aa, Artificial Sequence
  derived and/or modified sequence
MVWKWMPLLLLLVCVATMCSAQDRTDLLNVCMDAKHHKTKPGPEDKLHDQCSPWKKNACCTASTSQELHKDTSRLYNFNWDHCGKMEPACKRHFIQDTCLYECSPNLGPWIQQVNQSWRKERFLDVPLCKEDCQRWWEDCHTSHTCKSNWHRGWDWTSGVNKCPAGALCRTFESYFPTPAALCEGLWSHSYKVSNYSRGSGRCIQMWFDSAQGNPNEEVARFYAAAMHVNAGEMLHGTGGLLLSLALMLQLWLLG

SEQ ID NO: 342002 - protein, 242 aa, Artificial Sequence
  derived and/or modified sequence
MLPAATEVQLRLQGQKDMVWKWMPLLLLLVCVATMCSAQDRTDLLNVCMDAKHHKTKPGPEDKLHDQCSPWKKNACCTASTSQELHKDTSRLYNFNWDHCGKMEPACATSSRTPVSMSAHPGALDPAGESELAKNASWMCPYAKRTVSAGGRIVTPPTRARATGTEDGTGPQELTSAQLGLSAAPLSPTSPLQLPFVKASGVTHTRSATTAEGAAAASRCGLIQPRATPTRKWRGSMLQPCM

SEQ ID NO: 342003 - DNA, 1138 bp, Artificial Sequence
  derived and/or modified sequence
ctaagtagggagatttcactcagtgcttaccagagcgcgttgtctaccctgtaccgaagacagaggctgtggggacagcctaggggcctggatctattgcctacttagagagaggccaactcagacacagccgtgtatgctcccagcagcaacggaggttcagctccgcctgcagggacagaaagacatggtctggaaatggatgccacttctgctgcttctggtctgtgtagccaccatgtgcagtgcccaggacaggactgatctcctcaatgtctgtatggatgccaagcaccacaagacaaagccaggtcctgaggacaagctgcatgaccaatgcagtccctggaagaagaatgcctgctgcacagccagcaccagccaggagctgcacaaggacacctcccgcctgtacaactttaactgggaccactgcggcaagatggagcccgcctgcaagcgccacttcatccaggacacctgtctctatgagtgctcacccaacctggggccctggatccagcaggtgaatcagagctggcgcaaagaacgcttcctggatgtgcccttatgcaaagaggactgtcagcgctggtgggaggattgtcacacctcccacacgtgcaagagcaactggcacagaggatgggactggacctcaggagttaacaagtgcccagctggggctctctgccgcacctttgagtcctacttccccactccagctgccctttgtgaaggcctctggagtcactcatacaaggtcagcaactacagccgagggagcggccgctgcatccagatgtggtttgattcagcccagggcaaccccaacgaggaagtggcgaggttctatgctgcagccatgcatgtgaatgctggtgagatgcttcatgggactgggggtctcctgctcagtctggccctgatgctgcaactctggctccttggctgagttcagtcctcccagactacctgccctcagcttggataaccaggctgggctcagctcagctcccacaaatgacagccccttaagcatgcttctattagtcacctaaccctctgtcacccagtctgttgctgctccatggtggggccaagagtcacttctaataaacagactgttttctaataa

SEQ ID NO: 342004 - DNA, 1120 bp, Artificial Sequence
  derived and/or modified sequence
atttcactcagtgcttaccagagcgcgttgtctaccctgtaccgaagacagaggctgtggggacagcctaggggcctggatctattgcctacttagagagaggccaactcagacacagccgtgtatgctcccagcagcaacggaggttcagctccgcctgcagggacagaaagacatggtctggaaatggatgccacttctgctgcttctggtctgtgtagccaccatgtgcagtgcccaggacaggactgatctcctcaatgtctgtatggatgccaagcaccacaagacaaagccaggtcctgaggacaagctgcatgaccaatgcagtccctggaagaagaatgcctgctgcacagccagcaccagccaggagctgcacaaggacacctcccgcctgtacaactttaactgggaccactgcggcaagatggagcccgcctgcgccacttcatccaggacacctgtctctatgagtgctcaccctggggccctggatccagcaggtgaatcagagctggcgaagaacgcttcctggatgtgcccttatgcaaagaggactgtcagcgctggtgggaggattgtcacacctcccacacgtgcaagagcaactggcacagaggatgggactggacctcaggagttaacaagtgcccagctggggctctctgccgcacctttgagtcctacttccccactccagctgccctttgtgaaggcctctggagtcactcatacaaggtcagcaactacagccgagggagcggccgctgcatccagatgtggtttgattcagcccagggcaaccccaacgaggaagtggcgaggttctatgctgcagccatgcatgtgaatgctggtgagatgcttcatgggactgggggtctcctgctcagtctggccctgatgctgcaactctggctccttggctgagttcagtcctcccagactacctgccctcagcttggataaccaggctgggctcagctcagctcccacaaatgacagccccttaagcatgcttctattagtcacctaaccctctgtcacccagtctgttgctgctccatggtggggccaagagtcacttctaataaacagactgttttctaataattcc

SEQ ID NO: 342005 - DNA, 729 bp, Artificial Sequence
  derived and/or modified sequence
atgctgccagccgcaaccgaggtccagctgcgcctccaaggccaaaaagacatggtgtggaagtggatgcccctactcctgcttctcgtgtgcgtcgctacaatgtgcagcgcccaggatagaaccgacctgctcaacgtgtgcatggacgccaaacatcacaagacaaagccgggaccggaagataaactgcatgaccagtgcagtccttggaaaaaaaacgcctgttgcaccgcttctacgagtcaggaattgcacaaagacacatccagactctacaactttaattgggaccactgcggcaagatggagcccgcttgcgcaacatctagcaggactccagtatccatgagcgcccaccctggggctctggaccctgccggcgaatccgaactcgccaaaaatgcaagctggatgtgtccttatgcaaagcggaccgtgagcgccggaggcaggattgtgactccacccacaagagccagagctacgggtacggaggatggaactgggccccaagaactgaccagcgcccaactgggacttagtgccgcgccattatcccccacaagccccctgcagctccccttcgttaaagcatctggcgtgacccacactcgaagcgcaactaccgcggagggggccgctgccgctagcagatgtgggttgattcagcctagggcaacaccaacacggaaatggcgtggttctatgctgcagccttgtatgtag

SEQ ID NO: 342006 - DNA, 729 bp, Artificial Sequence
  derived and/or modified sequence
atgctgcctgctgccacagaggtgcagctgcggctgcagggccagaaggacatggtgtggaagtggatgcccctgctgctgctgctggtgtgtgtggccaccatgtgcagcgcccaggacagaacagacctgctgaatgtgtgcatggatgccaagcaccacaagaccaagccaggccctgaggacaagctgcatgaccagtgcagcccctggaagaagaatgcctgctgcacagccagcaccagccaggagctgcacaaggacaccagccggctgtacaacttcaactgggaccactgtgggaagatggagcccgcctgtgccaccagcagcaggacccctgtgtccatgtctgcccaccctggggccctggaccctgctggggagagcgagctggccaagaatgcctcctggatgtgcccctatgccaagaggacagtgtctgctgggggcagaattgtgaccccacccacccgggcccgggccactggaacagaagatggcaccggcccccaggagctgaccagcgcccagctgggcctgtctgctgcccccctgagccccaccagccccctgcagctgccctttgtgaaggccagcggcgtgacccacaccaggtctgccaccacagctgagggcgctgctgctgccagccgctgtggcctcatccagccccgggccacccccaccaggaagtggaggggctccatgctgcagccctgcatgtag

SEQ ID NO: 342007 - DNA, 729 bp, Artificial Sequence
  derived and/or modified sequence
atgctgcccgccgccaccgaggtgcagctgcggctgcagggccagaaagatatggtctggaagtggatgcccctgctcctgttgcttgtttgtgtcgccaccatgtgttctgcccaggatcggacagatctcctgaacgtttgtatggacgcaaaacaccataagaccaagccaggacctgaagacaaacttcacgatcagtgtagcccgtggaaaaagaatgcttgttgcaccgccagtacctcccaggaactgcacaaggatacttcccgactctataatttcaattgggatcattgtgggaaaatggaaccagcgtgtgctacatcatcgagaacgccggtttccatgtctgcacatcccggcgctctagaccctgctggtgagtccgaactggctaaaaatgccagctggatgtgcccatatgccaaaaggactgtgtctgcaggtggcaggatagttacacctccgacacgggctcgcgccactggcacagaggatgggacagggcctcaggaactcacatccgcgcagctcggtttgagcgccgctcccttgtccccgacatcaccgctacagctgccgttcgtcaaggcgtcaggcgttacccacaccagatctgctaccacggctgaaggagccgccgccgctagtcggtgcggcttaatccagccccgggcaaccccgacccggaagtggagaggctcaatgcttcaaccctgcatgtag

SEQ ID NO: 342008 - DNA, 729 bp, Artificial Sequence
  derived and/or modified sequence
atgttacccgctgcaacagaagtgcaattgcgcctgcaggggcagaaagacatggtctggaaatggatgcccttgctcctacttctcgtgtgcgttgccactatgtgctccgcacaggatcggacggacctgctcaacgtttgcatggacgcaaagcaccacaaaaccaagccagggcctgaagacaaattgcacgatcagtgctcaccctggaagaagaatgcttgctgtaccgcaagtactagccaagagctacacaaggacacaagcaggctgtacaatttcaactgggatcattgcggaaagatggagccagcctgcgctaccagctcaaggacacccgtgtcaatgtcggcgcaccctggagcactcgatccggcaggcgagagcgaattggctaaaaatgcatcctggatgtgtccctatgcaaagagaacagtgtcagcaggaggtaggatcgtaacgccgccaactagagccagggccaccgggacagaagatggtaccggaccccaggagctgactagtgcccagctgggcctgtctgcagccccactgagtcctacatcacctctccaacttccattcgtcaaagcaagtggggtcacccacactagatctgccacgaccgcagagggggctgctgctgcaagccgctgcgggcttatccagcctagggctaccccgaccaggaaatggagaggatcaatgcttcagccctgcatgtag

SEQ ID NO: 342009 - DNA, 729 bp, Artificial Sequence
  derived and/or modified sequence
atgctgcccgccgccaccgaggtgcagctgagactgcagggccagaaggacatggtgtggaagtggatgcccctgctgctgctgctggtgtgcgtggccaccatgtgcagcgcccaggacagaaccgacctgctgaacgtgtgcatggacgccaagcaccacaagaccaagcccggccccgaggacaagctgcacgaccagtgcagcccctggaagaagaacgcctgctgcaccgccagcaccagccaggagctgcacaaggacaccagcagactgtacaacttcaactgggaccactgcggcaagatggagcccgcctgcgccaccagcagcagaacccccgtgagcatgagcgcccaccccggcgccctggaccccgccggcgagagcgagctggccaagaacgccagctggatgtgcccctacgccaagagaaccgtgagcgccggcggcagaatcgtgaccccccccaccagagccagagccaccggcaccgaggacggcaccggcccccaggagctgaccagcgcccagctgggcctgagcgccgcccccctgagccccaccagccccctgcagctgcccttcgtgaaggccagcggcgtgacccacaccagaagcgccaccaccgccgagggcgccgccgccgccagcagatgcggcctgatccagcccagagccacccccaccagaaagtggagaggcagcatgctgcagccctgcatgtag

SEQ ID NO: 342010 - protein, 171 aa, Artificial Sequence
  derived and/or modified sequence
MVWKWMPLLLLLVCVATMCSAQDRTDLLNVCMDAKHHKTKPGPEDKLHDQCSPWKKNACCTASTSQELHKDTSRLYNFNWDHCGKMEPACKRHFIQDTCLYECSPNLGPWIQQVNQSWRKERFLDVPLCKEDCQRWWEDCHTSHTCKSNWHRGWDWTSGVNKCPAGALCRT

SEQ ID NO: 342011 - DNA, 610 bp, Artificial Sequence
  derived and/or modified sequence
aggctgtggggacagcctaggggcctggatctattgcctacttagagagaggccaactcagacacagccgtctccgcctgcagggacagaaagacatggtctggaaatggatgccacttctgctgcttctggtctgtgtagccaccatgtgcagtgcccaggacaggactgatctcctcaatgtctgtatggatgccaagcaccacaagacaaagccaggtcctgaggacaagctgcatgaccaatgcagtccctggaagaagaatgcctgctgcacagccagcaccagccaggagctgcacaaggacacctcccgcctgtacaactttaactgggaccactgcggcaagatggagcccgcctgcaagcgccacttcatccaggacacctgtctctatgagtgctcacccaacctggggccctggatccagcaggtgaatcagagctggcgcaaagaacgcttcctggatgtgcccttatgcaaagaggactgtcagcgctggtgggaggattgtcacacctcccacacgtgcaagagcaactggcacagaggatgggactggacctcaggagttaacaagtgcccagctggggctctctgccgcacctt

SEQ ID NO: 342012 - protein, 361 aa, Artificial Sequence
  derived and/or modified sequence
MFQKLPDIREVLTCKIEELGSELKEHYKIEAFTPLLAPAQEPVTLLGQIGCDSNGKLNNKSVILEGDREHSSGAQIPVDLSELKEYSLFPGQVVIMEGINTTGRKLVATKLYEGVPLPFYQPTEEDADFEQSMVLVACGPYTTSDSITYDPLLDLIAVINHDRPDVCILFGPFLDAKHEQVENCLLTSPFEDIFKQCLRTIIEGTRSSGSHLVFVPSLRDVHHEPVYPQPPFSYSDLSREDKKQVQFVSEPCSLSINGVIFGLTSTDLLFHLGAEEISSSSGTSDRFSRILKHILTQRSYYPLYPPQEDMAIDYESFYVYAQLPVTPDVLIIPSELRYFVKVGLNSAFSQKHQNPVFDFPF

SEQ ID NO: 342013 - DNA, 1086 bp, Artificial Sequence
  derived and/or modified sequence
atgtttcaaaaactgcccgacatcagagaggtgttgacctgtaaaatcgaggagctgggatctgaactaaaagaacactataagatcgaggccttcacacccctgctggcaccagcccaggaaccagtcacacttctggggcagatcgggtgtgacagcaatggcaaactgaacaacaagagcgtcatcctggagggggatagagagcatagctcgggcgcacagattccggtcgatttaagtgagctgaaggaatacagcctgtttcctggacaggttgtcatcatggagggaattaacactaccggacgaaagctcgtcgcgactaaattatacgagggcgtccctctgccattctaccagccaacagaggaggacgccgatttcgagcagagtatggtccttgtggcttgtggcccctatactacatctgacagcatcacttacgatcccctgctagatcttatcgcagttattaatcatgataggcccgatgtttgcatactctttgggccctttttagacgccaagcatgagcaggttgaaaactgccttctaacttcacccttcgaggatatattcaaacagtgtctgcgtacaataattgaagggacccggagttctggcagtcacctggtgtttgtcccttcattgcgcgatgtgcatcacgaacccgtctacccacaacccccattcagttacagcgatctgtcccgagaggacaagaaacaggtgcagtttgtttcggagccgtgttctctgagtattaacggagtgatctttggcctgaccagtacagacctcctatttcatctgggagccgaggagatttcgtcatcatctggtacaagtgatcgcttttctcggattctaaagcatattctaacccaacggtcgtactatcctctttaccctccacaggaggatatggccatcgactacgagagtttctatgtctatgctcagttgcctgtgacccccgacgttttgatcattccatccgagctaagatattttgttaaggtggggctgaactctgccttctcccagaaacatcagaaccctgttttcgactttcccttctag

SEQ ID NO: 342014 - DNA, 1086 bp, Artificial Sequence
  derived and/or modified sequence
atgttccagaagctgcctgacatccgggaggtgctgacctgcaagattgaggagctgggcagcgagctgaaggagcactacaagattgaggccttcacccccctgctggccccagcccaggagcctgtgaccctgctgggccagatcggctgtgacagcaatggcaagctgaacaacaagagcgtcatcctggagggggaccgggagcacagcagcggggcccagatccctgtggacctgtctgagctgaaggagtacagcctcttccctggccaggtggtgatcatggagggcatcaacaccaccggcaggaagctggtggccaccaagctgtatgagggcgtgcccctgcccttctaccagcccacagaagaagatgctgactttgagcagagcatggtgctggtggcctgtggcccctacaccaccagtgacagcatcacctatgaccccctgctggacctgattgctgtgatcaaccacgacagaccagatgtgtgcatcctgtttggccccttcctggatgccaagcatgagcaggtggagaactgcctgctgaccagcccctttgaggacatcttcaagcagtgcctgcggaccatcatcgagggcaccaggagcagcggcagccacctggtgtttgtgcccagcctgagagatgtgcaccacgagcctgtgtacccccagccccccttctcctacagcgacctgagccgggaggacaagaagcaggtgcagtttgtgtctgagccctgcagcctgagcatcaatggagtcatcttcggcctgaccagcacagacctgctcttccacctgggcgctgaggagatcagcagcagcagcggcaccagtgaccgcttcagccgcatcctgaagcacatcctgacccagaggagctactaccccctgtacccaccccaggaggacatggccatcgactatgagagcttctacgtgtatgcccagctgcctgtgaccccagatgtgctgatcatccccagcgagctgcgctactttgtgaaggtgggcctgaacagcgccttcagccagaagcaccagaaccctgtgtttgacttccccttctag

SEQ ID NO: 342015 - DNA, 2073 bp, Artificial Sequence
  derived and/or modified sequence
agttctgccaccgtcactgagaagctcagcggtagcttttgggaagcaggacgttctcaccaggagagcgtcctctcgagatttctgctccctccattcagggcgtttgggagccaccccttcattttttaaaaaaagtatttctctgtgaccgacggccggggccttctgacggtctgaggtcttgcttgggccagtcacctcctgtcacggtccgcggaggggggaaggataagagggcgaggagctcatcgctcgccacccccgtgggcttcttgggcgcaggtcggagctgggtgggccggctccccggcccctggcttgggcgaccatgtccgcatccgcccagcagctggcggaggagctgcagatcttcggcctagactgcgaggaggctctaattgagaaattttctgagcaaaagattatcgaaagccaggcatagtacctgcaaggacagtggccatgcaggagctagagacattgtttccattcaagagctaattgaagtggaagaagaagaggaaatcctcttgaactcttacaccacaccttcaaagggttctcagaagcgagctatctctaccccagaaacccccctaacaaaaaggagtgtgtcaactcgtagcccccatcagctactctcaccgtcaagtttctctccaagtgctactccctcccagaaatacaactcacgaagtaaccgaggagaagtggttacctccttcggcttagcacagggagtatcttggtctgggagaggaggagctggaaacatcagcctgaaggtcttgggatgtccagaggcactaactgggagctacaaatccatgtttcagaagctcccagacattcgagaagttctgacctgtaagatagaagaacttggcagcgaactcaaggaacattacaagattgaagctttcactcctttgctagccccagcacaggagcctgtcactctgctgggccagattggctgtgatagcaacgggaagctgaacaacaagtcagtgattctcgagggagaccgggaacattcctcgggtgctcaaattccagtggatttatctgagcttaaggaatattctctgtttcctggacaggttgtaattatggaaggaatcaacaccactggtaggaaacttgttgccaccaaactctacgagggtgtgccacttccattttatcagcccactgaagaggatgcagactttgagcaaagcatggtcctggttgcctgtggaccatacaccacatctgacagcatcacgtatgaccccctgcttgacctgattgctgtcatcaaccatgaccggccagatgtctgcatcctgtttggccctttcctggatgctaagcatgaacaggtggagaattgtctactgacaagtccatttgaagacattttcaagcagtgtctacgaacaattattgaaggcacaagaagctccggctcccaccttgtctttgtcccgtcattgagagatgtgcaccatgagcctgtgtacccccagccgcctttcagctactccgatctgtctcgagaggacaaaaagcaagtacagtttgtgtccgagccctgcagcctctccataaacggagtgatcttcggcttgacatccacagatctgcttttccacctgggggccgaggagatcagtagttcttccggaacttcagacagattcagccgaatactcaagcacatcttgacccagaggagctactacccactctacccgccccaagaagacatggccattgactatgagtcgttctatgtttacgcacagctgcctgtcaccccagatgtcctcatcatcccgtcagagctgaggtacttcgtgaaggtaggtttgaactctgctttttcccagaaacaccagaacccagtctttgactttcccttctagaccacccggcactcacccctcatgggtcagctgatggggatggggcctctagcaccctgccctgtggccttgtttctttggggaggtggtgggaccagaaaacaaacaactctgtcagtaaaatgcttgagtaaacagtgtcctctcctccctcccc

SEQ ID NO: 342016 - DNA, 1086 bp, Artificial Sequence
  derived and/or modified sequence
atgttccagaagctgcccgacatccgggaggtgctgacctgcaagatcgaggaattgggatccgaattgaaagagcactataaaattgaggctttcacgccattattggcaccagcccaggaacccgtcactttgctcggccagatcgggtgtgattcgaacggtaaactcaacaacaagtccgtgatactcgagggcgatagggaacattcgagcggagcgcaaattcccgttgatttgagcgagctcaaagagtactcattatttcctggtcaggtcgtcatcatggagggcatcaacacaaccgggcgaaagctcgttgctactaaactttacgagggcgtgccgttgcccttttaccagcctaccgaggaagatgcagattttgagcagagcatggtgcttgtcgcttgcgggccttacactacctctgattctattacatatgatcccctgctcgacctcattgccgtgataaatcatgataggccagatgtatgtatactctttggccccttcctcgatgccaaacacgagcaagtcgaaaattgcctgttgacaagcccttttgaggacatcttcaagcagtgcctccgcactataattgaagggaccaggtccagtggcagccatttggtcttcgtgccatcactacgtgacgtgcaccacgagcctgtgtaccctcagccgccgttttcgtatagtgacctgagccgtgaagacaagaaacaggtgcagtttgtctctgagccctgctccctgagcattaacggagtgatatttggcctgacaagcacagaccttttgttccacctgggcgcggaggaaattagcagcagcagcggcacttctgacaggttctctaggatcctgaaacacatcctcacccaaaggagctattatccactttatccccctcaagaggatatggccatcgactacgagagcttttacgtatatgcccagctgcccgttacccctgacgtgcttataattccctcggagctgagatactttgttaaagtcggccttaactcagcattttcacagaagcatcaaaatcccgtgttcgattttcccttttag

SEQ ID NO: 342017 - DNA, 1086 bp, Artificial Sequence
  derived and/or modified sequence
atgtttcaaaaactcccagatataagagaagtcctcacatgtaagatcgaagagctgggctccgagttgaaggagcactacaaaatagaagctttcacacctttgctcgcgcctgcccaggagcctgtgacactgttgggtcaaatcgggtgtgactctaatggcaaattaaacaataagtccgtgatcctcgagggggacagggaacactccagtggtgcccagattccggtggacctatcagagttaaaagagtattctcttttcccgggtcaagtcgtgataatggagggtatcaacacaactggccgaaagttagtagctactaaattgtacgagggcgttccgctgcccttctaccagcccacggaagaagatgccgatttcgagcagtcaatggtcctggtggcctgcgggccatataccacatctgatagcatcacgtacgaccccttactcgacttgatcgctgtgattaaccatgatcggccagacgtgtgtatcttgtttgggcctttccttgacgcgaagcatgaacaggtcgagaattgcctcttaacatctccctttgaggatatttttaaacagtgcctaaggacaatcatcgagggcactcggtcaagcggaagccatctggtcttcgttccttcgttgagagatgttcaccacgaacccgtgtatcctcaacctcccttcagttattctgacctgagccgcgaagataagaaacaagtgcagttcgtgtcagagccctgttccctaagtattaatggagttatctttggcctgactagcactgacctcctgttccatctgggagcggaggaaattagctcgtcctctgggaccagcgacagattctcacgaatactgaagcacattctgactcaacgcagctattatcctctgtaccctccccaagaggatatggccattgattatgagtcattctacgtgtacgcccagctgcccgtaacgccggacgtgctgatcatcccttctgaattacgatatttcgtaaaagtcgggcttaacagcgcttttagtcaaaagcaccagaaccccgtgttcgacttccccttttag

SEQ ID NO: 342018 - DNA, 1086 bp, Artificial Sequence
  derived and/or modified sequence
atgttccagaagctgcccgacatcagagaggtgctgacctgcaagatcgaggagctgggcagcgagctgaaggagcactacaagatcgaggccttcacccccctgctggcccccgcccaggagcccgtgaccctgctgggccagatcggctgcgacagcaacggcaagctgaacaacaagagcgtgatcctggagggcgacagagagcacagcagcggcgcccagatccccgtggacctgagcgagctgaaggagtacagcctgttccccggccaggtggtgatcatggagggcatcaacaccaccggcagaaagctggtggccaccaagctgtacgagggcgtgcccctgcccttctaccagcccaccgaggaggacgccgacttcgagcagagcatggtgctggtggcctgcggcccctacaccaccagcgacagcatcacctacgaccccctgctggacctgatcgccgtgatcaaccacgacagacccgacgtgtgcatcctgttcggccccttcctggacgccaagcacgagcaggtggagaactgcctgctgaccagccccttcgaggacatcttcaagcagtgcctgagaaccatcatcgagggcaccagaagcagcggcagccacctggtgttcgtgcccagcctgagagacgtgcaccacgagcccgtgtacccccagccccccttcagctacagcgacctgagcagagaggacaagaagcaggtgcagttcgtgagcgagccctgcagcctgagcatcaacggcgtgatcttcggcctgaccagcaccgacctgctgttccacctgggcgccgaggagatcagcagcagcagcggcaccagcgacagattcagcagaatcctgaagcacatcctgacccagagaagctactaccccctgtaccccccccaggaggacatggccatcgactacgagagcttctacgtgtacgcccagctgcccgtgacccccgacgtgctgatcatccccagcgagctgagatacttcgtgaaggtgggcctgaacagcgccttcagccagaagcaccagaaccccgtgttcgacttccccttctag

SEQ ID NO: 342019 - DNA, 1212 bp, Artificial Sequence
  derived and/or modified sequence
atgaagcaaaggaaagggcagggatctgggggatcccgaggacgcaaaaaacgagggctgtctgatatctccccatcaacatctcttccacctttggtcgaggggcagttaaggtgcttcctcaagctcacagtcaatagagtaatctggaagatcgctaaacccccgacctgtgtgttagtgcgcgttcgatggtggggggaaacttctgacggcacacttttttgccctcgcgatgccctacaaacagaaccgaaagccgtaaggacaaccactcggtacgcgattcgatgcggccccaagcagtttacatcttatttaacagatatggctgtcctggttttggaggtaatcaccaagctggacggattgccaattggccgagtgcagataaacggcttagcccagctctcaccaactcatcagattaatggttttttcaccatcgtgagctcaacctctaaaaagcttggggagctccaggtatccctcgccctggagccactctcagagacatacgacagttaccaccccctgcctaccaccgacatgacagagaacgtcctactctctaaacagggttttagggagaatactgaaccttcatcaactcaattccaggtaccttcccgccctagggatatccacactatcaaaatcgacggaaaggaactggctgccaattcctctaggtccaccacgccacgggggaaagatcacgtatgttttgcggagaaccccgatacaataaaagattccagcttcgggttgcagcattccttgaactccggccagtccttggagtctgtgaccttgaagggtcgagcaccacgcaaacagatgtcactcctgaattccagcgaattccagccccagatccgtaccgtagcaaagtcacatagtgattcttgcattcttagcagtaataatttgcccactaaggatctgttatctgctctccttgaacaggggaacaaactgcggaatgctatggtgataagcgcaatgaagtccagcccagagacatctatgttactggaccaggtgcatcccctgctgatgaaaatcttgctggagcaccagcaccgtagcgagcctttcctgggtatcgggctgaaaactactctgaagattacctcctcactgcaactgcgcatccacttcggggatatgacacagaagctgatccccgagttatactcttgttactag

SEQ ID NO: 342020 - DNA, 1212 bp, Artificial Sequence
  derived and/or modified sequence
atgaagcagaggaagggccagggcagcggcggcagccggggcaggaagaagaggggcctgagtgacatcagccccagcaccagcctgccccccctggtggagggccagctgcgctgcttcctgaagctgactgtgaacagagtcatctggaagatcgccaagccacccacctgtgtgctggtgcgggtgcgctggtggggcgagaccagtgatggcaccctcttctgccccagagatgccctgcagacagagcccaaggctgtgaggaccaccaccaggtatgccatccgctgtggccccaagcagttcaccagctacctgacagacatggctgtgctggtgctggaggtgatcaccaagctggatggcctgcccatcggccgggtgcagatcaatggcctggcccagctgagccccacccaccagatcaatggcttcttcaccatcgtgagcagcaccagcaagaagctgggggagctgcaggtgtccctggccctggagcccctgtctgagacctatgacagctaccaccccctgcccaccacagacatgacagaaaatgtgctgctgagcaagcagggcttcagagaaaatacagagcccagcagcacccagttccaggtgcccagccggccccgggacatccacaccatcaagattgatggcaaggagctggccgccaacagcagccgcagcaccaccccccggggcaaggaccacgtgtgctttgctgaaaatccagacaccatcaaggacagcagctttggcctgcagcacagcctgaacagcggccagagcctggagagcgtgaccctgaagggccgggcccccaggaagcagatgagcctgctgaacagcagcgagttccagccccagatcagaacagtggccaagagccacagcgacagctgcatcctgagcagcaacaacctgcccaccaaggacctgctgagcgccctgctggagcagggcaacaagctgagaaatgccatggtgatcagcgccatgaagagcagccctgagacctccatgctgctggaccaggtgcaccccctgctgatgaagatcctgctggagcaccagcacaggtctgagcccttcctgggcatcggcctgaagaccaccctgaagatcaccagcagcctgcagctgcgcatccactttggagacatgacccagaagctgatccctgagctgtacagctgctactag

SEQ ID NO: 342021 - DNA, 1212 bp, Artificial Sequence
  derived and/or modified sequence
atgaagcagcggaagggccagggcagcggcggcagccggggccggaagaaaagagggctgtccgatatttccccaagcacatctcttcctcctctcgtggagggccaacttcgctgtttcctcaagctgactgtgaaccgcgtgatttggaaaatcgcaaagccgccaacttgcgtactcgtccgtgtgcgctggtggggtgagactagcgatggaacacttttttgccctagagacgcgcttcagacggagcctaaagcagtacggactaccaccaggtatgcaatcagatgcggtcctaagcaattcactagctatctgactgatatggccgtgctagtgctggaggtaattactaagctcgacgggctgcctatcgggcgggtccaaatcaacggtctagcgcagctaagccccacccaccagatcaatggatttttcaccattgtgtctagcacctccaagaagttgggagaacttcaggtctcgctagctttagagccgctttctgaaacttacgactcctaccaccccctgccgacaacagacatgacagagaacgtgttgctcagcaagcaagggttccgggagaatacagagccctctagcacccagtttcaggtgccaagccgcccaagggacattcacactattaagatcgacgggaaggaattggccgcaaactcatctaggtccaccaccccacgggggaaagaccacgtatgcttcgctgagaatcccgacacaatcaaggacagttccttcgggctccaacacagccttaatagtggacaatcactagaaagtgtgaccctgaaaggcagagcaccaaggaaacaaatgagccttttaaattctagcgagtttcagcctcagatccgaacggtcgctaagtcccatagtgactcttgcatcctctcttctaacaaccttccaacaaaagatttgctcagcgctctgctggaacagggaaataagcttagaaatgctatggtgatctctgccatgaaatcatcccctgaaacttctatgctgctcgaccaggtgcatcctctcctcatgaaaattctgctggaacatcagcatcggagtgagcccttcctcgggatcggcctaaaaacaaccttgaagatcacaagcagcctgcaactcagaatccactttggtgacatgactcagaaattaatccccgaactgtatagttgctactag

SEQ ID NO: 342022 - DNA, 1212 bp, Artificial Sequence
  derived and/or modified sequence
atgaaacagcgcaagggccaggggagcggagggtcacgcggacgaaagaagagaggtctcagcgatatatccccgtcaaccagcctgcctccactcgttgaggggcagctcagatgttttctcaaactgaccgtaaaccgcgtcatctggaaaattgcaaaaccaccaacctgcgtgctcgtgagagtcagatggtggggagaaacctccgatggcaccctgttctgcccaagagatgccttacagactgaacccaaggctgtgcggaccaccaccaggtacgccattagatgcgggcctaagcagttcacatcttacttgaccgacatggcagtgctcgtgctagaggtcattactaagcttgatggtctgcccatcggaagggtgcagatcaacgggctggcacagctaagccccactcatcaaatcaatggtttcttcacaatcgtctctagcacttccaagaaactgggggaactgcaggtgtccctggccctggagccattgagtgagacgtacgacagttatcatcctctgcccaccactgatatgactgaaaacgtactgctttcgaagcaggggtttagggagaacacagagccatcctcaacccagttccaagtgccaagtcgcccacgggatattcatactattaagattgatggcaaagagttggcggcaaactcgtctcgctcgactacaccaaggggtaaagatcatgtttgttttgccgagaatcctgatacaataaaagatagttctttcgggctgcagcacagtctcaacagcggacaaagcctcgagtcggtaacattgaaagggcgtgcccctcggaaacagatgagtctcctgaactcttctgaattccaaccacagatccgcaccgtagccaaatcccactcagattcatgcatcctctcaagtaataacctgcccactaaagatttgttgagcgcccttcttgaacagggtaacaagctccgaaatgccatggtcatcagcgctatgaaatcttcacccgagacctcaatgctcctggaccaagtccatccacttctgatgaaaattttgctagaacaccagcatagaagtgagcctttcctgggaatcggtctgaagactactcttaaaatcactagctccctgcaacttcggattcacttcggcgacatgacacaaaagctgataccggaattgtacagttgctattag

SEQ ID NO: 342023 - DNA, 1212 bp, Artificial Sequence
  derived and/or modified sequence
atgaagcagagaaagggccagggcagcggcggcagcagaggcagaaagaagagaggcctgagcgacatcagccccagcaccagcctgccccccctggtggagggccagctgagatgcttcctgaagctgaccgtgaacagagtgatctggaagatcgccaagccccccacctgcgtgctggtgagagtgagatggtggggcgagaccagcgacggcaccctgttctgccccagagacgccctgcagaccgagcccaaggccgtgagaaccaccaccagatacgccatcagatgcggccccaagcagttcaccagctacctgaccgacatggccgtgctggtgctggaggtgatcaccaagctggacggcctgcccatcggcagagtgcagatcaacggcctggcccagctgagccccacccaccagatcaacggcttcttcaccatcgtgagcagcaccagcaagaagctgggcgagctgcaggtgagcctggccctggagcccctgagcgagacctacgacagctaccaccccctgcccaccaccgacatgaccgagaacgtgctgctgagcaagcagggcttcagagagaacaccgagcccagcagcacccagttccaggtgcccagcagacccagagacatccacaccatcaagatcgacggcaaggagctggccgccaacagcagcagaagcaccacccccagaggcaaggaccacgtgtgcttcgccgagaaccccgacaccatcaaggacagcagcttcggcctgcagcacagcctgaacagcggccagagcctggagagcgtgaccctgaagggcagagcccccagaaagcagatgagcctgctgaacagcagcgagttccagccccagatcagaaccgtggccaagagccacagcgacagctgcatcctgagcagcaacaacctgcccaccaaggacctgctgagcgccctgctggagcagggcaacaagctgagaaacgccatggtgatcagcgccatgaagagcagccccgagaccagcatgctgctggaccaggtgcaccccctgctgatgaagatcctgctggagcaccagcacagaagcgagcccttcctgggcatcggcctgaagaccaccctgaagatcaccagcagcctgcagctgagaatccacttcggcgacatgacccagaagctgatccccgagctgtacagctgctactag

SEQ ID NO: 342024 - protein, 47 aa, Artificial Sequence
  derived and/or modified sequence
RVCMKGSAGFKGLCMRDQNCAQVCLQEGWGGGNCDGVMRQCKCIRQC

SEQ ID NO: 342025 - DNA, 14000 bp, Artificial Sequence
  derived and/or modified sequence
acctgctccttcctgggcgccccgctacggctcgcggagcagaggagccgcgccgccgagagagagaggagccaccggcgcggcgccttgcctccctgccgccgtcctcgccgcttccccggcggtagcagcctgcagccacgatggaaaaactgagaatcagagagggctagtgatctctcagacacttggtcggtagaaaagatcccgcaccatcctccaggatccaatggccttggagagagggctgcagggcccacggacattgctgactcttcagaacgtgctgacatggagccaggtagactgaaattaccatgtgtccaaattaaaattgcatacttcaaggattatttgaaggactattcttagacccttttaagaagatttaaagaaaaaccactcggccctgagtgcggcgaggaccctgtttgtggatgtggaggagcgcgggccggaggccatggacgtgaaggagaggaagccttaccgctcgctgacccggcgccgcgacgccgagcgccgctacaccagctcgtccgcggacagcgaggagggcaaagccccgcagaaatcgtacagctccagcgagaccctgaaggcctacgaccaggacgcccgcctagcctatggcagccgcgtcaaggacattgtgccgcaggaggccgaggaattctgccgcacaggtgccaacttcaccctgcgggagctggggctggaagaagtaacgccccctcacgggaccctgtaccggacagacattggcctcccccactgcggctactccatgggggctggctctgatgccgacatggaggctgacacggtgctgtcccctgagcaccccgtgcgtctgtggggccggagcacacggtcagggcgcagctcctgcctgtccagccgggccaattccaatctcacactcaccgacaccgagcatgaaaacactgagactgatcatccgggcggcctgcagaaccacgcgcggctccggacgccgccgccgccgctctcgcacgcccacacccccaaccagcaccacgcggcctccattaactccctgaaccggggcaacttcacgccgaggagcaaccccagcccggcccccacggaccactcgctctccggagagccccctgccggcggcgcccaggagcctgcccacgcccaggagaactggctgctcaacagcaacatccccctggagaccagaaacctaggcaagcagccattcctagggacattgcaggacaacctcattgagatggacattctcggcgcctcccgccatgatggggcttacagtgacgggcacttcctcttcaagcctggaggcacctccccgctcttctgcaccacatcaccagggtacccactgacgtccagcacagtgtactctcctccgccccgacccctgccccgcagcaccttcgcccggccggcctttaacctcaagaagccctccaagtactgtaactggaagtgcgcagccctgagcgccatcgtcatctcagccactctggtcatcctgctggcatactttgtggccatgcacctgtttggcctaaactggcacctgcagccgatggaggggcagatgtatgagatcacggaggacacagccagcagttggcctgtgccaaccgacgtctccctatacccctcagggggcactggcttagagacccctgacaggaaaggcaaaggaaccacagaaggaaagcccagtagtttctttccagaggacagtttcatagattctggagaaattgatgtgggaaggcgagcttcccagaagattcctcctggcactttctggagatctcaagtgttcatagaccatcctgtgcatctgaaattcaatgtgtctctgggaaaggcagccctggttggcatttatggcagaaaaggcctccctccttcacatacacagtttgactttgtggagctgctggatggcaggaggctcctaacccaggaggcgcggagcctagaggggaccccgcgccagtctcggggaactgtgcccccctccagccatgagacaggcttcatccagtatttggattcaggaatctggcacttggctttttacaatgacggaaaggagtcagaagtggtttcctttctcaccactgccattgagtcggtggataactgccccagcaactgctatggcaatggtgactgcatctctgggacctgccactgcttcctgggtttcctgggccccgactgtggcagagcctcctgccccgtgctctgtagcggaaatggccaatacatgaaaggcagatgcttgtgccacagtggctggaaaggcgctgagtgcgatgtgcccaccaaccagtgtatcgatgtggcctgcagcaaccatggcacctgcatcacgggcacctgcatctgcaaccctggctacaagggcgagagctgtgaggaagtggactgcatggaccccacatgttcaggccggggtgtctgcgtgagaggcgaatgccactgctctgtgggatggggaggcaccaactgcgagacccccagggccacatgcttagaccagtgttcaggccacggaaccttcctcccggacaccgggctttgcagctgtgacccaagctggactggacacgactgttctatcgagatctgtgctgccgactgtggtggccatggcgtgtgcgtagggggcacctgccgctgcgaggatggctggatgggggcagcctgcgaccagcgggcctgccacccgcgctgtgccgagcatgggacctgccgcgacggcaagtgcgagtgcagccctggctggaatggcgaacactgcaccatcgctcactatctggatagggtagttaaagagggttgccctgggttgtgcaatggcaacggcagatgtaccttagacctgaatggttggcactgcgtctgccagctgggctggagaggagctggctgtgacacttccatggagactgcctgcggtgacagcaaagacaatgatggagatggcctggtggactgcatggaccctgactgctgcctccagcccctgtgccatatcaacccgctgtgccttggctcccctaaccctctggacatcatccaggagacacaggtccctgtgtcacagcagaacctacactccttctatgaccgcatcaagttcctcgtgggcagggacagcacgcacataatccccggggagaacccctttgatggagggcatgcttgtgttattcgtggccaagtgatgacatcagatggaacccccctggttggtgtgaacatcagttttgtcaataaccctctctttggatatacaatcagcaggcaagatggcagctttgacttggtgacaaatggcggcatctccatcatcctgcggttcgagcgggcacctttcatcacacaggagcacaccctgtggctgccatgggatcgcttctttgtcatggaaaccatcatcatgagacatgaggagaatgagattcccagctgtgacctgagcaattttgcccgccccaacccagtcgtctctccatccccactgacgtccttcgccagctcctgtgcagagaaaggccccattgtgccggaaattcaggctttgcaggaggaaatctctatctctggctgcaagatgaggctgagctacctgagcagccggacccctggctacaaatctgtcctgaggatcagcctcacccacccgaccatccccttcaacctcatgaaggtgcacctcatggtagcggtggagggccgcctcttcaggaagtggttcgctgcagccccagacctgtcctattatttcatttgggacaagacagacgtctacaaccagaaggtgtttgggctttcagaagcctttgtttccgtgggttatgaatatgaatcctgcccagatctaatcctgtgggaaaaaagaacaacagtgctgcagggctatgaaattgacgcgtccaagcttggaggatggagcctagacaaacatcatgccctcaacattcaaagtggcatcctgcacaaagggaatggggagaaccagtttgtgtctcagcagcctcctgtcattgggagcatcatgggcaatgggcgccggagaagcatctcctgccccagctgcaacggccttgctgacggcaacaagctcctggccccagtggccctcacctgtggctctgacgggagcctctatgtgggtgatttcaactacattagaaggatcttcccctctggaaatgtcaccaacatcctagagctgagaaataaagatttcagacatagtcacagtccagcacacaaatactacctggccacagaccccatgagtggggccgtcttcctttctgacagcaacagccggcgggtctttaaaatcaagtccactgtggtggtgaaggaccttgtcaagaactctgaggtggttgcggggacaggtgaccagtgcctcccctttgatgacactcgctgcggggatggtgggaaggccacagaagccacactcaccaatcccaggggcattacagtggacaagtttgggctgatctacttcgtggatggcaccatgatcagacgcatcgatcagaatgggatcatctccaccctgctcggctctaatgatctcacatcagcccggccactcagctgtgattctgtcatggatatttcccaggttcacctggagtggcccacagacttagccatcaacccaatggacaactcactttatgtcctcgacaacaatgtggtcctgcaaatctctgaaaaccaccaggtgcgcattgtcgccgggaggcccatgcactgccaggtccctggcattgaccacttcctgctaagcaaggtggccatccacgcaaccctggagtcagccaccgctttggctgtttcacacaatggggtcctgtatattgctgagactgatgagaaaaagatcaaccgcatcaggcaggtcaccactagtggagagatctcactcgttgctggggcccccagtggctgtgactgtaaaaatgatgccaactgtgattgtttttctggagacgatggttatgccaaggatgcaaagttaaataccccatcttccttggctgtgtgtgctgatggggagctctacgtggccgaccttgggaacatccgaattcggtttatccggaagaacaagcctttcctcaacacccagaacatgtatgagctgtcttcaccaattgaccaggagctctatctgtttgataccaccggcaagcacctgtacacccaaagcctgcccacaggagactacctgtacaacttcacctacactggggacggcgacatcacactcatcacagacaacaatggcaacatggtaaatgtccgccgagactctactgggatgcccctctggctggtggtcccagatggccaggtgtactgggtgaccatgggcaccaacagtgcactcaagagtgtgaccacacaaggacacgagttggccatgatgacataccatggcaattccggccttctggcaaccaaaagcaatgaaaacggatggacaacattttatgagtacgacagctttggccgcctgacaaatgtgaccttccctactggccaggtgagcagtttccgaagtgatacagacagttcagtgcatgtccaggtagagacctccagcaaggatgatgtcaccataaccaccaacctgtctgcctcaggcgccttctacacactgctgcaagaccaagtccggaacagctactacatcggggccgatggctccttgcggctgctgctggccaacggcatggaggtggcgctgcagactgagccccacttgctggctggcaccgtcaaccccaccgtgggcaagaggaatgtcacgctgcccatcgacaacggcctcaacctggtggagtggcgccagcgcaaagagcaggctcggggccaggtcactgtctttgggcgccggctgcgggttcacaaccgaaatctcctatctctggactttgatcgcgtaacacgcacagagaagatctatgatgaccaccgcaagttcacccttcggattctgtacgaccaggcggggcggcccagcctctggtcacccagcagcaggctgaatggtgtcaacgtgacatactcccctgggggttacattgctggcatccagaggggcatcatgtctgaaagaatggaatacgaccaggcgggccgcatcacatccaggatcttcgctgatgggaagacatggagctacacatacttagagaagtccatggtgctgctactacacagccagaggcagtatatctttgagttcgacaagaatgaccgcctctcttctgtgacgatgcccaacgtggcgcggcagacactagagaccatccgctcagtgggctactacagaaacatctatcagccccctgagggcaatgcctcagtcatacaggacttcactgaggatgggcacctccttcacaccttctacctgggcactggccgcagggtgatatacaagtatggcaaactgtcaaagctggcagagacgctctatgacaccaccaaggtcagtttcacctatgacgagacggcaggcatgctgaagaccatcaacctacagaatgagggcttcacctgcaccatccgctaccgtcagattgggcccctgattgaccgacagatcttccgcttcactgaggaaggcatggtcaacgcccgttttgactacaactatgacaacagcttccgggtgaccagcatgcaggctgtgatcaacgagaccccactgcccattgatctctatcgctatgatgatgtgtcaggcaagacagagcagtttgggaagtttggtgtcatttactatgacattaaccagatcatcaccacagctgtcatgacccacaccaagcattttgatgcatatggcaggatgaaggaagtgcagtatgagatcttccgctcgctcatgtactggatgaccgtccagtatgataacatggggcgagtagtgaagaaggagctgaaggtaggaccctacgccaataccactcgctactcctatgagtatgatgctgacggccagctgcagacagtctccatcaatgacaagccactctggcgctacagctacgacctcaatgggaacctgcacttactgagccctgggaacagtgcacggctcacaccactacggtatgacatccgcgaccgcatcactcggctgggtgacgtgcaatacaagatggatgaggatggcttcctgaggcagcggggcggtgatatctttgagtacaactcagctggcctgctcatcaaggcctacaaccgggctggcagctggagtgtcaggtaccgctacgatggcctggggcggcgcgtgtccagcaagagcagccacagccaccacctgcagttcttctatgcagacctgaccaaccccaccaaggtcacccacctgtacaaccactccagctctgagatcacctccctctactacgacttgcaaggacacctctttgccatggagctgagcagtggtgatgagttttacatagcttgtgacaacatcgggacccctcttgctgtctttagtggaacaggtttgatgatcaagcaaatcctgtacacagcctatggggagatctacatggataccaaccccaactttcagatcatcataggctaccatggtggcctctatgatccactcaccaagcttgtccacatgggccggcgagattatgatgtgctggccggacgctggactagcccagaccacgagctgtggaagcaccttagtagcagcaacgtcatgccttttaatctctatatgttcaaaaacaacaaccccatcagcaactcccaggacatcaagtgcttcatgacagatgttaacagctggctgctcacctttggattccagctacacaacgtgatccctggttatcccaaaccagacatggatgccatggaaccctcctacgagctcatccacacacagatgaaaacgcaggagtgggacaacagcaagtctatcctcggggtacagtgtgaagtacagaagcagctcaaggcctttgtcaccttagaacggtttgaccagctctatggctccacaatcaccagctgccagcaggctccaaagaccaagaagtttgcatccagcggctcagtctttggcaagggggtcaagtttgccttgaaggatggccgagtgaccacagacatcatcagtgtggccaatgaggatgggcgaagggttgctgccatcttgaaccatgcccactacctagagaacctgcacttcaccattgatggggtggatacccattactttgtgaaaccaggaccttcagaaggtgacctggccatcctgggcctcagtggggggcggcgaaccctggagaatggggtcaacgtcactgtgtcccagatcaacacagtacttaatggcaggactagacgctacacagacatccagctccagtacggggcactgtgcttgaacacacgctacgggacaacgttggatgaggagaaggcacgggtcctggagctggcccggcagagagccgtgcgccaagcgtgggcccgcgagcagcagagactgcgggaaggggaggaaggcctgcgggcctggacagagggggagaagcagcaggtgctgagcacagggcgggtgcaaggctacgacggctttttcgtgatctctgtcgagcagtacccagaactgtcagacagcgccaacaacatccacttcatgagacagagcgagatgggccggaggtgacagagaggaccaaggacttcttgccaaagacagctactcttttgtggccgcatacctgactgtgttgtacttttaaaaaaatgattttttaacaagtgcagaaacaaaaagatactggttgcattgtaactcatgcaacatccttttttttagaaaagaaaaacacagatttggccttcgcacattttttgcaaagaacagaaggtatttttttctgtagtgtgatcacaatgaaaactttattgtcttttgttccctttttccttgaggatttttcccttgtcgtttggggtatgtatctcctctctgagatgcatctcctggggtgtgtcctcgtctgtccctaggtacccagtgtgatgtgggacatgaatgtctgtgctaacttgtctcatgtgcaaccctttcttcttcgactggggtcgggcaggagtaaagggagtgatgggccagtacaacaccccttccaagggggcctgggaggagggtctgtaggacctgaggctccttggcagggctcctgcagaagagtggtggatttcttctcaccttgttctctgcctccagaggatcatagatggcttcatcttgctccagggaatttcatggtgttgttcagcaccttttttaagctgccccaaactcctgttcaagctttctattttgatgctgaatgaaaccccctaccacttttgcaaatcctgtgtagttgtcggtgccacccccatgctgggatagagaaagtgtctcccaggtcctttcccccagaccagtgacataacatcctgggctcagagtcccatcctcccgggagggaaagcacccaggatgcctgtgattggttggtcctccatgatgttcctgttcatctcctcctttctcccaaagccagatgtgagaacgagcactgcacagcaagccttcaatgtgggcaccatgtccacagaacagaaggccacccatggcaaaggcatggcagtggtggcgagggcaccagcctgccttccgaggcaaagccctctctctatgactttgagtatcttccctccaccactcagccgccaccactgagacgtaggaatgtggagggaggtgcttggtggcctttgattctggaaaaatgcttaacaaaaaaagccagccaaagagaggaaggcataagctaagcatccttctaaccagttcccaaagtcccatctgcctccatgtaccagctgatcgcagagctggactggggcaggctgggcttccaggaaattcctgaagttctgaaacagcttcccctctagagaagcccacccaatgtgttttttagtgacaggaagaaaggagggaagagctgatgtggtgtggcctgcccatatcatacaaccccaccaggagcagggcagttcccaaggtgggtgcccgtagatctgggaggccaggctggcatgattcctgtgaagaactgtgcctgtgtcgtcagggagaggcctgagccctctcagaagcagggacagcccacacctgaagagcacgcccaagctgaggcagcagccagcaggctgggggagcagtgagggcagggggagtcacagccagagctgggagccccttgttcaaggattccattcctggttcatccgcctaattaccattgtcattaccactcacaggaggctctgggagatgggaggggaagccaaatgcttccttttaagctgggcttcttagaaaatggaacttttatgggttacatttacattaagtgtggaaaatgaattctgagtctgagctattccccgtggaaaccttgttggactgataagctcatggcacctctatagccttactcacatagtcttcagaatattacacaagttaatgaaactgagaaggtctgactgcatgaggatcggagcagcatgtagtctgggttctgcctggcagagggaggcaaccaaaacttcttggggagaggagatttcgccttaacgtcatcccactgggattagaggatgtgtttcgctaagtgctcttcctgtttccaaaaaaaaagccaccctgctgcagcagtgcgctttggcctgcttgtccactggttgcccattgcccctggatccagagctctactgagtcagatacagtgctctgcaggcctgctgtgggaggcatgagctggagatgggggctcccatctggcaggatcattcttggatgagatggaaaacagtttggcctgaagaacacaagttttgtcctccagaagggacttacgcctctcaaaatgtactcttcataccaagggcccttgggcaaagtgctcctgcccagttgatcagtcccatcctggctgcctgacatcagtgaagacctgctggggatgtctgctcagaggtcaggaacggcatgcggtccacaggaaccagctccctacgcttcccccacgccctgtccctcctccacagccccctccccaaaggaatagggtggacttttagggatcaaaaacagaattattgggtgtttcatttatttttttctttctttcttttttttttcatagagatggggtctcactatgttgcccaggctgttctcaaactcctggcctcaggcgatccaccttggcctcctgaagtgctggggttacaggtgtgagccactgcgcctggactgagtgtttgtttctttaaaggatcttatatttttcctgtgctacataccaccacagcagcccagcttctgtggggagagaagttgaaggatcccgaagctttagaaaaaggatctcagctgtggcacaggcagtgttatgcgcctcactgccacattggtgctgttgtattgaaggtggtgcttctggccttggcccttttgagttggtttccatttgggctgcaggtgactcagtgactccctcctcaagctgtcctcctgctaagaccagcagtcacaaacccatggcaagggtgagtgtgaaggcctaaccctgtgcctatgtaataggctccaagcatcgactcccatcctgagaggaccggcccttttgacactcaccaaccaaatctgttcattcgatagagtgaccaggcctccctcacctgcccaggtgtatgatcctacagttcctgccttctctcctaccccgcacagctgccaactggtcctacatcctcagcccctctgccaccaccttaaataggactttactgattccccaactttgtttttttgtaggatgagatttcctttttatcccacccccccacaccccaaacagacattgctggagggcagactggaggaaggggaaggcatgcaggtaaattactgccttgtcagcctctgaccctcatctctcagaattgttggctgagaattaacccaaggaccacaccagtgcctgatttctacttagggagagaggattggaaacgatccctaagaaactgactgagggtgagaatggccaggaggtgtgtgtccaaataaccaggagggggcacagaagatgatggcaaggcagactgggcagtgttttgtagacacagaacaaagaatcagaatttgaaaaaagaagaaaaacaaatcttcgcagctgcaactttaaagtatcacctttatagatggcagggatttccattatgcaaatggaatctaagatttcaatgtgaaatcttagaatgcagttttaccacttgcagtcttgtatttgtggtggccatgtggtgagggcggtgatgctgagctttctgcccaggaggaatgagctttcaagctctcagcagggtgtcaggcttggggatttgagcatccactgctcaaagtccaggctattctccagtcctcacggcagccactaagcccaggagccagacctggcccggggacacatctcctgagggatcccagaaagaacccagtctttcctttcccttggggtccttgttagaatgaaaacctctctatttaaggcacatcattcccagctaggtttatacacttgtctatattttactggaggaaagggaattaaaaaagaactctgcagttcaaggccctttcatttaaccttccaaaaacagcaaactcattttaaagactcattgctgaggtgatagagagaaaccttatcctctccaaccttcacattcacaaaaaccatccttgtgtacttgactgccctagacagtggtgactcttaggtttcattacgaatgtggaatatcagagtgtgggaaggcccaggcgagggccaatgttgtgtttcttaccccctctggaatgccaaaggcaaggtactaggtgacctcctggtccccaagaaaatgtgatttattctgagggcgaacagccaagggaggactagtctggagcacgctcggccgtcctggcaggagctgagcctcaggtgtctggcggtgccccagcagccctggattcacccaacaccagaatcccacttttctaaatccacctgttgttctgagcacctctgaacccgcagcttcggcaaaaggagtctgtaccaagctgcttctggatgaccaacactggagactctggccttaccatgtggaaatcattttcctgaagtctggaactaattttgagaagtttttttctcaacacttttgtgtttctaacactgtatcttgactgtgtaaataccaacaaggctgtaaataaatgcagatgtagataccttctagaaaaaaaaaagcataaaaacaaaaccagaagtgatcccgtgtagccttcgttgacaaataaagactattttgtgtttacaggtgtctggtggcctttgcttggagataaaggcttcctcttgcctgtcccagcccccgagccatcctgggtttgcacttccctgctggctgctatcaggatgacctgggagaggactcagtcctaggccccagggtccctctaaatccctccaggctgcagctctgtcaagagggatgtccagagggtctctaagaccctgaagcttgactttgcaattgcatgacaggaataaatatcacagctcctctgacatcactagtgcagcgtggctccccatcccactgctgccctcgttcagggacaggctgaaggggccaacgaacccaaccctcccagaggagggagccttgctccaccactgggcacacagagtcatccaccatgccactgccttccacaagggatgtgagccgttgcactttaaaaataaatgactgtatattcatca

SEQ ID NO: 342026 - DNA, 170 bp, Artificial Sequence
  derived and/or modified sequence
aaaagatcccgcaccatcctccaggatccaatggccttggagagagggctgcagggcccacggacattgctgactcttcagaacgtgctgacatggagccagaccactcggccctgagtgcggcgaggaccctgtttgtggatgtggaggagcgcgggccggaggccatg

SEQ ID NO: 342027 - DNA, 2454 bp, Artificial Sequence
  derived and/or modified sequence
ggggaagcacggaggaggaagccgccggtgcgtcgggacgggagcgcaggtgctcgggcacccgagctggagctccgcagccgccggtcatgtaccgctccaccaagggcgcctccaaggcgcgccgggaccagatcaacgccgagatccggaacctcaaggagctgctgccgctggccgaagcggacaaggtccggctgtcctacctgcacatcatgagcctcgcctgcatctacactcgcaagggcgtcttcttcgctggtggcactcctctggcgggccccacggggcttctctcagctcaagagcttgaggacatcgtagcggcactacccggctttctgcttgtgttcacagccgaggggaaattgctctacctgtctgagagtgtgagcgagcatctgggccactccatggtggacctggttgcccagggtgacagcatctacgacatcattgacccagctgaccacctcactgtgcgccagcaactcaccctgccctctgccctggacactgatcgcctcttccgctgccgcttcaacacctccaagtccctcaggcgccagagtgcaggcaacaaactcgtgcttattcgaggccgattccatgctcacccacctggagcctactgggcaggaaatcccgtgttcacagctttctgtgcccctctggagccgagaccccgcccaggtcctggccctggccctggccctgcctcgctcttcctggccatgttccagagccgccatgctaaagacctggctctactggacatctccgagagtggctgagagtggagatattcaggcagagatggtggtgaggctacaggccaagactggaggctgggcatggatttactgcctgttatactcagaaggtccagagggacccattactgccaataactacccaatcagtgacatggaagcctggagcctccgccagcagttgaactctgaagacacccaggcagcttatgtcctgggcactccgaccatgctgccctcattccctgaaaacattctttcccaggaagagtgctccagcactaacccactcttcaccgcagcactgggggctcccagaagcaccagcttccccagtgctcctgaactgagtgttgtctctgcatcagaagagcttccccgaccctccaaagaactggacttcagttacctgacattcccttctgggcctgagccttctctccaagcagaactaagcaaggatcttgtgtgcactccaccttacacgccccatcagccaggaggctgtgccttcctcttcagcctccatgagcccttccagacccatttgcccaccccatccagcactcttcaagaacagctgactccaagcactgcgaccttctctgatcagttgacgcccagcagtgcaaccttcccagatccactaactagcccactgcaaggccagttgactgaaacctcggtcagaagctatgaagaccagttgactccctgcacctccaccttcccagaccagctgcttcccagcacagccaccttcccagagcctctgggcagccctgcccatgaacagctgactcctcccagcacagcattccaagcacacctggacagccccagccaaaccttcccagagcaactgagccccaaccctaccaagacttactttgcccaggagggatgcagttttctctatgagaagttgcccccaagtcctagcagccctggtaatggggactgcacgctcttggccctagcccagctccggggccccctctctgtggatgtccccctggtgcccgaaggcctgctcacacctgaggcctctccagtcaagcagagtttcttccactactctgaaaaggagcagaatgagatagaccgtctcatccagcagattagccaattggctcagggcatggacagacccttctcagctgaggctggcactggcggactagagccacttggaggactggagcccctggactccaacctgtccctgtcaggggcaggcccccctgtgctcagcctggacctgaaaccctggaaatgccaggagctggacttcctggctgaccctgataacatgttcctggaagagacgcccgtggaagacatcttcatggatctctctaccccagatcccagtgaggaatggggctcaggggatcctgaggcagagggcccaggaggggccccatcgccttgcaacaacctgtccccagaagaccacagcttcctggaggacctggccacatatgaaaccgcctttgagacaggtgtctcagcattcccctatgatgggtttactgatgagttgcatcaactccagagccaagttcaagacagcttccatgaagatggaagtggaggggaaccaacgttttgaataagtctgtgacttaacgtcgtcaagtatggcatattgtcatcaagacgtggagccgctctccac

SEQ ID NO: 342028 - protein, 288 aa, Artificial Sequence
  derived and/or modified sequence
MPVEEFVAGWISGALGLVLGHPFDTVKVRLQTQTTYRGIVDCMVKIYRHESLLGFFKGMSFPIASIAVVNSVLFGVYSNTLLVLTATSHQERRAQPPSYMHIFLAGCTGGFLQAYCLAPFDLIKVRLQNQTEPRAQPGSPPPRYQGPVHCAASIFREEGPRGLFRGAWALTLRDTPTVGIYFITYEGLCRQYTPEGQNPSSATVLVAGGFAGIASWVAATPLDMIKSRMQMDGLRRRVYQGMLDCMVSSIRQEGLGVFFRGVTINSARAFPVNAVTFLSYEYLLRWWG

SEQ ID NO: 342029 - DNA, 867 bp, Artificial Sequence
  derived and/or modified sequence
atgcctgtggaggagttcgtcgccggatggatcagtggggccctgggcctggtcctggggcatccttttgacacagtaaaggtcaggctccagacacaaaccacatatcgtggaattgtagattgtatggtgaaaatttaccgtcacgagagtcttctcggtttctttaagggaatgagttttcccatcgccagtattgctgtcgtaaattcagtcctttttggcgtgtattccaacacactcctcgttctgaccgccacctcgcaccaggaacggcgggcccagcccccgtcttatatgcacattttcctggcgggatgcaccggaggttttcttcaagcctactgcctggctccattcgacttaatcaaagttcgtttacaaaatcagactgagccaagagctcaaccaggaagccctcccccaaggtaccaagggccagttcattgcgccgcaagtatttttcgcgaagaaggacctagaggcctgttccgaggggcttgggcactcacactcagggatacaccaactgtcgggatttacttcatcacttatgaggggttatgtcgccagtacaccccagaggggcagaacccttcttctgctactgtgctcgtggctgggggttttgccggtatagcatcatgggtggccgctaccccactggatatgatcaagtcacgcatgcagatggatggcctgcggcggcgggtttaccagggtatgctcgactgtatggtcagctctatccggcaagaagggctgggcgtgttctttagaggtgtgaccataaattctgctagagcctttccagttaacgctgtgacctttctgtcctatgagtatctactgaggtggtggggctag

SEQ ID NO: 342030 - DNA, 867 bp, Artificial Sequence
  derived and/or modified sequence
atgccagtggaggagtttgtcgcgggctggattagtggagctctgggtctggtgctgggccatccttttgacaccgtcaaggtgaggctgcaaactcagactacatatcgcggcatagtggactgtatggtcaaaatctacagacatgagtccctgttgggattctttaaggggatgtcgttcccaattgcttccatcgctgttgtgaatagcgtcctcttcggagtctacagtaatacccttttggttctgaccgccacctcgcaccaggagagacgcgcccaacccccttcctatatgcatatatttctggcaggttgtaccggcggttttctacaagcttactgtttagcaccctttgacctgattaaggtccgactgcagaatcagaccgagccgagggcacagcctgggtcaccccccccacggtatcagggaccagtacattgtgcagcctcaatctttcgagaggaggggccacggggattatttcgaggggcatgggccttgacattgcgagatactccaacagttggcatctatttcataacatacgagggcctttgccgccagtacactccagaaggacaaaatccgtctagcgcgaccgtacttgttgcaggaggctttgctgggatcgcctcgtgggtggccgcaaccccacttgacatgatcaagtcccgaatgcagatggatgggttgagaaggagggtctaccagggcatgctggactgcatggtctcaagtattcggcaagaaggcttgggcgtattctttcgcggggtgacaattaacagcgccagggcgttcccagtgaatgcagtcactttcctgtcttatgagtacctattgcgctggtggggatag

SEQ ID NO: 342031 - DNA, 867 bp, Artificial Sequence
  derived and/or modified sequence
atgcctgtggaggagtttgtggccggctggatcagcggggccctgggcctggtgctgggccacccctttgacacagtgaaggtgcggctgcagacccagaccacctaccggggcatcgtggactgcatggtgaagatctacagacatgagagcctgctgggcttcttcaagggcatgtccttccccatcgccagcattgctgtggtgaacagcgtgctgtttggagtgtacagcaacaccctgctggtgctgacagccaccagccaccaggagcggcgggcccagccccccagctacatgcacatcttcctggccggctgcaccggcggcttcctgcaggcctactgcctggccccctttgacctgatcaaggtgcggctgcagaaccagacagagccccgggcccagcccggcagccccccaccccgctaccagggccctgtgcactgtgccgccagcatcttccgggaggagggcccccggggcctcttccggggggcctgggccctgaccctgcgggacacccccaccgtgggcatctacttcatcacctatgagggcctgtgccggcagtacaccccagagggccagaaccccagcagcgccaccgtgctggtggccggcggctttgctggcatcgcctcctgggtggccgccacccccctggacatgatcaagagcaggatgcagatggatggcctgcggcggcgggtgtaccagggcatgctggactgcatggtgagcagcatccggcaggagggcctgggcgtcttcttccggggcgtgaccatcaacagcgcccgggccttccctgtgaatgctgtgaccttcctgtcctatgagtacctgctgcgctggtggggctag

SEQ ID NO: 342032 - DNA, 867 bp, Artificial Sequence
  derived and/or modified sequence
atgcccgtggaggagttcgtggccggctggatcagcggcgccctggggctggtgttgggacatccctttgacaccgtgaaagtgcggctgcagacgcagacgacctatagaggcattgtagactgcatggttaagatctatcggcatgaaagtctcctgggttttttcaaaggcatgagctttcctattgcctcaattgccgtcgtaaattctgtgctctttggcgtatatagtaataccctgctcgtgctcaccgccaccagccaccaggaacgcagggcccaacccccatcatacatgcacatcttccttgctggatgcaccggtggattccttcaggcctactgtcttgctcctttcgacctgattaaagtgaggttgcagaaccagaccgagcctagagcccagcctggcagccccccacccaggtatcaaggccctgtccattgtgcggcgagcatcttccgagaagaaggcccgcgcggtttgttccggggagcctgggcccttacgctgcgagataccccaaccgtcggcatatattttataacttatgagggcctgtgtcgacagtacacaccggaagggcagaaccctagctctgctacagtgctagtcgctggtgggtttgctggcatcgcttcatgggtggccgccaccccccttgacatgattaaatccagaatgcagatggatgggcttaggcgccgcgtgtatcaaggcatgttggactgcatggtgtcatctatcaggcaggaggggttgggagtgttctttaggggcgtgactattaatagcgcccgcgcttttccagtcaatgccgtgactttcctgagctacgaatacctccttcgttggtggggatag

SEQ ID NO: 342033 - DNA, 867 bp, Artificial Sequence
  derived and/or modified sequence
atgcccgtggaggagttcgtggccggctggatcagcggcgccctgggtttggtgttaggccatccgtttgatacagtcaaagtcagactgcagacccaaaccacctatagggggattgtggattgtatggtgaagatatatcgacatgagtccttgctggggttctttaaagggatgagctttccaatcgcatctatcgctgtggtcaactccgtcctgttcggagtgtactcaaacaccttgctggtcctgacagccacgagtcaccaggaacggcgagcgcaacctccttcctacatgcacattttcctagccggctgcacgggaggctttttgcaggcttattgtctggctccctttgaccttatcaaggtgaggctgcaaaatcaaacggaaccaagggcccagcccggttctcctcctcccagatatcagggtccagtccactgcgctgcttcaattttccgggaagaagggcccagggggctgtttagaggcgcatgggctctgaccctgcgggatactcctaccgtgggcatctacttcatcacttatgaaggactgtgcagacagtataccccggaaggccagaatcccagtagtgccactgtcttggtggctgggggctttgctggcatcgcatcttgggtcgctgccacccccctggacatgattaagtcacgaatgcaaatggacggtctgcgccggagagtgtatcagggaatgcttgactgtatggtctcctcaattcggcaagagggcctgggtgtgtttttccgaggggtcactatcaactctgcaagagcttttcctgtgaatgctgttaccttcttgtcctatgagtacctgttacggtggtgggggtag

SEQ ID NO: 342034 - DNA, 867 bp, Artificial Sequence
  derived and/or modified sequence
atgcctgtcgaggaatttgttgcaggttggatctctggagctttaggcctcgtgctggggcacccatttgatacggtgaaggtgagactgcagacacaaacaacctatcgcggtattgtggattgtatggtgaagatctatcgtcacgagagccttctgggtttcttcaagggaatgtcttttcctatcgccagcatagcagtggtcaacagcgtcttgtttggcgtttacagtaatacactgctggtattgacagcaacttcccaccaggaacggagagcacagcccccatcttacatgcacatcttcctggctgggtgtaccgggggattcctccaggcctactgcctcgctccctttgacctgattaaagtgcgccttcaaaaccaaaccgagcccagagcgcagcctggatcaccccctcccaggtaccagggtccagtacactgcgccgcatctattttcagggaggaggggccacggggacttttccgtggagcatgggccctgacacttagagacacccctaccgtgggtatatactttatcacctatgaggggctgtgccgacaatacacccccgaggggcaaaacccaagtagcgccaccgtcctcgtggccggaggttttgcaggtatcgcgagctgggtcgccgctactcccttggatatgattaaaagccgtatgcagatggatggactccggcgtagggtgtatcagggcatgctcgattgcatggtgtcatccattcgccaggagggcctcggagtgttcttcagaggtgttaccattaactcagcgagagccttccctgtgaatgccgtaacatttcttagctacgagtacctgctgagatggtggggctag

SEQ ID NO: 342035 - DNA, 867 bp, Artificial Sequence
  derived and/or modified sequence
atgcccgtggaggagttcgtggccggttggataagtggcgcattgggtttggttctgggtcacccatttgacacagtgaaggtgcggcttcagacccagacaacttatcggggaattgtggactgcatggtgaagatctacagacatgagagcttattggggtttttcaaggggatgtcctttccaattgcttcgatagccgtcgtgaactctgtgttgtttggcgtctacagtaataccctcctggtcctgacagcaaccagccaccaagagcgtcgcgcacagccaccttcctacatgcacattttcctcgcaggatgcacaggtggctttctgcaggcatactgtctggcccctttcgatttgataaaagtgagattgcagaatcaaaccgaaccacgggctcaacccggatcccccccaccccgatatcagggccctgtgcattgcgctgccagcatctttcgcgaggagggccctcggggtttgtttagaggcgcttgggccctgacccttcgcgatacacccacagtcggcatctacttcatcacctacgaggggctgtgtaggcaatacacaccagagggacagaatccatcttctgccacagttctcgttgcaggtggattcgcaggcattgcttcctgggttgcagccactccgctcgatatgattaaatcgagaatgcaaatggatggactccggaggcgcgtctaccagggaatgctggattgtatggttagctccattaggcaggagggccttggtgtgttcttcagaggagttacgattaattccgctcgcgcatttcctgttaacgcggtaacttttctatcttacgagtacctcttacggtggtggggctag

SEQ ID NO: 342036 - DNA, 2196 bp, Artificial Sequence
  derived and/or modified sequence
agaatggtgccattgcagatcaacacgcactttaaataatcaaaacccctatctttcccctgggaaggaggaagccgaggaaggctgtgtttctgactcacacgggggagtcgggggagtcgtaaacaaccctgaagagaacagccaggcctggcgctctgggcttggtcctgggacacccgtttgacactgtaaaggtgaggctgcagacccagaccacctaccggggcatcgttgattgcatggtcaagatttaccgccatgagtccctcctgggcttcttcaagggaatgagcttccccattgccagcatagctgtggtcaactctgtcctgtttggggtctatagcaacaccctgctggtgctcacggccacctcccaccaggagcggcgggcccagccgcccagctacatgcacatcttcctagcgggctgcaccggggggttcctgcaggcctactgtctggctccttttgacctcatcaaagtccggctacaaaaccagacagagccaagggcccagccagggagccccccaccccggtaccaggggcccgtgcactgtgcagcctccatcttccgggaggaggggccccgggggctgttccgaggagcctgggccctgacgctgagggacacccccacggtggggatctacttcatcacctatgaagggctctgtcgccagtacacaccagaaggccagaatcccagctcagccacggtgctggtggcagggggctttgcaggcattgcttcctgggtggcagccacgcccttagacatgatcaagtcccggatgcagatggatggactgagacgcagagtgtaccaggggatgctggactgcatggtgagcagcatccggcaggaaggactgggagtcttcttccggggggtcaccatcaacagtgcccgcgcctttcccgtcaatgctgtcaccttcctcagctacgaatatctcctccgctggtggggatgagccctgcggcaatgccagcagctccccatcaggcccacggcctggaggccagtttgagattggaggccaggttgaaagcttgcaaatcagtgcaagaggctcagcccttcctaaccaaggtgcctcccacccgcgcagatctgggctgggcagacacctgtgggagccggaagccagggggcctgtgcagcctccctgtgtagctggccttgactcctttgcctcccacatctgtgaaacagggagcatgaggcacaagtgagctggcaagtggtgctggtgacatcccagctcctgtcctgtgccttcacctctttttttttttttttttttttttgagatggagtctttctctgtcacccaggctggaatgcagtggcgtgatctcggctcactgcaacctccgcctttccaccttccgggttcaagcaactctcctgcctcagcctcccaagtagctgggactataggcgcccgccaccacacccagctaaatttttgtatttttagtagagacagggtttcaccatgtcagccaggatggtcttgatctcctgactttgtgatccgcccgcgtcggcctctcaaagtgctgggattacaggcgtgagccaccgcgcccggctgccttcacctcttaaggagctctgagactccacttctgagagtccctgcggcctcccacctccctgcctttcaaagctctctcccccatgacccaggataaccctatgtctcctcccccagaatccttcagtggctctcatcaccttcaggaaaagcccaaactccttccaccctccaggttcctccctccccacgaggctttgttctcctggggttgcttcctggaccctgaacaagttgtgctctcattggccgggcctggccagcagtgcacagtgcctggcaggttgactctaccatccccggggctggccccgctctcctccgagacccaggctgagcccagtcccctcacccttccttgacttacctccccacctgaggctgactttggggttcccagacaccctacccacacacatgccttgatcatagcacttgcctgcgcttcttcagagtcattaatttgcttctcggcttccccactggactgtgagctgcctgaggtcagggattgcgctttggatggtttccagcctgagcctggtgcttgaacagacgtgtgcaataaatgctcgttaaatga

SEQ ID NO: 342037 - DNA, 2286 bp, Artificial Sequence
  derived and/or modified sequence
agatccttgaaagggttttggttttgactgagcagaatggtgccattgcagatcaacacgcactttaaataatcaaaacccctatctttcccctgggaaggaggaagccgaggaaggctgtgtttctgactcacacgggggagtcgggggagtcgtaaacaaccctgaagagaacagccaggcctgttcccgcaagcccagacaatgccggtggaggaatttgtggctggctggatctctggcgctctgggcttggtcctgggacacccgtttgacactgtaaaggtgaggctgcagacccagaccacctaccggggcatcgttgattgcatggtcaagatttaccgccatgagtccctcctgggcttcttcaagggaatgagcttccccattgccagcatagctgtggtcaactctgtcctgtttggggtctatagcaacaccctgctggtgctcacggccacctcccaccaggagcggcgggcccagccgcccagctacatgcacatcttcctagcgggctgcaccggggggttcctgcaggcctactgtctggctccttttgacctcatcaaagtccggctacaaaaccagacagagccaagggcccagccagggagccccccaccccggtaccaggggcccgtgcactgtgcagcctccatcttccgggaggaggggccccgggggctgttccgaggagcctgggccctgacgctgagggacacccccacggtggggatctacttcatcacctatgaagggctctgtcgccagtacacaccagaaggccagaatcccagctcagccacggtgctggtggcagggggctttgcaggcattgcttcctgggtggcagccacgcccttagacatgatcaagtcccggatgcagatggatggactgagacgcagagtgtaccaggggatgctggactgcatggtgagcagcatccggcaggaaggactgggagtcttcttccggggggtcaccatcaacagtgcccgcgcctttcccgtcaatgctgtcaccttcctcagctacgaatatctcctccgctggtggggatgagccctgcggcaatgccagcagctccccatcaggcccacggcctggaggccagtttgagattggaggccaggttgaaagcttgcaaatcagtgcaagaggctcagcccttcctaaccaaggtgcctcccacccgcgcagatctgggctgggcagacacctgtgggagccggaagccagggggcctgtgcagcctccctgtgtagctggccttgactcctttgcctcccacatctgtgaaacagggagcatgaggcacaagtgagctggcaagtggtgctggtgacatcccagctcctgtcctgtgccttcacctctttttttttttttttttttttttgagatggagtctttctctgtcacccaggctggaatgcagtggcgtgatctcggctcactgcaacctccgcctttccaccttccgggttcaagcaactctcctgcctcagcctcccaagtagctgggactataggcgcccgccaccacacccagctaaatttttgtatttttagtagagacagggtttcaccatgtcagccaggatggtcttgatctcctgactttgtgatccgcccgcgtcggcctctcaaagtgctgggattacaggcgtgagccaccgcgcccggctgccttcacctcttaaggagctctgagactccacttctgagagtccctgcggcctcccacctccctgcctttcaaagctctctcccccatgacccaggataaccctatgtctcctcccccagaatccttcagtggctctcatcaccttcaggaaaagcccaaactccttccaccctccaggttcctccctccccacgaggctttgttctcctggggttgcttcctggaccctgaacaagttgtgctctcattggccgggcctggccagcagtgcacagtgcctggcaggttgactctaccatccccggggctggccccgctctcctccgagacccaggctgagcccagtcccctcacccttccttgacttacctccccacctgaggctgactttggggttcccagacaccctacccacacacatgccttgatcatagcacttgcctgcgcttcttcagagtcattaatttgcttctcggcttccccactggactgtgagctgcctgaggtcagggattgcgctttggatggtttccagcctgagcctggtgcttgaacagacgtgtgcaataaatgctcgttaaatgatg

SEQ ID NO: 342038 - DNA, 3088 bp, Artificial Sequence
  derived and/or modified sequence
actgcaacagctgcctctcgggttcaagcgattctcctgcctcagcatcccaagtagctgggactacaggcgcccgtcatcacacccggctaatttttgtatttttggtagagatggggtttcactatgttggtcaggctggtctcgaactcctgacctcaggtggtccttccgcctcggcctcccaaagtgctgggattacaggcgtgagccactgcgcctggcctgtatcagttatagtttttgcaaaggcagtttcaggaataagaagcagaaccaggactgcagcccaagccaccacgagaggccagtctttggggatggtcttttaggatgatctttgggggtggcccaaggagccccaggcagctccagaggcaggagtcactcaggatttattgagagcccaccctgtgccacccgctgtgcacagaacacccagagatccctgtccagacagacaagttcttcccatcgtatgttggcgtgataactgtgatggagaaagagaggaagagccagcagtgcctccggctggggaggcggggcagacctcacccaggtggtgacatttgagccccagctggaggggtgccagggcaagagtgcccaggaagagggaagagccagtccacaggcctggagacagaaggctgactgaagaagagtctggaggctcgggtggctgcagcagagaaagcaagggggaggaagccgaggaaggctgtgtttctgactcacacgggggagtcgggggagtcgtaaacaaccctgaagagaacagccaggcctgttcccgcaagcccagacaatgccggtggaggaatttgtggctggctggatctctggtgagacatttttcttccttctgtcacatcacacccaatgggccctgcagttctgcgtggccagctggcagcagggcctgctctggatcccggcgacgacattatgagttgaagaaagaagagtaaagctctcggagagacttgcttcctgggcctggcacgagggccctcactcatagcaccctcttgtcaccacaggcgctctgggcttggtcctgggacacccgtttgacactgtaaaggtgaggctgcagacccagaccacctaccggggcatcgttgattgcatggtcaagatttaccgccatgagtccctcctgggcttcttcaagggaatgagcttccccattgccagcatagctgtggtcaactctgtcctgtttggggtctatagcaacaccctgctggtgctcacggccacctcccaccaggagcggcgggcccagccgcccagctacatgcacatcttcctagcgggctgcaccggggggttcctgcaggcctactgtctggctccttttgacctcatcaaagtccggctacaaaaccagacagagccaagggcccagccagggagccccccaccccggtaccaggggcccgtgcactgtgcagcctccatcttccgggaggaggggccccgggggctgttccgaggagcctgggccctgacgctgagggacacccccacggtggggatctacttcatcacctatgaagggctctgtcgccagtacacaccagaaggccagaatcccagctcagccacggtgctggtggcagggggctttgcaggcattgcttcctgggtggcagccacgcccttagacatgatcaagtcccggatgcagatggatggactgagacgcagagtgtaccaggggatgctggactgcatggtgagcagcatccggcaggaaggactgggagtcttcttccggggggtcaccatcaacagtgcccgcgcctttcccgtcaatgctgtcaccttcctcagctacgaatatctcctccgctggtggggatgagccctgcggcaatgccagcagctccccatcaggcccacggcctggaggccagtttgagattggaggccaggttgaaagcttgcaaatcagtgcaagaggctcagcccttcctaaccaaggtgcctcccacccgcgcagatctgggctgggcagacacctgtgggagccggaagccagggggcctgtgcagcctccctgtgtagctggccttgactcctttgcctcccacatctgtgaaacagggagcatgaggcacaagtgagctggcaagtggtgctggtgacatcccagctcctgtcctgtgccttcacctctttttttttttttttttttttttgagatggagtctttctctgtcacccaggctggaatgcagtggcgtgatctcggctcactgcaacctccgcctttccaccttccgggttcaagcaactctcctgcctcagcctcccaagtagctgggactataggcgcccgccaccacacccagctaaatttttgtatttttagtagagacagggtttcaccatgtcagccaggatggtcttgatctcctgactttgtgatccgcccgcgtcggcctctcaaagtgctgggattacaggcgtgagccaccgcgcccggctgccttcacctcttaaggagctctgagactccacttctgagagtccctgcggcctcccacctccctgcctttcaaagctctctcccccatgacccaggataaccctatgtctcctcccccagaatccttcagtggctctcatcaccttcaggaaaagcccaaactccttccaccctccaggttcctccctccccacgaggctttgttctcctggggttgcttcctggaccctgaacaagttgtgctctcattggccgggcctggccagcagtgcacagtgcctggcaggttgactctaccatccccggggctggccccgctctcctccgagacccaggctgagcccagtcccctcacccttccttgacttacctccccacctgaggctgactttggggttcccagacaccctacccacacacatgccttgatcatagcacttgcctgcgcttcttcagagtcattaatttgcttctcggcttccccactggactgtgagctgcctgaggtcagggattgcgctttggatggtttccagcctgagcctggtgcttgaacagacgtgtgcaataaatgctcgttaaatg

SEQ ID NO: 342039 - DNA, 2138 bp, Artificial Sequence
  derived and/or modified sequence
ggggaattcaactctgtctcctctgctggagccaccagttcccgcaagcccagacaatgccggtggaggaatttgtggctggctggatctctggcgctctgggcttggtcctgggacacccgtttgacactgtaaaggtgaggctgcagacccagaccacctaccggggcatcgttgattgcatggtcaagatttaccgccatgagtccctcctgggcttcttcaagggaatgagcttccccattgccagcatagctgtggtcaactctgtcctgtttggggtctatagcaacaccctgctggtgctcacggccacctcccaccaggagcggcgggcccagccgcccagctacatgcacatcttcctagcgggctgcaccggggggttcctgcaggcctactgtctggctccttttgacctcatcaaagtccggctacaaaaccagacagagccaagggcccagccagggagccccccaccccggtaccaggggcccgtgcactgtgcagcctccatcttccgggaggaggggccccgggggctgttccgaggagcctgggccctgacgctgagggacacccccacggtggggatctacttcatcacctatgaagggctctgtcgccagtacacaccagaaggccagaatcccagctcagccacggtgctggtggcagggggctttgcaggcattgcttcctgggtggcagccacgcccttagacatgatcaagtcccggatgcagatggatggactgagacgcagagtgtaccaggggatgctggactgcatggtgagcagcatccggcaggaaggactgggagtcttcttccggggggtcaccatcaacagtgcccgcgcctttcccgtcaatgctgtcaccttcctcagctacgaatatctcctccgctggtggggatgagccctgcggcaatgccagcagctccccatcaggcccacggcctggaggccagtttgagattggaggccaggttgaaagcttgcaaatcagtgcaagaggctcagcccttcctaaccaaggtgcctcccacccgcgcagatctgggctgggcagacacctgtgggagccggaagccagggggcctgtgcagcctccctgtgtagctggccttgactcctttgcctcccacatctgtgaaacagggagcatgaggcacaagtgagctggcaagtggtgctggtgacatcccagctcctgtcctgtgccttcacctctttttttttttttttttttttttgagatggagtctttctctgtcacccaggctggaatgcagtggcgtgatctcggctcactgcaacctccgcctttccaccttccgggttcaagcaactctcctgcctcagcctcccaagtagctgggactataggcgcccgccaccacacccagctaaatttttgtatttttagtagagacagggtttcaccatgtcagccaggatggtcttgatctcctgactttgtgatccgcccgcgtcggcctctcaaagtgctgggattacaggcgtgagccaccgcgcccggctgccttcacctcttaaggagctctgagactccacttctgagagtccctgcggcctcccacctccctgcctttcaaagctctctcccccatgacccaggataaccctatgtctcctcccccagaatccttcagtggctctcatcaccttcaggaaaagcccaaactccttccaccctccaggttcctccctccccacgaggctttgttctcctggggttgcttcctggaccctgaacaagttgtgctctcattggccgggcctggccagcagtgcacagtgcctggcaggttgactctaccatccccggggctggccccgctctcctccgagacccaggctgagcccagtcccctcacccttccttgacttacctccccacctgaggctgactttggggttcccagacaccctacccacacacatgccttgatcatagcacttgcctgcgcttcttcagagtcattaatttgcttctcggcttccccactggactgtgagctgcctgaggtcagggattgcgctttggatggtttccagcctgagcctggtgcttgaacagacgtgtgcaataaatgctcgttaaatgatg

SEQ ID NO: 342040 - DNA, 867 bp, Artificial Sequence
  derived and/or modified sequence
atgcccgtggaggagttcgtggccggctggatcagcggcgccctgggcctggtgctgggccaccccttcgacaccgtgaaggtgagactgcagacccagaccacctacagaggcatcgtggactgcatggtgaagatctacagacacgagagcctgctgggcttcttcaagggcatgagcttccccatcgccagcatcgccgtggtgaacagcgtgctgttcggcgtgtacagcaacaccctgctggtgctgaccgccaccagccaccaggagagaagagcccagccccccagctacatgcacatcttcctggccggctgcaccggcggcttcctgcaggcctactgcctggcccccttcgacctgatcaaggtgagactgcagaaccagaccgagcccagagcccagcccggcagccccccccccagataccagggccccgtgcactgcgccgccagcatcttcagagaggagggccccagaggcctgttcagaggcgcctgggccctgaccctgagagacacccccaccgtgggcatctacttcatcacctacgagggcctgtgcagacagtacacccccgagggccagaaccccagcagcgccaccgtgctggtggccggcggcttcgccggcatcgccagctgggtggccgccacccccctggacatgatcaagagcagaatgcagatggacggcctgagaagaagagtgtaccagggcatgctggactgcatggtgagcagcatcagacaggagggcctgggcgtgttcttcagaggcgtgaccatcaacagcgccagagccttccccgtgaacgccgtgaccttcctgagctacgagtacctgctgagatggtggggctag

SEQ ID NO: 342041 - protein, 118 aa, Artificial Sequence
  derived and/or modified sequence
MPVEEFVAGWISGALGLVLGHPFDTVKVRLQTQTTYRGIVDCMVKIYRHESLLGFFKGMSFPIASIAVVNSVLFGVYSNTLLVLTATSHQERRAQPPSYMHIFLAGCTGGFLQAYCLA

SEQ ID NO: 342042 - DNA, 357 bp, Artificial Sequence
  derived and/or modified sequence
atgcctgtagaggaattcgtcgcaggctggatatctggagcgttgggcctcgtgttgggtcatccgttcgacaccgtgaaagtgcggttacagacgcaaacaacttatcgaggcattgtggactgcatggtaaaaatttatcgtcatgagtcattgctgggattctttaagggtatgtccttccccattgcaagtatcgcagtggttaactccgtgctgttcggagtgtattcaaatacactactggttctgaccgcgacgtcgcatcaagaaagacgggcacaacctccctcgtatatgcacatcttcctggccggttgtacaggaggctttttgcaagcttactgcctggcgtag

SEQ ID NO: 342043 - DNA, 357 bp, Artificial Sequence
  derived and/or modified sequence
atgcctgtggaggagtttgtggccggctggatcagcggggccctgggcctggtgctgggccacccctttgacacagtgaaggtgcggctgcagacccagaccacctaccggggcatcgtggactgcatggtgaagatctacagacatgagagcctgctgggcttcttcaagggcatgtccttccccatcgccagcattgctgtggtgaacagcgtgctgtttggagtgtacagcaacaccctgctggtgctgacagccaccagccaccaggagcggcgggcccagccccccagctacatgcacatcttcctggccggctgcaccggcggcttcctgcaggcctactgcctggcctag

SEQ ID NO: 342044 - DNA, 357 bp, Artificial Sequence
  derived and/or modified sequence
atgcccgtggaggagttcgtggccggctggatcagcggcgccctgggcttggtgctcggacacccgtttgataccgtgaaagttcgcctgcagacacagacaacctataggggaatagtggattgtatggtcaagatataccggcacgaaagtctgcttggattcttcaagggtatgtcattccctatagctagcatcgccgtcgttaattccgtcctatttggagtatattcaaacaccctgctagtccttaccgctacttcccatcaagaacgcagggcccagccaccttcttatatgcatattttcctggccggctgcactggggggtttcttcaggcctactgcctggcctag

SEQ ID NO: 342045 - DNA, 357 bp, Artificial Sequence
  derived and/or modified sequence
atgccagtcgaagagttcgtcgcagggtggataagcggcgctcttggactagtcctcggacatcccttcgacacggtcaaggtccgtttgcagacccagaccacatacagggggatagtggactgcatggtcaagatataccgccacgagtctctgctaggtttttttaaggggatgtcctttccaattgcctcaatcgccgtagtgaatagcgtcctcttcggggtttactccaacacgcttctggtcctcactgctacctcccaccaagaaagacgagctcagccaccgtcctatatgcacattttcttagctggctgcactgggggatttttgcaggcgtattgtttggcatag

SEQ ID NO: 342046 - DNA, 561 bp, Artificial Sequence
  derived and/or modified sequence
cacagatccttgaaagggttttggttttgactgagcagaatggtgccattgcagatcaacacgcactttaaataatcaaaacccctatctttcccctgggaaggaggaagccgaggaaggctgtgtttctgactcacacgggggagtcgggggagtcgtaaacaaccctgaagagaacagccaggcctgttcccgcaagcccagacaatgccggtggaggaatttgtggctggctggatctctggcgctctgggcttggtcctgggacacccgtttgacactgtaaaggtgaggctgcagacccagaccacctaccggggcatcgttgattgcatggtcaagatttaccgccatgagtccctcctgggcttcttcaagggaatgagcttccccattgccagcatagctgtggtcaactctgtcctgtttggggtctatagcaacaccctgctggtgctcacggccacctcccaccaggagcggcgggcccagccgcccagctacatgcacatcttcctagcgggctgcaccggggggttcctgcaggcctactgtctggct

SEQ ID NO: 342047 - DNA, 357 bp, Artificial Sequence
  derived and/or modified sequence
atgcccgtggaggagttcgtggccggctggatcagcggcgccctgggcctggtgctgggccaccccttcgacaccgtgaaggtgagactgcagacccagaccacctacagaggcatcgtggactgcatggtgaagatctacagacacgagagcctgctgggcttcttcaagggcatgagcttccccatcgccagcatcgccgtggtgaacagcgtgctgttcggcgtgtacagcaacaccctgctggtgctgaccgccaccagccaccaggagagaagagcccagccccccagctacatgcacatcttcctggccggctgcaccggcggcttcctgcaggcctactgcctggcctag

SEQ ID NO: 342048 - protein, 246 aa, Artificial Sequence
  derived and/or modified sequence
MVKIYRHESLLGFFKGMSFPIASIAVVNSVLFGVYSNTLLVLTATSHQERRAQPPSYMHIFLAGCTGGFLQAYCLAPFDLIKVRLQNQTEPRAQPGSPPPRYQGPVHCAASIFREEGPRGLFRGAWALTLRDTPTVGIYFITYEGLCRQYTPEGQNPSSATVLVAGGFAGIASWVAATPLDMIKSRMQMDGLRRRVYQGMLDCMVSSIRQEGLGVFFRGVTINSARAFPVNAVTFLSYEYLLRWWG

SEQ ID NO: 342049 - DNA, 741 bp, Artificial Sequence
  derived and/or modified sequence
atggtcaagatctatagacatgagagcctattgggcttcttcaaggggatgtctttcccgatcgcctccatcgctgtggttaattccgtgctctttggcgtatactccaacacactgttggtactcaccgctacttcccaccaggagcgacgcgcgcagcctccatcatacatgcatatctttttagccggctgcaccggcggcttcttacaggcctattgcctagccccttttgaccttatcaaggttcggcttcagaatcaaactgagccaagggctcagccaggttctcctcctccgagataccagggtccagtccactgcgccgcaagtatcttccgtgaggagggaccgcggggcttattcaggggggcttgggcactgaccctgcgcgacacccctaccgtaggaatatacttcattacctacgagggtctctgccgtcaatatacgccagaaggccaaaatccaagcagcgcgacagtgctggtcgccggaggcttcgccggaatcgcaagctgggtcgctgccactccactggacatgattaagagtcgtatgcagatggacggcctgcgccggcgcgtgtatcagggaatgctcgattgtatggtctcttctataagacaggagggtctgggggttttttttagaggcgtgactattaattcagcaagagctttcccggtcaacgctgtgaccttcctgtcctacgaatatctgctccgttggtggggttag

SEQ ID NO: 342050 - DNA, 741 bp, Artificial Sequence
  derived and/or modified sequence
atggtgaagatctaccgacacgaaagcctgcttggattcttcaagggaatgtcatttccaatcgcctcaattgcggtggtgaactctgtgctttttggagtgtattccaatactttgctcgttttaacggcgactagccatcaagaaagaagggctcagccgccctcctatatgcacatctttctagccggatgcacaggcggctttctccaggcttattgtctcgccccttttgatctcatcaaagtaaggctgcagaaccagacagagccgcgcgcccagccgggaagtcctccaccccgatatcaggggcctgtgcattgcgccgcatccattttccgggaggaggggcctcgcgggctgtttagaggcgcgtgggccctcaccttaagggacacaccgaccgttgggatctatttcataacttacgaggggctttgccggcagtacaccccagagggacagaatcccagcagcgctactgtcctggtggcagggggctttgccggcatcgcgtcttgggtggctgcgacccccttggacatgatcaagtctagaatgcagatggacggcctgaggaggagggtttatcaaggcatgcttgactgtatggtgagctccatcaggcaagagggcctgggggtgttctttagaggcgtcactatcaatagtgcaagggccttccctgtaaacgccgtgaccttcctctcctatgagtatctcctccgctggtgggggtag

SEQ ID NO: 342051 - DNA, 741 bp, Artificial Sequence
  derived and/or modified sequence
atggtgaagatctacagacatgagagcctgctgggcttcttcaagggcatgtccttccccatcgccagcattgctgtggtgaacagcgtgctgtttggagtgtacagcaacaccctgctggtgctgacagccaccagccaccaggagcggcgggcccagccccccagctacatgcacatcttcctggccggctgcaccggcggcttcctgcaggcctactgcctggccccctttgacctgatcaaggtgcggctgcagaaccagacagagccccgggcccagcccggcagccccccaccccgctaccagggccctgtgcactgtgccgccagcatcttccgggaggagggcccccggggcctcttccggggggcctgggccctgaccctgcgggacacccccaccgtgggcatctacttcatcacctatgagggcctgtgccggcagtacaccccagagggccagaaccccagcagcgccaccgtgctggtggccggcggctttgctggcatcgcctcctgggtggccgccacccccctggacatgatcaagagcaggatgcagatggatggcctgcggcggcgggtgtaccagggcatgctggactgcatggtgagcagcatccggcaggagggcctgggcgtcttcttccggggcgtgaccatcaacagcgcccgggccttccctgtgaatgctgtgaccttcctgtcctatgagtacctgctgcgctggtggggctag

SEQ ID NO: 342052 - DNA, 741 bp, Artificial Sequence
  derived and/or modified sequence
atggtgaagatctaccggcacgagagcctgctgggcttcttcaagggaatgagtttcccaattgcttctatcgcggtggtaaattcagtcttattcggcgtgtatagtaatactctgctcgttctgaccgccacctctcatcaggaaaggcgagcacagccaccatcctatatgcatatcttcttagctggatgcaccggcggctttctgcaggcctactgcctcgcacccttcgatctgattaaagttcgcctccagaatcagaccgagccccgggcacagcctggctcccctccaccgagataccagggcccagtgcattgtgcagcatccatttttagagaggaggggccccgcgggctcttccgcggtgcatgggccctgaccctgagggatactcctacagtgggcatctattttatcacctacgaaggactgtgccggcaatataccccagaaggacagaacccatctagtgccaccgttttggtggccggggggttcgctggtatcgcatcctgggttgccgccactcccctcgatatgattaagtcccggatgcagatggatggcctgaggcggagagtgtatcagggaatgctggactgcatggtgagcagtatcaggcaggaagggctcggggtgtttttccgtggcgtgactattaattcagctcgggccttccccgtaaatgctgtgacgttcctgagttacgagtatttgcttagatggtgggggtag

SEQ ID NO: 342053 - DNA, 741 bp, Artificial Sequence
  derived and/or modified sequence
atggtgaagatctaccggcacgagagcctgctgggcttcttcaagggaatgtcctttccaatcgcgtcgatcgctgtggtcaacagcgtgctctttggcgtgtacagtaatacactgctggttttgaccgcaaccagccaccaggaaagaagagcccagccgccttcctacatgcacattttcctggcaggctgcaccggggggttcctgcaggcctactgcttggccccatttgacctcatcaaggtccgattgcagaaccagacggagccgcgggcgcagccaggcagccccccgccccgttaccaaggaccagttcactgcgcggcatccatctttcgcgaggaggggcccaggggcctctttcggggggcatgggctctgacccttagggacacccctactgtgggtatttatttcattacgtacgaggggttgtgccggcaatacactccggaagggcagaaccctagtagcgcgactgtgcttgtagctggcggatttgctggtatcgccagttgggtcgcggccactcctctcgacatgataaagtcacgaatgcagatggacggcttgagacggcgggtataccagggcatgttggactgcatggtatcctctattagacaggagggcctcggcgttttctttaggggagtgacaattaactctgccagagcatttccagtgaatgccgtaacattcttgagttacgagtacttactgcggtggtgggggtag

SEQ ID NO: 342054 - DNA, 741 bp, Artificial Sequence
  derived and/or modified sequence
atggtgaagatctatcgccatgaatcactgctgggattcttcaagggtatgtccttcccaatagcttccatcgccgtcgtcaattctgtcctgttcggagtctacagtaatacattgttagtgttgaccgccacaagccaccaggagaggcgggcacagccacccagttatatgcatatctttctcgccggttgcacaggcggtttcctgcaggcttattgtctggcgcctttcgaccttataaaagtcagactgcagaaccagactgaacccagagcccagcccggttccccgccacctcgctaccaggggcctgtgcattgcgccgcaagcatttttcgagaagagggacccagagggttattccgtggggcttgggccctgacactgcgagacacccccacagttggtatctattttatcacatacgagggtctgtgccgccagtatactcctgaggggcagaatccttccagcgcgaccgtcctcgtagctggaggctttgccggtatagcctcttgggtagccgcaacaccccttgacatgattaagtccaggatgcagatggatggactccgacgtagagtttaccaaggcatgctggactgtatggttagttccattcgacaagagggccttggcgttttctttcgaggggtaacaatcaacagcgctcgcgcatttccagtaaatgccgtgaccttcctgtcatacgagtatctgctgaggtggtggggatag

SEQ ID NO: 342055 - DNA, 741 bp, Artificial Sequence
  derived and/or modified sequence
atggttaaaatctataggcatgaatcactgcttgggtttttcaagggcatgagcttccccatcgcatccattgccgtggtgaactctgtgctgttcggagtctattccaacacgcttctggttctcaccgctacgtcacaccaagagcgacgggctcagccacccagctacatgcatatattcctggcgggttgcacagggggattcctgcaggcctattgtcttgccccattcgacctgatcaaggtaaggctccagaatcagaccgagccacgtgcacaaccaggttctccaccgccacgctatcagggtcctgtccattgtgcggcttccatctttcgcgaagaaggaccgcgtggtctgtttaggggagcctgggcgttgacactacgtgacacaccgaccgttggcatctacttcatcacttacgaagggctgtgcaggcagtacacaccggagggccaaaatccttcttctgccactgtcctggtagccggtggatttgccggtattgcttcttgggttgcggctaccccactcgatatgataaagtctcgcatgcaaatggatggactgcgcaggcgcgtgtatcagggcatgctcgactgtatggtgtcttccatcagacaagagggactgggtgttttcttccgcggagtgactatcaatagtgcgagggcctttcccgtgaatgcggtgacgttcctcagttatgagtacctgttgaggtggtggggctag

SEQ ID NO: 342056 - DNA, 741 bp, Artificial Sequence
  derived and/or modified sequence
atggtgaagatctacagacacgagagcctgctgggcttcttcaagggcatgagcttccccatcgccagcatcgccgtggtgaacagcgtgctgttcggcgtgtacagcaacaccctgctggtgctgaccgccaccagccaccaggagagaagagcccagccccccagctacatgcacatcttcctggccggctgcaccggcggcttcctgcaggcctactgcctggcccccttcgacctgatcaaggtgagactgcagaaccagaccgagcccagagcccagcccggcagccccccccccagataccagggccccgtgcactgcgccgccagcatcttcagagaggagggccccagaggcctgttcagaggcgcctgggccctgaccctgagagacacccccaccgtgggcatctacttcatcacctacgagggcctgtgcagacagtacacccccgagggccagaaccccagcagcgccaccgtgctggtggccggcggcttcgccggcatcgccagctgggtggccgccacccccctggacatgatcaagagcagaatgcagatggacggcctgagaagaagagtgtaccagggcatgctggactgcatggtgagcagcatcagacaggagggcctgggcgtgttcttcagaggcgtgaccatcaacagcgccagagccttccccgtgaacgccgtgaccttcctgagctacgagtacctgctgagatggtggggctag

SEQ ID NO: 342057 - protein, 363 aa, Artificial Sequence
  derived and/or modified sequence
MRWVRHDAPARRGQLRRLLEHVRLPLLAPAYFLEKVEADELLQACGECRPLLLEARACFILGREAGALRTRPRRFMDLAEVIVVIGGCDRKGLLKLPFADAYHPESQRWTPLPSLPGYTRSEFAACALRNDVYVSGGHINSHDVWMFSSHLHTWIKVASLHKGRWRHKMAVVQGQLFAVGGFDGLRRLHSVERYDPFSNTWAAAAPLPEAVSSAAVASCAGKLFVIGGARQGGVNTDKVQCFDPKEDRWSLRSPAPFSQRCLEAVSLEDTIYVMGGLMSKIFTYDPGTDVWGEAAVLPSPVESCGVTVCDGKVHILGGRDDRGESTDKVFTFDPSSGQVEVQPSLQRCTSSHGCVTIIQSLGR

SEQ ID NO: 342058 - protein, 583 aa, Artificial Sequence
  derived and/or modified sequence
MRQGHAPEESEPGCEAPCAGPCHAQRVLQALNAYRRSGTLTDVVLRAGGRDFPCHRAALSAGSAYFRSLFAAGRPERGPAVVPVVPVAPEAPGTSPAGAAAALAVVLDYVYGAGVRLRAEDEAAAVLALAERLGVAGLREACVRFLEGRLRAANSLALRRVAAAFSLAPLAERCGRVLRQAFAEVARHADFLELAPDEVVALLADPALGVAREEAVFEAAMRWVRHDAPARRGQLRRLLEHVRLPLLAPAYFLEKVEADELLQACGECRPLLLEARACFILGREAGALRTRPRRFMDLAEVIVVIGGCDRKGLLKLPFADAYHPESQRWTPLPSLPGYTRSEFAACALRNDVYVSGGHINSHDVWMFSSHLHTWIKVASLHKGRWRHKMAVVQGQLFAVGGFDGLRRLHSVERYDPFSNTWAAAAPLPEAVSSAAVASCAGKLFVIGGARQGGVNTDKVQCFDPKEDRWSLRSPAPFSQRCLEAVSLEDTIYVMGGLMSKIFTYDPGTDVWGEAAVLPSPVESCGVTVCDGKVHILGGRDDRGESTDKVFTFDPSSGQVEVQPSLQRCTSSHGCVTIIQSLGR

SEQ ID NO: 342059 - protein, 171 aa, Artificial Sequence
  derived and/or modified sequence
MEKRLQEAQLYKEEGNQRYREGKYRDAVSRYHRALLQLRGLDPSLPSPLPNLGPQGPALTPEQENILHTTQTDCYNNLAACLLQMEPVNYERVREYSQKVLERQPDNAKALYRAGVAFFHLQDYDQARHYLLAAVNRQPKDANVRRYLQLTQSELSSYHRKEKQLYLGMFG

SEQ ID NO: 342060 - protein, 215 aa, Artificial Sequence
  derived and/or modified sequence
MLNKEEELELLEALWSFSTSPAHSLLLPGRGGAGPIERRKPVSQAFSRPQQFLSRALLEFFGKSHPPPHRLFRKSLNVGLHYSHIPFLTTCLHFLRKRLQKGEVGLSVETSKPQVPVGGLSRKKVPQEPWATVMEKRLQEAQLYKEEGNQRYREGKYRDAVSRYHRALLQLRGLDPSLPSPLPNLGPQGPALTPEQENILHTTQTDCYNNLAVVK

SEQ ID NO: 342061 - protein, 140 aa, Artificial Sequence
  derived and/or modified sequence
MEKRLQEAQLYKEEGNQRYREGKYRDAVSRYHRALLQLRGLDPSLPSPLPNLGPQGPALTPEQENILHTTQTDCYNNLAACLLQMEPVNYERVREYSQKVLERQPDNAKALYRAGVAFFHLQDYDQARHYLLAAVNRQPK

SEQ ID NO: 342062 - DNA, 648 bp, Artificial Sequence
  derived and/or modified sequence
atgctgaacaaggaggaggagctggagctgctggaggccctgtggagcttcagcaccagccccgcccacagcctgctgctgcccggcagaggcggcgccggccccatcgagagaagaaagcccgtgagccaggccttcagcagaccccagcagttcctgagcagagccctgctggagttcttcggcaagagccacccccccccccacagactgttcagaaagagcctgaacgtgggcctgcactacagccacatccccttcctgaccacctgcctgcacttcctgagaaagagactgcagaagggcgaggtgggcctgagcgtggagaccagcaagccccaggtgcccgtgggcggcctgagcagaaagaaggtgccccaggagccctgggccaccgtgatggagaagagactgcaggaggcccagctgtacaaggaggagggcaaccagagatacagagagggcaagtacagagacgccgtgagcagataccacagagccctgctgcagctgagaggcctggaccccagcctgcccagccccctgcccaacctgggcccccagggccccgccctgacccccgagcaggagaacatcctgcacaccacccagaccgactgctacaacaacctggccgtggtgaagtag

SEQ ID NO: 342063 - DNA, 648 bp, Artificial Sequence
  derived and/or modified sequence
atgcttaataaggaggaagaactcgaactgctggaggcactatggtcgttttccacctctcccgcacacagcctgctgctgcctggcaggggaggagccgggcccatcgagagacgaaagcccgtaagtcaggctttcagcagaccacagcagtttctctcaagagcacttctcgagttctttggcaagtctcacccgcctccgcacaggctgtttagaaagagcttaaatgtgggactgcactattctcatattcccttcttgaccacctgtctgcacttcctcagaaaacgtttgcaaaaaggtgaagtgggtctttctgtcgaaacgagcaaaccacaagttcccgtgggtggactgagtcgcaagaaggtcccacaggagccttgggcaaccgtgatggaaaagcggctgcaggaggctcagctgtacaaagaggagggcaaccaacggtatagagaaggtaagtatagggacgccgtcagtcgctatcacagggccctgctccaattgcggggcctggaccccagcttaccttcccccctcccaaacctggggcctcagggaccggcacttaccccagaacaagaaaatatcctgcatactacgcagacagattgttacaacaacctcgccgtggtgaagtag

SEQ ID NO: 342064 - DNA, 648 bp, Artificial Sequence
  derived and/or modified sequence
atgctgaacaaggaggaggagctggagctgctggaggccctgtggagcttcagcaccagccctgcccacagcctgctgctgcccggccggggcggggccggccccatcgagaggaggaagcctgtgtcccaggccttcagccggccccagcagttcctgagccgggccctgctggagttcttcggcaagagccaccccccaccccacaggctcttcaggaagagcctgaatgtgggcctgcactacagccacatccccttcctgaccacctgcctgcacttcctgaggaagaggctgcagaagggggaggtgggcctgtctgtggagaccagcaagccccaggtgcctgtgggcggcctgagcaggaagaaggtgccccaggagccctgggccaccgtgatggagaagaggctgcaggaggcccagctgtacaaggaggagggcaaccagcgctaccgggagggcaagtacagagatgctgtgagccgctaccaccgggccctgctgcagctgcggggcctggaccccagcctgcccagccccctgcccaacctgggcccccagggccctgccctgaccccagagcaggagaacatcctgcacaccacccagacagactgctacaacaacctggccgtggtgaagtag

SEQ ID NO: 342065 - DNA, 648 bp, Artificial Sequence
  derived and/or modified sequence
atgctgaacaaggaggaggagctggagctgctggaggccctgtggagcttttccacttcccccgctcactctctgctgctgccagggcgaggcggggccggccccattgaacgtaggaagccagttagtcaagcatttagcagaccccagcaattcctgagtcgggcacttctggagttcttcggcaaatcccatccacccccccacagactcttccgcaagtccctaaatgtaggactgcactacagccacatacctttcctcactacctgcctccactttctgaggaaacgacttcagaaaggggaggtcggtctcagcgtggaaacttctaagcctcaggtccctgtgggcgggttatcacgcaagaaggtgccacaggagccttgggccacggtgatggagaagcgcctgcaggaagcccagttgtacaaggaggaagggaaccaacggtatagagagggtaagtatcgggacgcagtgtcccgataccaccgtgctcttctgcaacttcggggtctcgacccctctcttcctagccccttgccgaacctcggtcctcaggggccggcactaacgcccgaacaagaaaacatcttgcatacgactcagacagattgttacaacaacctggctgtagtgaaatag

SEQ ID NO: 342066 - DNA, 648 bp, Artificial Sequence
  derived and/or modified sequence
atgctcaacaaggaagaagaactggagcttcttgaggccttgtggagtttctcaaccagccctgcccattcactgttactccccggtaggggcggtgctggccctatcgaaaggcggaagcccgtttctcaggcattctccagaccccaacagtttttgagcagggccttgctcgagttcttcggcaaaagccaccctcccccacacagactctttcgaaagtctttgaacgttggtttacattattcccacatccctttcctgacgacctgtctgcatttcctccggaagagactccagaagggggaagtgggtctctcggtcgaaacttctaagccacaggtgcctgtggggggtcttagccgcaaaaaagtcccccaggagccttgggccaccgttatggagaaaagactacaagaggcacaactatacaaagaggaagggaatcagagatatcgcgaaggcaagtatagagacgcagtaagcaggtaccaccgagcactgctgcagctcagagggctggatccttccctgcctagtcctctcccgaaccttggccctcaggggcctgccttgacccctgagcaagagaacatcctgcacaccacacaaacagactgttataacaacctggctgttgtcaaatag

SEQ ID NO: 342067 - DNA, 1080 bp, Artificial Sequence
  derived and/or modified sequence
agttcttcggaaagtctcatccacccccacatcgcctctttaggaagtcacttaatgttgggcttcattattcccacatccctttccttactacttgcctgcacttcttgagaaaaagactgcagaaaggagaggtggggctttcagtagaaacaagcaaaccgcaggtccctgtggggggactctccaggaagaagggtaatttcctgcctccttaaattggctgctactgtcagttattttgctcccaaccccagagcttcacttgctccttcacttcccagttccgcaagaaccgtgggcgacagttatggagaagcgtctgcaggaggctcagctgtacaaggaggaagggaaccagcgctaccgggaagggaagtaccgagatgctgtgagtaggtaccatcgagctctgcttcagctgcggggtctggatccgagtctgccctctccgttacctaatctcggacctcagggcccggccctcacgcctgaacaagaaaacatattgcataccacccagacagactgctataacaatctagctgcttgtctccttcagatggagcccgtgaactacgaacgagtgagagaatatagtcagaaagtcctggaacgacagcctgataatgccaaggccttgtatcgggccggagtggcctttttccatctgcaggactatgaccaggcccgccactacctcctggctgccgtgaataggcagcctaaagatgccaacgtccggcggtacctccagctgacacagtcagaactcagcagctaccatagaaaagagaagcagctctacctgggcatgtttggttaacaaagaagaaagatgctcctccagttgaacttaggtggaccattaaacatgcatgaaggagaaatctgagcctcagcaagagaaattaaccctatacctctgacccaggtggatttttgtttctagttctgcacaaacttcactacttagacagtctgagtctttttctgtctatccatctgtttatttctatacctttcaatacatgttattgttgcagatatttggcttgagaaatataatcagaaaacata

SEQ ID NO: 342068 - DNA, 1809 bp, Artificial Sequence
  derived and/or modified sequence
tctgattgggtggtgtggcgcaatgcgcgcgaccctcaagataccaaactgtacgcatctctgaccctttcctctccttgctcctgctggtaaaccgaagcccaggagacttccaggtttgggcatctgcagagggcgaggaactggtcacggcgccgggtgggcttgcagctgtgacgcttatgtggacacctcagtgtcgctggtggttcacctcggcttcccagtttatttattgacgtcaacaaataaatgttgaataaggaagaagagttagaattgcttgaagccctctggagttttagcactagtcccgcccactcccttctacttccaggtcgggggggggcgggtccaatagaaaggcggaagccagtgtcccaggcgttctcacgcccgcaacaattcctgagtagggccttgcttgagttcttcggaaagtctcatccacccccacatcgcctctttaggaagtcacttaatgttgggcttcattattcccacatccctttccttactacttgcctgcacttcttgagaaaaagactgcagaaaggagaggtggggctttcagtagaaacaagcaaaccgcaggtccctgtggggggactctccaggaagaaggttccgcaagaaccgtgggcgacagttatggagaagcgtctgcaggaggctcagctgtacaaggaggaagggaaccagcgctaccgggaagggaagtaccgagatgctgtgagtaggtaccatcgagctctgcttcagctgcggggtctggatccgagtctgccctctccgttacctaatctcggacctcagggcccggccctcacgcctgaacaagaaaacatattgcataccacccagacagactgctataacaatctagctgttgtgaaatagggagtgtttcccttcttaatcataaaaaggcagaacattgacctgaattgcctgaattgactcctctgcagcttgtctccttcagatggagcccgtgaactacgaacgagtgagagaatatagtcagaaagtcctggaacgacagcctgataatgccaaggccttgtatcgggccggagtggcctttttccatctgcaggactatgaccaggcccgccactacctcctggctgccgtgaataggcagcctaaaggtaagcaagaagggctttgaaatggtaaagacaaaattgtcttgctggggtggatctgtggaaagggggttttattttactttgccaatgtattattttcaataagtaatacattcacatggttgagaattcgaactgaaaaagtatacgatgaacagacctttttccactcttgtgttcttgtctccacagaaaagcagtattattagtttcatgtgtagggggttgatgcttaatcagacatacacaatatatatgttggtatgtctgtttcatatatgtatgtatgcctattctaatatataaatatatgtatatcaacgtgcttttatttataaatatacagtgtatatatttatacatatacatgaatatatatataaaataggcaggccaggtggggtggctcacatctgttatctcagcactttgggagaccaaagtgggtggatcacctgaggtcaggagtttgagaccagcctgaccaacatggagaaaccccatctctactaaaaatacaaaattagccaggcatggtggcgcatgcctgtaaacccagctactcgggaggctgaggcaggagaattgcttgaacccaggaggcggaggttgcggtgagccgagatcctgggcaacaagaacgagattctgtctc

SEQ ID NO: 342069 - DNA, 606 bp, Artificial Sequence
  derived and/or modified sequence
ggaggcggggtcgtttctgcgggattatttttccggagcctcttctgattgggtggtgtggcgcaatgcgcgcgaccctcaagataccaaactgtacgcatctctgaccctttcctctccttgctcctgctggtaaaccgaagcccaggagacttccagttccgcaagaaccgtgggcgacagttatggagaagcgtctgcaggaggctcagctgtacaaggaggaagggaaccagcgctaccgggaagggaagtaccgagatgctgtgagtaggtaccatcgagctctgcttcagctgcggggtctggatccgagtctgccctctccgttacctaatctcggacctcagggcccggccctcacgcctgaacaagaaaacatattgcataccacccagacagactgctataacaatctagctgcttgtctccttcagatggagcccgtgaactacgaacgagtgagagaatatagtcagaaagtcctggaacgacagcctgataatgccaaggccttgtatcgggccggagtggcctttttccatctgcaggactatgaccaggcccgccactacctcctggctgccgtgaataggcagcctaaag

SEQ ID NO: 342070 - DNA, 858 bp, Artificial Sequence
  derived and/or modified sequence
cttcttgagaaaaagactgcagaaaggagaggtggggctttcagtagaaacaagcaaaccgcaggtccctgtggggggactctccaggaagaaggttccgcaagaaccgtgggcgacagttatggagaagcgtctgcaggaggctcagctgtacaaggaggaagggaaccagcgctaccgggaagggaagtaccgagatgctgtgagtaggtaccatcgagctctgcttcagctgcggggtctggatccgagtctgccctctccgttacctaatctcggacctcagggcccggccctcacgcctgaacaagaaaacatattgcataccacccagacagactgctataacaatctagctgcttgtctccttcagatggagcccgtgaactacgaacgagtgagagaatatagtcagaaagtcctggaacgacagcctgataatgccaaggccttgtatcgggccggagtggcctttttccatctgcaggactatgaccaggcccgccactacctcctggctgccgtgaataggcagcctaaagatgccaacgtccggcggtacctccagctgacacagtcagaactcagcagctaccatagaaaagagaagcagctctacctgggcatgtttggttaacaaagaagaaagatgctcctccagttgaacttaggtggaccattaaacatgcatgaaggagaaatctgagcctcagcaagagaaattaaccctatacctctgacccaggtggatttttgtttctagttctgcacaaacttcactacttagacagtctgagtctttttctgtctatccatctgtttatttctatacctttcaatacatgttattgttgcaga

SEQ ID NO: 342071 - protein, 456 aa, Artificial Sequence
  derived and/or modified sequence
MARGDAPRDSYHLVGISFFILGLGTLLPWNFFITAIPYFQARLAGAGNSTARILSTNHTGPEDAFNFNNWVTLLSQLPLLLFTLLNSFLYQCVPETVRILGSLLAILLLFALTAALVKVDMSPGPFFSITMASVCFINSFSAVLQGSLFGQLGTMPSTYSTLFLSGQGLAGIFAALAMLLSMASGVDAETSALGYFITPCVGILMSIVCYLSLPHLKFARYYLANKSSQAQAQELETKAELLQSDENGIPSSPQKVALTLDLDLEKEPESEPDEPQKPGKPSVFTVFQKIWLTALCLVLVFTVTLSVFPAITAMVTSSTSPGKWSQFFNPICCFLLFNIMDWLGRSLTSYFLWPDEDSRLLPLLVCLRFLFVPLFMLCHVPQRSRLPILFPQDAYFITFMLLFAVSNGYLVSLTMCLAPRQVLPHEREVAGALMTFFLALGLSCGASLSFLFKALL

SEQ ID NO: 342072 - DNA, 1371 bp, Artificial Sequence
  derived and/or modified sequence
atggccaggggagatgcacctcgcgattcttatcatctagtagggatttctttcttcattcttggccttgggaccctactaccttggaatttcttcattacagctataccatacttccaagctcgcctggctggagcaggaaatagcaccgccaggatcctgagtacgaatcacacgggaccggaggacgcctttaactttaataactgggtcacgttgctgagtcagctccccttgctgctgtttaccctcctaaacagttttctttaccaatgcgttcccgaaacagtgcggattctcgggtcactgctcgcaattctgctcctcttcgccctgaccgccgctctagtcaaagtggatatgtcacccggccccttcttctcgattacgatggcttctgtttgtttcatcaattctttctccgcagtcctacagggcagtctgtttgggcagctaggaactatgccatcaacatacagtacactttttctctccggccagggcctggcaggtatctttgccgcactggccatgctcctgagcatggcttccggagtcgatgccgagacctccgctctgggatacttcattacaccctgtgtcggtatactgatgagcatcgtgtgttacctctctctcccgcacctcaaattcgcccggtactatctggccaataagagctcccaggctcaggcacaggagctcgagaccaaggcagagttgctgcagtcagatgaaaatggcattcctagtagcccacaaaaagtagcgctcactctcgatctcgatctggaaaaggagcctgagagcgagcctgatgaaccccagaagcctggcaagccaagcgtttttacagtgtttcagaagatctggttgaccgctctgtgcctcgtgttggtctttaccgtcaccctgagcgtgttcccagcaattaccgctatggtgacttcctcaacaagccccggaaagtggagccagtttttcaatcctatctgttgtttcctgttgttcaatatcatggattggctgggccgtagtcttactagttattttctgtggccagatgaggacagcagacttctaccattgctcgtttgtctcaggttcctcttcgtccctctgttcatgctctgtcacgtcccacagaggtcaagacttcccatcttatttccacaggacgcctatttcattacattcatgctgttatttgcagtctcaaatggatacttagtgagtctcaccatgtgcctggcccctcggcaggtactgccccatgagcgggaggtcgctggggctttaatgacttttttcctagccctcggactttcctgcggagcaagcttaagctttttgttcaaggctctactgtag

SEQ ID NO: 342073 - DNA, 1371 bp, Artificial Sequence
  derived and/or modified sequence
atggccagaggcgacgctcctcgggactcctatcatcttgtggggatatccttctttatactggggctgggaaccctattaccatggaacttttttataacggcaattccttatttccaggcccggctcgctggcgcaggcaacagcacagccaggatcctgtccactaatcacacaggaccagaagatgcgttcaactttaataattgggtaaccctgctctctcagctcccactgttgctgtttacactcctgaactcttttttataccagtgcgtgcctgagacagtgagaatcctgggctccctgcttgccattttgctgctcttcgccttgacagcagctcttgtgaaagtggacatgtctcctggaccgttcttctctataacaatggcttccgtgtgctttattaatagcttcagtgccgtactacagggctcattgtttggtcagctgggcacaatgccatctacctactccaccctctttttgagtggccagggtctggcagggattttcgccgctctggcaatgttgctaagtatggcttcaggcgtcgatgctgaaacatcggcacttggttactttattacaccttgcgtaggcattctgatgagcattgtgtgctacttgagtctcccccacttaaaattcgcccggtactacctggcaaataagtcctcccaagcgcaggcacaggaactggaaacgaaagccgagctactgcagtcggatgagaacgggattccctcatctccgcagaaggtggcactgacccttgacctggacctagagaaggaaccagagtctgagccagacgagccacagaagcccggcaaacctagcgtcttcacagtgttccagaagatatggctgaccgcactttgtctggttctcgtgtttactgtgactctcagcgttttccccgccattactgccatggtgacctcctccacttcccctggcaaatggtcacaattttttaatcctatctgctgtttccttctcttcaatatcatggattggctggggagatcattgacctcatactttctttggcctgacgaagactccagactgcttccactccttgtatgccttcggttcctctttgtgcctctctttatgctttgccatgttcctcaaaggtccagactgccgatcttgttcccccaagacgcttactttatcaccttcatgttactgtttgctgtgagcaatgggtatctcgttagcctgaccatgtgtctggctccaaggcaagtgctgccacacgagcgggaagttgccggggcactcatgacatttttcctggcactggggctgtcatgtggggcgtccttgagtttccttttcaaagctctgttgtag

SEQ ID NO: 342074 - DNA, 1371 bp, Artificial Sequence
  derived and/or modified sequence
atggcgaggggagatgccccccgcgactcttatcacctggtggggatttccttctttatcctgggattgggtactcttctgccgtggaactttttcatcacggccatcccttacttccaggcgcgtttggccggcgctggcaattctaccgctcggattctttcaaccaaccataccggacccgaggacgcgtttaatttcaacaattgggttactttgctctcccaactgcctttgctgctgttcacgctgctgaacagcttcttgtaccaatgcgtgccagagaccgtgcgcatcctcggctcattattggcaatcctcctgctgtttgctcttacagccgcactggtcaaagtcgacatgtctcctggaccatttttttcaatcactatggcgtccgtgtgcttcatcaatagcttctcagcagtcttgcagggcagcttattcggtcaactggggaccatgccgagtacgtactcgacactttttctgtctggccaaggactggccgggatctttgcggccctcgccatgctgctctcaatggcttccggcgtcgatgctgaaacaagcgccttgggatactttatcaccccatgcgtgggaattctgatgagcatcgtgtgctacctcagtctgcctcatttgaagtttgctagatactacttggcaaacaagagctcacaggcacaggctcaagagctagaaactaaagcagagttgctccagagcgatgaaaatggcatcccatcatctcctcagaaggtggctctgacattagaccttgacctcgagaaggagcctgaatcagaaccagacgagcctcagaagccgggcaaaccttcggtctttacagtcttccaaaagatttggttgacagcgctgtgcctcgtattagtgtttaccgtaacactatcagtttttccagcaatcactgctatggtaaccagctccacaagtcctgggaagtggtctcagttcttcaacccaatctgttgttttctgcttttcaatattatggactggctcggccggtcccttacaagttactttttgtggccggacgaagatagcagattgctccccttgttggtgtgtctccggttcctgtttgtgcccctcttcatgctttgccacgtgccacagcgttctagactccctatccttttcccccaggatgcttactttattacatttatgttgctttttgctgtgtccaacggatacctggtgagtctcacaatgtgtctagccccacgccaggtgctgcctcatgaaagagaggtggccggtgcattgatgactttctttctggccctggggctctcatgcggcgcgtcactgtcatttttgttcaaagctctcctgtag

SEQ ID NO: 342075 - DNA, 1371 bp, Artificial Sequence
  derived and/or modified sequence
atggcccggggagatgccccccgggacagctaccacctggtgggcatctccttcttcatcctgggcctgggcaccctgctgccctggaacttcttcatcacagccatcccctacttccaggcccggctggccggggccggcaacagcacagcccgcatcctgagcaccaaccacactggaccagaagatgccttcaacttcaacaactgggtgaccctgctgagccagctgcccctgctgctcttcaccctgctgaacagcttcctgtaccagtgtgtgcctgagaccgtgcgcatcctgggcagcctgctggccatcctgctgctgtttgccctgacagctgccctggtgaaggtggacatgagccctggccccttcttcagcatcaccatggcctctgtgtgcttcatcaacagcttctctgctgtgctgcagggcagcctgtttggccagctgggcaccatgcccagcacctacagcaccctcttcctgagcggccagggcctggccggcatctttgctgccctggccatgctgctgtccatggccagcggcgtggatgctgagaccagcgccctgggctacttcatcaccccctgtgtgggcatcctgatgagcatcgtgtgctacctgagcctgccccacctgaagtttgcccgctactacctggccaacaagagcagccaggcccaggcccaggagctggagaccaaggccgagctgctgcagagtgatgaaaatggcatccccagcagcccccagaaggtggccctgaccctggacctggacctggagaaggagcctgagagcgagccagatgagccccagaagccaggcaagcccagcgtcttcaccgtcttccagaagatctggctgacagccctgtgcctggtgctggtgttcaccgtgaccctgagcgtcttccctgccatcacagccatggtgaccagcagcaccagccctgggaagtggagccagttcttcaaccccatctgctgcttcctgctcttcaacatcatggactggctgggccgcagcctgaccagctacttcctgtggccagatgaggacagccggctgctgcccctgctggtgtgcctgcgcttcctgtttgtgcccctcttcatgctgtgccacgtgccccagaggagccggctgcccatcctcttcccccaggatgcctacttcatcaccttcatgctgctgtttgctgtgtccaatggctacctggtgtccctgaccatgtgcctggccccccggcaggtgctgccccatgagcgggaggtggccggggccctgatgaccttcttcctggccctgggcctgagctgtggggccagcctgtccttcctgttcaaggccctgctgtag

SEQ ID NO: 342076 - DNA, 1371 bp, Artificial Sequence
  derived and/or modified sequence
atggcccggggcgacgccccccgggacagctaccacctggtgggcatctcctttttcattctgggtctgggtacgctgctgccctggaacttctttattacggctatcccttattttcaggcgcgcctggccggggccgggaatagcacagcaaggattctgagcacaaaccataccgggccagaggatgcgttcaattttaacaactgggtcactctcctctctcagctcccccttttactatttacactcctgaattcatttctatatcagtgtgtgcccgagactgtcagaatcctaggctccctacttgccatcctattgctgttcgcactaacagccgcgctggttaaggtcgacatgtcccctgggcccttctttagcattaccatggcttccgtttgtttcataaatagcttttccgcagtgttgcaaggcagtctgtttggccagcttggcaccatgccctctacatatagcactttgttcctgtcaggacaggggctggcgggaatctttgctgcactcgctatgttactgtccatggctagcggggtggatgctgaaacttccgcgctcggctactttatcacaccgtgcgtggggatcctgatgtccattgtgtgttacctcagtctgccccacttgaagtttgctagatactatttagccaacaaatccagtcaggcccaggcacaggagctggagacaaaggcagaactgctgcagagcgatgaaaatggaataccttctagtccacagaaggtggcgcttacgttggatctggatcttgaaaaagagcctgagtctgaacctgatgaaccacagaagccggggaagccttcagtttttaccgtgtttcaaaaaatttggctaacggcactctgcctcgtgcttgtgttcacagtcacgctgtcagtgttccccgcaatcactgctatggtaacgagctctacgtcgcctggaaagtggagccaattttttaatccaatctgttgttttcttttgtttaatattatggactggttgggacggtctttgacaagctatttcctttggccggacgaggacagtagactgctgcctctcctcgtctgtctgcgattcctgtttgtcccactcttcatgctgtgccacgtgccccagagaagtaggctcccaatcctattcccacaagacgcatattttatcaccttcatgctcctcttcgcagtgagcaacggttacctcgtgagtctgacaatgtgtctggcccctcgccaggtgttgccccatgaaagggaagtagctggcgctctgatgaccttctttctggcgcttggtttaagttgcggggcttccctgtcatttcttttcaaagcccttctctag

SEQ ID NO: 342077 - DNA, 1371 bp, Artificial Sequence
  derived and/or modified sequence
atggcccggggcgacgccccccgggacagctaccacctggtgggcattagctttttcattcttggtctgggcaccttgctaccatggaacttctttattactgcaatcccatacttccaagcccgactagcaggtgcgggaaactctacagccagaatactgagcactaaccacaccggacctgaggacgcattcaattttaacaattgggtgacactcttgagtcagctgccacttctgctcttcaccttattaaatagcttcttgtaccagtgtgtacccgagacggtccggattcttgggtccctactggccatactgcttctgtttgctctgaccgcagctctcgttaaagtcgacatgtccccaggaccatttttctctatcaccatggcctctgtgtgctttattaactcattcagcgcagttttgcagggaagcctctttggacagctcggaaccatgccctctacttacagcacattgtttttgtccggccagggcctcgccgggatattcgccgccttggccatgcttcttagtatggcctcaggcgtggacgccgagacaagcgccttgggatactttataactccctgcgtaggcattctgatgtcaatcgtgtgttatctctctcttccccacctcaaatttgcacggtattatcttgccaacaaaagctctcaggcgcaggcccaggaacttgagaccaaagcagagcttctgcagagtgatgaaaacggtattcctagttcaccccagaaagtggctctgacacttgatctagacctggagaaggaacccgagtccgagcctgacgagccacagaaacccgggaaacccagcgtgttcaccgttttccagaaaatatggcttacggcgctgtgccttgttctggtgtttacagttacacttagcgtattcccggcgataaccgctatggttacctcttccaccagccccggcaaatggagtcagttctttaacccaatctgttgctttcttctcttcaacattatggattggttagggaggtccctgacaagctacttcctctggcctgacgaagattctcggctcctgccactcctcgtctgcctgcgttttctgttcgtgcctctcttcatgctttgccatgttcctcaacgtagccggctgcccatcctgttcccccaagacgcctactttatcacgtttatgctgttattcgcggtctccaacggttatctcgtcagcctcactatgtgtctcgcccctcggcaggtcctgcctcacgagcgcgaggttgcaggcgctctcatgacctttttcttggctttaggcctatcctgtggagctagcctcagctttctgttcaaagccctcctctag

SEQ ID NO: 342078 - DNA, 1371 bp, Artificial Sequence
  derived and/or modified sequence
atggcccggggcgacgccccccgggacagctaccacctggtgggcattagtttcttcatactgggactcggcacccttttaccttggaacttctttatcacggctataccctactttcaagcgcgccttgccggggccggcaattccacagccagaatcctaagtaccaatcatacgggccccgaagatgcgttcaactttaacaattgggtgactttactcagtcagctcccattattattgttcactctacttaactcttttctttaccagtgcgtgccagagactgtgagaattctgggctctctgctggccatcctgctgcttttcgcccttacagcagcccttgttaaggtggacatgtctccagggccttttttctccatcactatggcatccgtatgctttattaattctttttccgcggtgctccagggctcgctgttcggacagctaggtactatgccctcaacatactccactctctttttgagtggacaggggcttgctggcatttttgcagcgttggcgatgttgctgagcatggcctcaggtgtggatgccgagaccagtgccctgggctacttcattacaccgtgcgtgggaatcctgatgagcatagtgtgctatctgagcctcccccatctgaagttcgcccgctactacctggctaacaagtcatcacaagcccaagctcaggaacttgagaccaaggctgagttgctgcagtccgacgagaatggaatcccatcatcaccacagaaggtggcactcaccctagacctggacctagagaaagaacccgaaagtgagccggatgagcctcaaaaaccaggaaagccttccgtgtttactgttttccagaagatatggctcaccgcattatgcctggtgctggtattcaccgtcaccctgtcagtcttcccagcaattaccgccatggtgacaagcagcacgtccccgggcaaatggtctcagttctttaatcctatttgctgtttcctgctgtttaacatcatggactggctgggcagaagtttaacgtcctacttcttatggcccgatgaggattcccggctgttgccactgctcgtctgtctgagatttctgtttgtccctctgtttatgctgtgtcatgtccctcaacgctcccgacttcccattctctttccccaggatgcttactttattacgttcatgctcctgtttgctgtgtctaacggatacttagtgtctctaacaatgtgcctggctccaagacaggttttgccccacgaaagagaagtagcaggcgccctcatgacattttttctggccttgggtctgtcctgcggcgcgagtctgtcattcctttttaaggcactcttatag

SEQ ID NO: 342079 - DNA, 1371 bp, Artificial Sequence
  derived and/or modified sequence
atggccagaggcgatgccccacgggatagctaccatctggtcggtattagtttctttatcttaggccttggtactctgctgccatggaatttcttcatcacggccataccttacttccaggctagacttgctggagcaggcaactctactgccaggatcctgtccacgaaccataccggacctgaagatgcatttaatttcaataattgggtgaccttactgagccaattgcctctgctgctgtttacactgcttaacagttttctttatcagtgcgttcctgaaacagttcgtatccttgggtcactactggctattctccttctctttgccttgaccgcagcccttgtgaaggtggacatgagccctggacccttcttctctattactatggcatccgtctgctttatcaattctttttctgcagtgctccaggggagcctctttgggcaacttggtacgatgccgtctacctactccacgctcttcctgtctggacagggcctggccggaatctttgccgctttggcgatgctgctgagtatggccagcggggttgatgccgaaacttctgccctggggtattttatcactccatgcgtcggcatcttgatgagcattgtctgctacctgagccttccccaccttaagtttgccagatattacttagccaacaaaagctcacaggcacaggcccaggagcttgaaaccaaagcggagctcctccagagcgacgagaacggaatccccagttctccccaaaaggtggctctgaccctagatctggacctcgagaaggagccagagagtgagccagatgagccgcaaaagcccggaaagcccagtgtgttcactgtcttccagaaaatatggctgaccgccttgtgcctggttttggtcttcaccgtcaccttatccgtgttcccagcaattactgccatggtgacaagctcaacgagtcctggtaaatggtctcagttcttcaatcctatttgttgtttcctcctcttcaacatcatggactggctgggcaggagcctaacgagctattttctgtggcctgacgaggatagtcggctcctgcccctcctggtatgtctgcgtttccttttcgtcccgcttttcatgctatgtcacgttccacagcggtcacgcttgccaatcctgtttccccaggatgcttacttcatcactttcatgctcctttttgctgtatctaacggctacctcgtcagcctgactatgtgcctagcacccaggcaggtgctgccacatgaaagagaggtggctggtgccctcatgacgttcttcctcgctctggggctatcgtgcggagccagtctctcgtttctctttaaagcattgctgtag

SEQ ID NO: 342080 - DNA, 1371 bp, Artificial Sequence
  derived and/or modified sequence
atggccagaggcgacgctccacgggattcctaccacctggtgggcatctctttctttatcctcgggctcggcaccctccttccttggaattttttcataacagccatcccgtattttcaggctaggttagctggagcaggaaattctaccgccagaatcctctctaccaaccacactggccctgaagatgcttttaatttcaataactgggtgactctactatcacagctgccccttctgctgttcaccctgctgaatagttttctgtaccaatgcgtccctgaaactgtacggattcttggatcactcctggctattcttctgcttttcgcactgacagccgcattagttaaagttgacatgtcacctgggccttttttttctattacaatggcatccgtgtgtttcattaattccttcagcgcagtgttgcaaggctcactcttcgggcagctaggcacgatgccttcgacctattctaccctgtttctcagtggtcaggggctcgcaggtatcttcgccgctctggccatgctgctcagtatggcctccggagtggatgccgagacaagtgccctggggtacttcatcactccatgcgtgggtatccttatgtcaattgtgtgctacctcagcctcccccacctgaagtttgccaggtattacttagccaataagtcctcccaagcacaggctcaggagcttgaaaccaaggccgaactgttgcagtcagacgagaatgggattcccagctcaccgcagaaagtggcactgacactcgacttggacctggaaaaagagcccgagagtgagccagacgagcctcagaagcctggcaagccatcagtcttcacagtgtttcagaaaatctggctaacagccctgtgcttagtcctggtgttcaccgtaacactgtccgtgtttccagccatcaccgcaatggtgaccagcagcaccagcccgggaaaatggagccaattcttcaacccaatttgctgttttctgctgtttaacataatggattggctcgggcgtagcctgacttcatacttcctatggcctgatgaggacagcagacttctgccgctgcttgtatgcttgcgtttcttgtttgtgcctctgttcatgctctgccacgtgcctcagcgctctcggctacctattctctttccccaggatgcctacttcatcaccttcatgcttctcttcgctgtttcaaatgggtaccttgtctcactgacaatgtgcttggcaccacgacaggtgctgcctcatgagagagaggtcgccggagcgctaatgacattctttttagccctgggcctgagttgtggtgccagcttgtcatttctgttcaaagcattgctctag

SEQ ID NO: 342081 - DNA, 1371 bp, Artificial Sequence
  derived and/or modified sequence
atggcccgtggagacgctccccgtgattcttaccacctggtagggatctccttctttatcctggggctcggtacccttctgccctggaatttctttataaccgcgattccttacttccaagcccgacttgccggagccggtaactctacagcgcgtatcttatcaacaaatcacaccggacctgaagacgcttttaacttcaataattgggttacacttctgtcccagctgccattgctcctgttcactctgctgaattccttcctgtatcaatgtgtaccagagacagtgagaattctaggctctctcttagccatcctcctgttatttgcacttactgccgctctggttaaagtggatatgtcacccggaccattctttagtatcacgatggccagcgtatgcttcataaattccttcagcgcggtcctacagggttcactgtttggccagctgggcaccatgcccagtacatattccactttattcctgagcggccagggcctcgctggtatattcgccgcattagctatgctcctgtctatggcatcgggagttgatgcagagacatctgccctgggttacttcatcacgccatgtgtcgggatactcatgtcaatagtgtgttatctgagtctccctcatcttaagtttgccagatactatctggcaaacaaatctagtcaagcacaagcacaggaactggagacgaaagccgagctcctgcaaagcgatgaaaacggaataccctcttcccctcagaaggtggctctcacactggatctggatctggagaaggagcccgagtcagagccagatgaaccccaaaagcccggtaaaccatccgtgttcactgtgtttcagaaaatttggttaactgctctgtgtctcgtcctggtttttacggtaactctgagcgtcttcccagccattactgctatggtcactagtagcacatcccccggtaaatggtcacagttcttcaatcccatttgctgtttcctcctgttcaacatcatggactggcttgggagatctctgacaagctacttcctctggcccgatgaagactccagattgctgcccctgctggtgtgtctgcggtttctgtttgtaccactgtttatgctatgtcacgttcctcagcgatcgcgcctgcccatactgtttccccaggacgcttactttatcacctttatgctgctgttcgccgtgagtaatgggtacctcgtgtccctgaccatgtgcctagctcctagacaggtccttcctcatgagcgggaggtggccggagctcttatgactttttttttggccctggggctgtcctgcggcgctagcttgtcattcctgttcaaagccttgctctag

SEQ ID NO: 342082 - DNA, 2514 bp, Artificial Sequence
  derived and/or modified sequence
ggtggcgcgaccctctgtccccgcctcggggcggagcccaggtcccagcctgcggagcgcgagacacgccgaaatccgcccgaggctacctgtgcgactccagccgccctgcaccggaatctggggagacccgccccccgccccaccggtctgcggccctccgccccagcgcaggtgcaggtgcggcttctctgcccctttcaccccaggcgcatccgccgcggcggccatggcgcgaggagacgccccgcgggacagctaccacctggtcgggatcagcttcttcatcctggggctgggcaccctccttccctggaacttcttcatcaccgccatcccgtacttccaggcgcgactggccggggccggcaacagcacagccaggatcctgagcaccaaccacacgggtcccgaggatgccttcaacttcaacaattgggtgacgctgctgtcccagctgcccctgctgctcttcaccctcctcaactccttcctgtaccagtgcgtcccggagacggtgcgcattctgggcagcctgctggccatactgctgctctttgccctgacagcagcgctggtcaaggtggacatgagccccggacccttcttctccatcaccatggcctccgtctgcttcatcaactccttcagtgcagtcctacagggcagcctcttcgggcagctgggcaccatgccctccacctacagcaccctcttcctcagcggccagggcctggctgggatctttgctgcccttgccatgctcctgtccatggccagtggcgtggacgccgagacctctgccctggggtactttatcacgccctgtgtgggcatcctcatgtccatcgtgtgttacctgagcctgcctcacctgaagtttgcccgctactacctggccaataaatcatcccaggcccaagctcaggagctggagaccaaagctgagctcctccagtctgatgagaacgggattcccagtagtccccagaaagtagctctgaccctggatcttgacctggagaaggagccggaatcagagccagatgagccccagaagccaggaaaaccttcagtcttcactgtcttccagaagatctggctgacagcgctgtgccttgtgttggtcttcacagtcaccctgtccgtcttccccgccatcacagccatggtgaccagctccaccagtcctgggaagtggagtcagttcttcaaccccatctgctgcttcctcctcttcaacatcatggactggctgggacggagcctgacctcttacttcctgtggccagacgaggacagccggctgctgcccctgctggtctgcctgcggttcctgttcgtgcccctcttcatgctgtgccacgtgccccagaggtcccggctgcccatcctcttcccacaggatgcctacttcatcaccttcatgctgctctttgccgtttctaatggctacctggtgtccctcaccatgtgcctggcgcccaggcaggtgctgccacacgagagggaggtggccggcgccctcatgaccttcttcctggccctgggactttcctgtggagcctccctctccttcctcttcaaggcgctgctctgaagtggcccctccaggctctttggcagcctcttctcgacgtctccttccggagctgagatccagcccagggcgaatggcgagcttggctcaggcctctgcggggtggaggcccctgggcctgaggctgccagcagcgggcaggagctgctcttcatccacttggagtgctgtggggaagaaatcaccaccggtcattctaaccctcacccaggaatgggggtgactcgcacaagacctcatggaaagggtgatgactagggaaaagagggtgcagggcacggctgctccccaccaccaggtctgcatttgttcatcatcatcaggagcagaggtgaccagagggttcagagtgggaggcggggccagcccaggccaggagcgcctcatcttcccaggcctcagccacccagggtaaaaggtgccagggaagttgtgggcacctgagaggaggaacagatgtggaggacctgagggtgctcaaagggccaggctcagcctcaagcagtgttttcattgccaacacttactgtacccactccgcagagcccagctgggcctgggccccagggccacagctagcctgcatgtgtgtactgcactttacagtttgcaaagctcttccatacccactctctcaccgaagcctaattgaggctcttggaaggagtcaggcaaggattgtgcttcccccattatacaggtgacaaaactgagtcctggggaaagtgactggtccgtggtagagccgggacccaatcccctctctctcctccctgttggtgctgttcttcctgcccaacacctgtttctcttttcctcaaggggtttggggcaggagcctgggcacttactccccgtttttgctgtttctccttctgaccctgctcttgggtctaataaccccatttatttgt

SEQ ID NO: 342083 - DNA, 2505 bp, Artificial Sequence
  derived and/or modified sequence
acgctctgggcggggactccgcagcggctccctagttagggggcgccccggtgggttccagctttaggggtcgcaggagcggctctggcatcacctcggagctgacgaagcgggaagagccccgcaccagtgctgcccctacagagctctcggcggggggtggaggtgcaggtgcggcttctctgcccctttcaccccaggcgcatccgccgcggcggccatggcgcgaggagacgccccgcgggacagctaccacctggtcgggatcagcttcttcatcctggggctgggcaccctccttccctggaacttcttcatcaccgccatcccgtacttccaggcgcgactggccggggccggcaacagcacagccaggatcctgagcaccaaccacacgggtcccgaggatgccttcaacttcaacaattgggtgacgctgctgtcccagctgcccctgctgctcttcaccctcctcaactccttcctgtaccagtgcgtcccggagacggtgcgcattctgggcagcctgctggccatactgctgctctttgccctgacagcagcgctggtcaaggtggacatgagccccggacccttcttctccatcaccatggcctccgtctgcttcatcaactccttcagtgcagtcctacagggcagcctcttcgggcagctgggcaccatgccctccacctacagcaccctcttcctcagcggccagggcctggctgggatctttgctgcccttgccatgctcctgtccatggccagtggcgtggacgccgagacctctgccctggggtactttatcacgccctgtgtgggcatcctcatgtccatcgtgtgttacctgagcctgcctcacctgaagtttgcccgctactacctggccaataaatcatcccaggcccaagctcaggagctggagaccaaagctgagctcctccagtctgatgagaacgggattcccagtagtccccagaaagtagctctgaccctggatcttgacctggagaaggagccggaatcagagccagatgagccccagaagccaggaaaaccttcagtcttcactgtcttccagaagatctggctgacagcgctgtgccttgtgttggtcttcacagtcaccctgtccgtcttccccgccatcacagccatggtgaccagctccaccagtcctgggaagtggagtcagttcttcaaccccatctgctgcttcctcctcttcaacatcatggactggctgggacggagcctgacctcttacttcctgtggccagacgaggacagccggctgctgcccctgctggtctgcctgcggttcctgttcgtgcccctcttcatgctgtgccacgtgccccagaggtcccggctgcccatcctcttcccacaggatgcctacttcatcaccttcatgctgctctttgccgtttctaatggctacctggtgtccctcaccatgtgcctggcgcccaggcaggtgctgccacacgagagggaggtggccggcgccctcatgaccttcttcctggccctgggactttcctgtggagcctccctctccttcctcttcaaggcgctgctctgaagtggcccctccaggctctttggcagcctcttctcgacgtctccttccggagctgagatccagcccagggcgaatggcgagcttggctcaggcctctgcggggtggaggcccctgggcctgaggctgccagcagcgggcaggagctgctcttcatccacttggagtgctgtggggaagaaatcaccaccggtcattctaaccctcacccaggaatgggggtgactcgcacaagacctcatggaaagggtgatgactagggaaaagagggtgcagggcacggctgctccccaccaccaggtctgcatttgttcatcatcatcaggagcagaggtgaccagagggttcagagtgggaggcggggccagcccaggccaggagcgcctcatcttcccaggcctcagccacccagggtaaaaggtgccagggaagttgtgggcacctgagaggaggaacagatgtggaggacctgagggtgctcaaagggccaggctcagcctcaagcagtgttttcattgccaacacttactgtacccactccgcagagcccagctgggcctgggccccagggccacagctagcctgcatgtgtgtactgcactttacagtttgcaaagctcttccatacccactctctcaccgaagcctaattgaggctcttggaaggagtcaggcaaggattgtgcttcccccattatacaggtgacaaaactgagtcctggggaaagtgactggtccgtggtagagccgggacccaatcccctctctctcctccctgttggtgctgttcttcctgcccaacacctgtttctcttttcctcaaggggtttggggcaggagcctgggcacttactccccgtttttgctgtttctccttctgaccctgctcttgggtctaataaccccatttatttgt

SEQ ID NO: 342084 - DNA, 2509 bp, Artificial Sequence
  derived and/or modified sequence
gtggcagctctggttcccccgcccgggcccggctcgggttacgctctgggcggggactccgcagcggctccctagttagggggcgccccggtgggttccagctttaggggtcgcaggagcggctctggcatcacctcggagctgacgaagcgggaagagccccgcaccagtgctgcccctacagagctctcggcggggggtggaggcgcatccgccgcggcggccatggcgcgaggagacgccccgcgggacagctaccacctggtcgggatcagcttcttcatcctggggctgggcaccctccttccctggaacttcttcatcaccgccatcccgtacttccaggcgcgactggccggggccggcaacagcacagccaggatcctgagcaccaaccacacgggtcccgaggatgccttcaacttcaacaattgggtgacgctgctgtcccagctgcccctgctgctcttcaccctcctcaactccttcctgtaccagtgcgtcccggagacggtgcgcattctgggcagcctgctggccatactgctgctctttgccctgacagcagcgctggtcaaggtggacatgagccccggacccttcttctccatcaccatggcctccgtctgcttcatcaactccttcagtgcagtcctacagggcagcctcttcgggcagctgggcaccatgccctccacctacagcaccctcttcctcagcggccagggcctggctgggatctttgctgcccttgccatgctcctgtccatggccagtggcgtggacgccgagacctctgccctggggtactttatcacgccctgtgtgggcatcctcatgtccatcgtgtgttacctgagcctgcctcacctgaagtttgcccgctactacctggccaataaatcatcccaggcccaagctcaggagctggagaccaaagctgagctcctccagtctgatgagaacgggattcccagtagtccccagaaagtagctctgaccctggatcttgacctggagaaggagccggaatcagagccagatgagccccagaagccaggaaaaccttcagtcttcactgtcttccagaagatctggctgacagcgctgtgccttgtgttggtcttcacagtcaccctgtccgtcttccccgccatcacagccatggtgaccagctccaccagtcctgggaagtggagtcagttcttcaaccccatctgctgcttcctcctcttcaacatcatggactggctgggacggagcctgacctcttacttcctgtggccagacgaggacagccggctgctgcccctgctggtctgcctgcggttcctgttcgtgcccctcttcatgctgtgccacgtgccccagaggtcccggctgcccatcctcttcccacaggatgcctacttcatcaccttcatgctgctctttgccgtttctaatggctacctggtgtccctcaccatgtgcctggcgcccaggcaggtgctgccacacgagagggaggtggccggcgccctcatgaccttcttcctggccctgggactttcctgtggagcctccctctccttcctcttcaaggcgctgctctgaagtggcccctccaggctctttggcagcctcttctcgacgtctccttccggagctgagatccagcccagggcgaatggcgagcttggctcaggcctctgcggggtggaggcccctgggcctgaggctgccagcagcgggcaggagctgctcttcatccacttggagtgctgtggggaagaaatcaccaccggtcattctaaccctcacccaggaatgggggtgactcgcacaagacctcatggaaagggtgatgactagggaaaagagggtgcagggcacggctgctccccaccaccaggtctgcatttgttcatcatcatcaggagcagaggtgaccagagggttcagagtgggaggcggggccagcccaggccaggagcgcctcatcttcccaggcctcagccacccagggtaaaaggtgccagggaagttgtgggcacctgagaggaggaacagatgtggaggacctgagggtgctcaaagggccaggctcagcctcaagcagtgttttcattgccaacacttactgtacccactccgcagagcccagctgggcctgggccccagggccacagctagcctgcatgtgtgtactgcactttacagtttgcaaagctcttccatacccactctctcaccgaagcctaattgaggctcttggaaggagtcaggcaaggattgtgcttcccccattatacaggtgacaaaactgagtcctggggaaagtgactggtccgtggtagagccgggacccaatcccctctctctcctccctgttggtgctgttcttcctgcccaacacctgtttctcttttcctcaaggggtttggggcaggagcctgggcacttactccccgtttttgctgtttctccttctgaccctgctcttgggtctaataaccccatttatttg

SEQ ID NO: 342085 - DNA, 1371 bp, Artificial Sequence
  derived and/or modified sequence
atggccagaggcgacgcccccagagacagctaccacctggtgggcatcagcttcttcatcctgggcctgggcaccctgctgccctggaacttcttcatcaccgccatcccctacttccaggccagactggccggcgccggcaacagcaccgccagaatcctgagcaccaaccacaccggccccgaggacgccttcaacttcaacaactgggtgaccctgctgagccagctgcccctgctgctgttcaccctgctgaacagcttcctgtaccagtgcgtgcccgagaccgtgagaatcctgggcagcctgctggccatcctgctgctgttcgccctgaccgccgccctggtgaaggtggacatgagccccggccccttcttcagcatcaccatggccagcgtgtgcttcatcaacagcttcagcgccgtgctgcagggcagcctgttcggccagctgggcaccatgcccagcacctacagcaccctgttcctgagcggccagggcctggccggcatcttcgccgccctggccatgctgctgagcatggccagcggcgtggacgccgagaccagcgccctgggctacttcatcaccccctgcgtgggcatcctgatgagcatcgtgtgctacctgagcctgccccacctgaagttcgccagatactacctggccaacaagagcagccaggcccaggcccaggagctggagaccaaggccgagctgctgcagagcgacgagaacggcatccccagcagcccccagaaggtggccctgaccctggacctggacctggagaaggagcccgagagcgagcccgacgagccccagaagcccggcaagcccagcgtgttcaccgtgttccagaagatctggctgaccgccctgtgcctggtgctggtgttcaccgtgaccctgagcgtgttccccgccatcaccgccatggtgaccagcagcaccagccccggcaagtggagccagttcttcaaccccatctgctgcttcctgctgttcaacatcatggactggctgggcagaagcctgaccagctacttcctgtggcccgacgaggacagcagactgctgcccctgctggtgtgcctgagattcctgttcgtgcccctgttcatgctgtgccacgtgccccagagaagcagactgcccatcctgttcccccaggacgcctacttcatcaccttcatgctgctgttcgccgtgagcaacggctacctggtgagcctgaccatgtgcctggcccccagacaggtgctgccccacgagagagaggtggccggcgccctgatgaccttcttcctggccctgggcctgagctgcggcgccagcctgagcttcctgttcaaggccctgctgtag

SEQ ID NO: 342086 - DNA, 83 bp, Artificial Sequence
  derived and/or modified sequence
aggaggcctcgcctctcccagctgggctggggctcctgtcccccactgtggtgtgcctggggcctggccaggactcccagtga

SEQ ID NO: 342087 - protein, 34 aa, Artificial Sequence
  derived and/or modified sequence
MVTRLLQQQNLPQTGEQELESLVLKLSVLKDFLS

SEQ ID NO: 342088 - protein, 157 aa, Artificial Sequence
  derived and/or modified sequence
MVTRLLQQQNLPQTGEQELESLVLKLSVLKDFLSGIQKKALKALQDMSSTAPPAPQPSTRKAKTIPVQAFEVKLDVTLGDLTKIGKSQKFTLSVDVEGGRLVLLRRQRDSQEDWTTFTHDRIRQLIKSQRVQNKLGVVFEKEKDRTQRKDFIFVSAR

SEQ ID NO: 342089 - DNA, 474 bp, Artificial Sequence
  derived and/or modified sequence
atggtcacacgactgctgcaacaacaaaaccttccgcaaacgggcgaacaggagctggaatccctagtgctcaagctaagcgtcttgaaagattttctgtccggtatccagaaaaaagccctcaaggctcttcaggatatgtctagtaccgccccaccagctcctcagcctagtacccgaaaggctaagacaatcccagtgcaggcttttgaagtgaagctcgatgtgacgcttggtgatctcacaaagataggaaaatctcagaagtttactctcagcgtcgacgtggaaggtgggcggctggttttactgcggagacagcgagacagccaagaggactggacaaccttcactcacgacagaattcggcagttaatcaagtcccaacgcgtgcagaacaagctgggtgtcgtattcgagaaagagaaggatcggacccagcgcaaagattttatcttcgtttccgctcggtag

SEQ ID NO: 342090 - DNA, 550 bp, Artificial Sequence
  derived and/or modified sequence
tgagacccccatcccatccactgaacaggagaccctttctcctctgagaactatttccctaccaaaggtggggaggccttctaagaccccaccagggacccccaccccacctcagcccagaggcagataacctgatccatcccgccctggttgccacaggtactatctcctctagggatggggcagaggtgctgggacaggtcagcaggacctccactgacttcttaacccctccccaaagtgctcccaatgggctgagcaccgtctcgcacgactacctgaaaggcagctatgggctggacctggaagctgtgaggggtggagccagccacctgccccacctcacccgtaccctcgctacctcatgccggaggctgcacagtgaggtggacaaggtcctgtcaggcctggagatcctgtccaaggtgtttgaccagcagagctcgcccatggtgacccgccttttgcagcagcagaacctgccacagacaggggagcaggaactagagagcctggtgctgaagctgtcagtgctaaaggacttcctgtc

SEQ ID NO: 342091 - DNA, 591 bp, Artificial Sequence
  derived and/or modified sequence
ctggagcccagggccgctgtccggggaagggggcgccggagcagcccgggagttgaggccggcgctgcaggcagcggcggctgcgcggtgaacgaggcggcctgcgcgcagagctcgcccatggtgacccgccttttgcagcagcagaacctgccacagacaggggagcaggaactagagagcctggtgctgaagctgtcagtgctaaaggacttcctgtcaggcatccagaagaaggccctgaaggccctacaggacatgagctccacagcacccccagctccgcagccatccacacgtaaggccaagaccatccccgtgcaggcctttgaggtgaagctagatgtgaccctgggtgacctgaccaagattgggaagtcacagaagttcacgctgagcgtggatgtggagggtgggcggctggtgctgctgcggagacagcgggactcccaggaggactggaccaccttcacgcacgaccgcatccgccagctcattaagtcccagcgtgtccagaacaagctgggtgttgtgtttgagaaggagaaggaccggactcagcgcaaggacttcatctttgtcagtgcccgg

SEQ ID NO: 342092 - DNA, 474 bp, Artificial Sequence
  derived and/or modified sequence
atggtgacccggctgctgcagcagcagaacctgccccagacaggagagcaggagctggagagcctggtgctgaagctgtctgtgctgaaggacttcctgagcggcatccagaagaaggccctgaaggccctgcaggacatgagcagcacagcccccccagccccccagcccagcaccaggaaggccaagaccatccctgtgcaggcctttgaggtgaagctggatgtgaccctgggggacctgaccaagattggcaagagccagaagttcaccctgtctgtggatgtggagggcggccgcctggtgctgctgcggcggcagagggacagccaggaggactggaccaccttcacccatgaccgcatccggcagctgatcaagagccagagggtgcagaacaagctgggcgtggtgtttgagaaggagaaggacaggacccagaggaaggacttcatctttgtgtctgccaggtag

SEQ ID NO: 342093 - DNA, 474 bp, Artificial Sequence
  derived and/or modified sequence
atggtgacccggctgctgcagcagcagaacctgccccagaccggcgaacaggagttggagagtttagtgctgaaactcagtgtgttaaaagactttctgagcggaatccagaagaaggccctgaaggccctacaggatatgtccagcaccgccccacccgcaccccagccttccactcgcaaagcaaaaaccatcccagtacaggcgtttgaggtcaagctggatgttacattaggcgacttgaccaagatcgggaaatctcagaagttcaccttatcagtggatgtcgagggcggccggctggttctgctccggaggcagcgggattcccaagaagactggacgacctttactcacgatcgaattagacaactaatcaagtcacaaagagtgcagaataaactgggcgtcgtgttcgagaaagagaaagataggactcagagaaaggacttcatctttgtctccgctcgttag

SEQ ID NO: 342094 - DNA, 474 bp, Artificial Sequence
  derived and/or modified sequence
atggtgacacgactgctgcagcaacagaatttaccccagactggggagcaggaattagaaagtctcgtgctcaaactgtccgtgctgaaggattttctgagtggaattcaaaaaaaagctctcaaggctctgcaggatatgtccagcaccgcacccccagcgccacagccttcaacgcgtaaagccaagactatccccgtacaagccttcgaagtcaagctagacgtgaccctcggcgatctgaccaagattggaaagtcccagaaattcacgctgagtgtggacgttgaaggaggcagactggtgttgcttcggagacagcgcgatagccaggaagactggaccacttttacacatgatagaattaggcagcttattaaatcccaaagagtccagaataagctaggcgtcgtgttcgagaaagagaaggacagaacccagagaaaggatttcatatttgtgagcgctcggtag

SEQ ID NO: 342095 - DNA, 474 bp, Artificial Sequence
  derived and/or modified sequence
atggtgaccagactgctgcagcagcagaacctgccccagaccggcgagcaggagctggagagcctggtgctgaagctgagcgtgctgaaggacttcctgagcggcatccagaagaaggccctgaaggccctgcaggacatgagcagcaccgccccccccgccccccagcccagcaccagaaaggccaagaccatccccgtgcaggccttcgaggtgaagctggacgtgaccctgggcgacctgaccaagatcggcaagagccagaagttcaccctgagcgtggacgtggagggcggcagactggtgctgctgagaagacagagagacagccaggaggactggaccaccttcacccacgacagaatcagacagctgatcaagagccagagagtgcagaacaagctgggcgtggtgttcgagaaggagaaggacagaacccagagaaaggacttcatcttcgtgagcgccagatag

SEQ ID NO: 342096 - DNA, 912 bp, Artificial Sequence
  derived and/or modified sequence
tctgggtctctggatacaatttctcttactcctctccctacctcctgcagagttttttgatgcagaaggaagtgaggtagatttgaactttggggggctccagggccgaggggtcaagaagcaggacccccaagtcgaacgggatctctacctgtccctggaggacttattctttggctgcaccaaaaaaattaagatctccagaagggtgctgaacgaggatgggtactcctccaccatcaaggacaagatcctgaccattgatgtgaagcccggttggaggcagggcacacgcatcacctttgagaaggaaggggaccaggcccttccagaaaacctgctctcatctccccattgtacagatgaagacatggagacaagtagaggcaggaacttggccaaggtcacacggccaactagtccttgtcaccttttggcgtcccctgcccagggccccaacatcatcccagcagacatcattttcatcgtaaaggagaagctacaccctcgcttccgcagggagaatgacaacctcttcttcgtgaaccccatccctcttggcaaggctctcacctgctgcactgtggaggtgaggaccctagatgaccgtctgctcaacatccccatcaatgacatcatccaccccaaatacttcaagaaggtgccaggggaggggatgccattgccggaggaccccactaagaaaggggatctcttcatcttcttcgacatccagttccccacccgcctcacaccccagaagaagcagatgctgcgccaggcattgctgacatgactgtggtgggctggagcaggggtgagaggaggctagccgggcctcaccccacccctacccgccacagcctcagggtgtgcaggggagcctgctgcacagatatgatacaagggtgg

SEQ ID NO: 342097 - DNA, 426 bp, Artificial Sequence
  derived and/or modified sequence
atggagaccagcagaggcagaaacctggccaaggtgaccagacccaccagcccctgccacctgctggccagccccgcccagggccccaacatcatccccgccgacatcatcttcatcgtgaaggagaagctgcaccccagattcagaagagagaacgacaacctgttcttcgtgaaccccatccccctgggcaaggccctgacctgctgcaccgtggaggtgagaaccctggacgacagactgctgaacatccccatcaacgacatcatccaccccaagtacttcaagaaggtgcccggcgagggcatgcccctgcccgaggaccccaccaagaagggcgacctgttcatcttcttcgacatccagttccccaccagactgaccccccagaagaagcagatgctgagacaggccctgctgacctag

SEQ ID NO: 342098 - DNA, 426 bp, Artificial Sequence
  derived and/or modified sequence
atggagactagtcgcggacgtaatctagctaaggtgactaggcctacctctccctgtcatcttcttgctagccccgcgcaaggtccaaacatcattcccgcagacataatcttcattgtgaaagagaaactccatcctaggtttagacgtgagaacgacaatttgttcttcgttaacccaatccccctgggcaaagccctgacatgctgtaccgtcgaggttcggacccttgacgaccgcctgctgaatattcccatcaacgatatcatccacccaaagtactttaagaaggtgcctggagagggcatgccactcccagaggaccctacaaagaagggagaccttttcatcttctttgatattcagttcccaacccggctcacgcctcagaaaaaacagatgctgagacaagccctgctgacctag

SEQ ID NO: 342099 - DNA, 426 bp, Artificial Sequence
  derived and/or modified sequence
atggaaacgtcgaggggccgaaacttggcaaaagttactcgcccaacctctccctgtcatctcttggctagccccgctcagggcccaaacatcatacctgcggatatcatctttatcgttaaagagaaactccaccccaggtttcgccgcgaaaacgacaatctgttttttgtcaatcctatccctcttggaaaggctctgacctgttgtaccgtggaagtaagaactctggatgatcgactgctgaacatcccgataaacgatatcatccatcctaaatacttcaagaaggtcccaggagagggaatgcctttaccagaagatcccaccaagaaaggggacctgtttatatttttcgacatccagtttccgacacgcttaaccccacagaagaaacagatgcttaggcaggcactgttgacttag

SEQ ID NO: 342100 - DNA, 1779 bp, Artificial Sequence
  derived and/or modified sequence
agtgcaggagtgccctctgcagccttcccaactgggacaggctctttcccttcctttctttcagttcagccccatccccgtgggaactggaaaggctctgaatgggaggagtctcttctgaattcttccttctgggctttaccagaccatattcccaggatttcatcagggtgcatgcctcgtgcataagaaagaacagtgggcatggagggtgggctgggagatagtccccaaggtgacgggttgaggaagaccctcagtgcctcatgtctagtccttggcttggccctgtcccatggcccagccctgtgccaggcataagagcaagccccctccacctttgcccagcagaggagatgccgatgcggccatgctttccacagatggaacccatctggacatgcgactggggagtggaaggatccccagtggggaatgcactgggggaggcttagatatgttgactttcatttctctctttgggattaagagacttgctggaggctcagggccgggcctctgggatttggagagaggaatggagtacattttcaccatgtatctgttagtggccagggctggagctgtgtgtttgatcaactaatggtgactgcttggcatctcagcccccagccccagtctcatggcatcctctgccatactggaatcataagttcttggttgtcatggcaacaggatgggagtgggagtggctcagggcaggctctccccattgctggaggctcttcccattgctagaggattgagcccaagtacaaatcccatagagcatctttcacgtgtgcaaaggtcacctgagtgttcatgaaaatctgagcaaatctcgactgtactcatggaagtcctaagcagacctccccacacctgatatgttgctataggtgctgaacgaggatgggtactcctccaccatcaaggacaagatcctgaccattgatgtgaagcccggttggaggcagggcacacgcatcacctttgagaaggaaggggaccagcgcccagaagagacctcagcagagttttggtgacttaatgaagtttgggacaggggtgtcatgcctggagttactagcaagacagagacatacgggcagttgcctgacgcccagcttagtgttccacctgcctgccgtctgaggaagcctctccgcccctccagctgagtgtgtctattttgggcatgctcagtacagaagtaattctggggggattcatttggatgaagacatggagacaagtagaggcaggaacttggccaaggtcacacggccaactagtccttgtcaccttttggcgtcccctgcccagggccccaacatcatcccagcagacatcattttcatcgtaaaggagaagctacaccctcgcttccgcagggagaatgacaacctcttcttcgtgaaccccatccctcttggcaaggctctcacctgctgcactgtggaggtgaggaccctagatgaccgtctgctcaacatccccatcaatgacatcatccaccccaaatacttcaagaaggtgccaggggaggggatgccattgccggaggaccccactaagaaaggggatctcttcatcttcttcgacatccagttccccacccgcctcacaccccagaagaagcagatgctgcgccaggcattgctgacatgactgtggtgggctggagcagggctacacccacgagagtacattggagaggagcttcatattagcccttcttgtggggcacagggaagaaagaggcctaaggagctg

SEQ ID NO: 342101 - DNA, 426 bp, Artificial Sequence
  derived and/or modified sequence
atggagaccagccggggcaggaacctggccaaggtgacccggcccaccagcccctgccacctgctggccagccctgcccagggccccaacatcatcccagctgacatcatcttcatcgtgaaggagaagctgcacccccgcttcagaagagaaaatgacaacctcttctttgtgaaccccatccccctgggcaaggccctgacctgctgcaccgtggaggtgaggaccctggatgaccggctgctgaacatccccatcaatgacatcatccaccccaagtacttcaagaaggtgcctggagagggcatgcccctgcctgaggaccccaccaagaagggggacctcttcatcttctttgacatccagttccccacccggctgaccccccagaagaagcagatgctgcggcaggccctgctgacctag

SEQ ID NO: 342102 - DNA, 426 bp, Artificial Sequence
  derived and/or modified sequence
atggagaccagccggggccggaacctggccaaggtgacccggcccacttcaccgtgtcatctgttggcttcgcctgcacagggtccaaatataatcccggccgatattatcttcatcgttaaagagaagctacacccccgattccgcagagagaatgataacttattctttgtgaaccctatccccttaggtaaggcccttacgtgttgcactgtcgaagtccgcacattagatgatagactgctaaatattccgataaacgatataatacaccccaaatatttcaaaaaggttcccggcgaaggcatgcctctgccggaagaccctacaaaaaaaggggatctgttcatcttctttgatatccagtttcctacacggctgaccccgcaaaaaaagcagatgctgcggcaggcgctgttgacttag

SEQ ID NO: 342103 - DNA, 426 bp, Artificial Sequence
  derived and/or modified sequence
atggagaccagccggggccggaacctggccaaggtgacccggcccacatccccttgtcatcttctggcatccccggctcaaggcccgaacataattccagcggacattatctttattgtgaaagagaaactccatccacgtttcagacgggagaatgataacttgttctttgttaatccaatccccctagggaaggccctgacttgttgcaccgttgaagtgcgcacactggacgatcgccttctgaatattcccattaacgatattatacacccaaagtacttcaagaaggtgccaggggaaggtatgcctctgccggaggatcctacaaaaaaaggggacttgtttattttcttcgacatccagtttccaacccgtctgacaccccagaagaaacaaatgctccggcaggctttgctgacttag

SEQ ID NO: 342104 - DNA, 426 bp, Artificial Sequence
  derived and/or modified sequence
atggaaacctccaggggtaggaacctggctaaggtgaccaggcctaccagtccttgccacctgttggcaagcccggctcaggggcctaatatcatccctgcggacatcatatttatcgtgaaagagaaacttcatcccagattccggagggaaaatgacaatctctttttcgtcaatccaatccccctcggtaaggcattaacttgttgtaccgtagaggtacgcacattggacgataggctcctcaatattcccatcaacgatattatacacccaaagtactttaaaaaagttccaggcgaggggatgcccctgcctgaagatcctaccaagaagggggatcttttcatcttctttgacattcagttcccaactaggttgactcctcagaagaagcaaatgctgagacaggctctgctaacatag

SEQ ID NO: 342105 - DNA, 426 bp, Artificial Sequence
  derived and/or modified sequence
atggagaccagtaggggtagaaatttggcaaaggtaactcgccctacctctccgtgccacctgcttgcctctcccgcacaaggccctaatatcattcccgctgacataatctttattgtaaaggaaaagctgcacccacgatttaggcgcgagaatgacaacctctttttcgtgaatccaatcccactgggaaaggcgctgacttgctgtacggttgaggtgagaaccttagatgatcggctgctgaacattcccattaatgatattattcatcccaagtactttaagaaagtgcccggtgaaggcatgcctttgcccgaggatccaaccaaaaaaggggatctcttcatctttttcgatattcagttccccacgcgcctgaccccacagaaaaaacaaatgcttcgccaggcattactcacctag

SEQ ID NO: 342106 - DNA, 2079 bp, Artificial Sequence
  derived and/or modified sequence
aatcttatcgccatggaccttaccttgcacaacccaaagtagctgccttggggcagggggtggccagagtgcttagggaaatgtggagccctacccagaacaacggtggagggaaagggaagaaacgcagaagtgccccagttcggacgtagggaagtcttcctcttcgtggtttttggagaaccctagctaagagaggaaagggacttattgaaagacccgcaagaagggacggaagtctcatagccctgagagacctctagctacagaaaagttctccaagtctgcactcgacccaggaagtccatctggcttcacctctcacttcaacttgggtacagccttctggcgggcaggaggatggcctttggtgcgaacactgccggagtccagggggctggctccctcacctttcatcttctcccggcacttgcaggatccctttgtggccttccacatcaacaagggccttgtgaagaagtatatgaactctctcctgattggagaactgtctccagagcagcccagctttgagcccaccaagaataaagagctgacagatgagttccgggagctgcgggccacagtggagcggatggggctcatgaaggccaaccatgtcttcttcctgctgtacctgctgcacatcttgctgctggatggtgcagcctggctcaccctttgggtctttgggacgtcctttttgcccttcctcctctgtgcggtgctgctcagtgcagttcaggcccaggctggctggctgcagcatgactttgggcacctgtcggtcttcagcacctcaaagtggaaccatctgctacatcattttgtgattggccacctgaagggggcccccgccagttggtggaaccacatgcacttccagcaccatgccaagcccaactgcttccgcaaagacccagacatcaacatgcatcccttcttctttgccttggggaagatcctctctgtggagcttgggaaacagaagaaaaaatatatgccgtacaaccaccagcacaaatacttcttcctaattgggcccccagccttgctgcctctctacttccagtggtatattttctattttgttatccagcgaaagaagtgggtggacttggcctggatgattaccttctacgtccgcttcttcctcacttatgtgccactattggggctgaaagccttcctgggccttttcttcatagtcaggttcctggaaagcaactggtttgtgtgggtgacacagatgaaccatattcccatgcacattgatcatgaccggaacatggactgggtttccacccagctccaggccacatgcaatgtccacaagtctgccttcaatgactggttcagtggacacctcaacttccagattgagcaccatctttttcccacgatgcctcgacacaattaccacaaagtggctcccctggtgcagtccttgtgtgccaagcatggcatagagtaccagtccaagcccctgctgtcagccttcgccgacatcatccactcactaaaggagtcagggcagctctggctagatgcctatcttcaccaataacaacagccaccctgcccagtctggaagaagaggaggaagactctggagccaaggcagaggggagcttgagggacaatgccactatagtttaatactcagagggggttgggtttggggacataaagcctctgactcaaactcctcccttttatcttctagccacagttctaagacccaaagtggggggtggacacagaagtccctaggagggaaggagctgttggggcaggggtgtaaattatttcctttttctagtttggcacatgcaggtagttggtgaacagagagaaccaggagggtaacagaagaggagggacctactgaacccagagtcaggaagagatttaacactaaaattccactcatgccgggcgtggtggcacgcgcctgtaatcccagctacccaggaggctgaggcaggagaatcgcttgaaccggggaggtggaggttgcagtgagctgagatcacgccattgtactccagcctgggcgacagagcaagactccatttc

SEQ ID NO: 342107 - DNA, 1690 bp, Artificial Sequence
  derived and/or modified sequence
gtctcgatggctaggagaggcagcgcagccgcgtctggacctaggtgccggtctccactcgccagcaggagcggagagggagcaggaaaggagcccattctcgaggatggggctgaaacgggaagcttggggagaccgctgccttggggacccctgcgtcgtgtgaagactggaggacgcggaagggacagcgctggccggggagggatccctttgtggccttccacatcaacaagggccttgtgaagaagtatatgaactctctcctgattggagaactgtctccagagcagcccagctttgagcccaccaagaataaagagctgacagatgagttccgggagctgcgggccacagtggagcggatggggctcatgaaggccaaccatgtcttcttcctgctgtacctgctgcacatcttgctgctggatggtgcagcctggctcaccctttgggtctttgggacgtcctttttgcccttcctcctctgtgcggtgctgctcagtgcagttcaggcccaggctggctggctgcagcatgactttgggcacctgtcggtcttcagcacctcaaagtggaaccatctgctacatcattttgtgattggccacctgaagggggcccccgccagttggtggaaccacatgcacttccagcaccatgccaagcccaactgcttccgcaaagacccagacatcaacatgcatcccttcttctttgccttggggaagatcctctctgtggagcttgggaaacagaagaaaaaatatatgccgtacaaccaccagcacaaatacttcttcctaattgggcccccagccttgctgcctctctacttccagtggtatattttctattttgttatccagcgaaagaagtgggtggacttggcctggatgattaccttctacgtccgcttcttcctcacttatgtgccactattggggctgaaagccttcctgggccttttcttcatagtcaggttcctggaaagcaactggtttgtgtgggtgacacagatgaaccatattcccatgcacattgatcatgaccggaacatggactgggtttccacccagctccaggccacatgcaatgtccacaagtctgccttcaatgactggttcagtggacacctcaacttccagattgagcaccatctttttcccacgatgcctcgacacaattaccacaaagtggctcccctggtgcagtccttgtgtgccaagcatggcatagagtaccagtccaagcccctgctgtcagccttcgccgacatcatccactcactaaaggagtcagggcagctctggctagatgcctatcttcaccaataacaacagccaccctgcccagtctggaagaagaggaggaagactctggagccaaggcagaggggagcttgagggacaatgccactatagtttaatactcagagggggttgggtttggggacataaagcctctgactcaaactcctcccttttatcttctagccacagttctaagacccaaagtggggggtggacacagaagtccctaggagggaaggagctgttggggcaggggtgtaaattatttcctttttctagtttggcacatgcaggtagttggtgaacagagagaaccaggagggtaacagaagaggagggacctactgaacccagagtcaggaagagatttaacacta

SEQ ID NO: 342108 - DNA, 1725 bp, Artificial Sequence
  derived and/or modified sequence
gcagacgaaacaggcaccaacgctggagcttcccgcagtgtgatttggggccgggaatgccgcggcggggacggcgattggtccgtatgtgtggtgccaccggccgccggctccgccccggcccccgccccacacgccgcatcacttacagggcccggggctgccggacctgccaacgtgaatcttatcgccatggaccttaccttgcacaacccaaagtagctgccttggggcagggggtggccagagtgcttagggaaatgtggagccctacccagaacaacggtggagggaaagggaagaaacgcagaagtgccccagttcggacgtagggaagtcttcctcttcgtggtttttggagaaccctagctaagagaggaaagggacttattgaaagacccgcaagaagggacggaagtctcatagccctgagaggtgaagccagctggagttgatgggtcgaatggggacctagagaacttttctgtatctagaggatccctttgtggccttccacatcaacaagggccttgtgaagaagtatatgaactctctcctgattggagaactgtctccagagcagcccagctttgagcccaccaagaataaagagctgacagatgagttccgggagctgcgggccacagtggagcggatggggctcatgaaggccaaccatgtcttcttcctgctgtacctgctgcacatcttgctgctggatggtgcagcctggctcaccctttgggtctttgggacgtcctttttgcccttcctcctctgtgcggtgctgctcagtgcagttcaggcccaggctggctggctgcagcatgactttgggcacctgtcggtcttcagcacctcaaagtggaaccatctgctacatcattttgtgattggccacctgaagggggcccccgccagttggtggaaccacatgcacttccagcaccatgccaagcccaactgcttccgcaaagacccagacatcaacatgcatcccttcttctttgccttggggaagatcctctctgtggagcttgggaaacagaagaaaaaatatatgccgtacaaccaccagcacaaatacttcttcctaattgggcccccagccttgctgcctctctacttccagtggtatattttctattttgttatccagcgaaagaagtgggtggacttggcctggatgattaccttctacgtccgcttcttcctcacttatgtgccactattggggctgaaagccttcctgggccttttcttcatagtcaggttcctggaaagcaactggtttgtgtgggtgacacagatgaaccatattcccatgcacattgatcatgaccggaacatggactgggtttccacccagctccaggccacatgcaatgtccacaagtctgccttcaatgactggttcagtggacacctcaacttccagattgagcaccatctttttcccacgatgcctcgacacaattaccacaaagtggctcccctggtgcagtccttgtgtgccaagcatggcatagagtaccagtccaagcccctgctgtcagccttcgccgacatcatccactcactaaaggagtcagggcagctctggctagatgcctatcttcaccaataacaacagccaccctgcccagtctggaagaagaggaggaagactctggagccaaggcagaggggagcttgagggacaatgccactatagtttaatactca

SEQ ID NO: 342109 - DNA, 3916 bp, Artificial Sequence
  derived and/or modified sequence
caggatgccttccgtgccttccatcaagatctcaattttgtgcgcaagttcctacagcccctgttgattggagagctggctccggaagaacccagccaggatggacccctgaatgcgcagctggtcgaggacttccgagccctgcaccaggcagccgaggacatgaagctgtttgatgccagtcccaccttctttgctttcctactgggccacatcctggccatggaggtgctggcctggctccttatctacctcctgggtcctggctgggtgcccagtgccctggccgccttcatcctggccatctctcaggcccaggctggctggctgcagcatgactttgggcacctgtcggtcttcagcacctcaaagtggaaccatctgctacatcattttgtgattggccacctgaagggggcccccgccagttggtggaaccacatgcacttccagcaccatgccaagcccaactgcttccgcaaagacccagacatcaacatgcatcccttcttctttgccttggggaagatcctctctgtggagcttgggaaacagaagaaaaaatatatgccgtacaaccaccagcacaaatacttcttcctaattgggcccccagccttgctgcctctctacttccagtggtatattttctattttgttatccagcgaaagaagtgggtggacttggcctggatgattaccttctacgtccgcttcttcctcacttatgtgccactattggggctgaaagccttcctgggccttttcttcataaggttcctggaaagcaactggtttgtgtgggtgacacagatgaaccatattcccatgcacattgatcatgaccggaacatggactgggtttccacccagctccaggccacatgcaatgtccacaagtctgccttcaatgactggttcagtggacacctcaacttccagattgagcaccatctttttcccacgatgcctcgacacaattaccacaaagtggctcccctggtgcagtccttgtgtgccaagcatggcatagagtaccagtccaagcccctgctgtcagccttcgccgacatcatccactcactaaaggagtcagggcagctctggctagatgcctatcttcaccaataacaacagccaccctgcccagtctggaagaagaggaggaagactctggagccaaggcagaggggagcttgagggacaatgccactatagtttaatactcagagggggttgggtttggggacataaagcctctgactcaaactcctcccttttatcttctagccacagttctaagacccaaagtggggggtggacacagaagtccctaggagggaaggagctgttggggcaggggtgtaaattatttcctttttctagtttggcacatgcaggtagttggtgaacagagagaaccaggagggtaacagaagaggagggacctactgaacccagagtcaggaagagatttaacactaaaattccactcatgccgggcgtggtggcacgcgcctgtaatcccagctacccaggaggctgaggcaggagaatcgcttgaaccggggaggtggaggttgcagtgagctgagatcacgccattgtactccagcctgggcgacagagcaagactccatttcaaaaaaaaaaaaaaaatccactcatataaaaggtgagctcagctcactggtccatttctcagtggcttctccatcctcatttgcaaacctcagagggataaggcagttgaacctgatgagcaagaattataacagcaaggaaacattaatgcttagaattctgagatccagcacaactcagtctgtgggagctcagctcgctgcccagggataggtatgacctatgtctgccttaggctgctgggagatgccattctccagtttcagaagcaggcagggcaaaggtcaagactgtggtattggggtcttttggctctgaaggatcctggaaccactgattttggtttattccctccagggtctaaagagaacaagaggtgctagctcttaccaaaacagatggtagagagagttgctggctatttaaaaagctctttcatcttttaattcacctcttcttttcacctctttaaccactcctcaggaacagaacacttctaggactgggggtcttttagctccataagcaagtgagcagatgggacaagttagtcttttctccctagaaacaaaggggatgcccagtggtttccctttgcttcccaacctaaaatttcaagtttaataaaatagcaattagcagaagtgaccaaattgggagataattatcagtcatgaggaaagacacagatttcggtcataaagaatgtaagggctataagtagaaactttctataacctaaatgatgttatagaattatttttgagcaggagcagaaagattaaatatgatcacttcatacttctaaatcagaaataggaagattaaaaccacagaacagtttgtgatttctattgctgtagctaggtatcttactctgtccactcttgttcaagtatctaactcttctggaaaccaaataggctttagaagagattatcctatattcctatcagtataatactaaaatgtaactttttaatcatctggtttttaaaagataaacagtttagcccatctctccagagagcaaacataggaatatgactcaggagcctcctagggcttatcatcagccctcacacccgcttccccctccaacccacagcctttgcttccaggtggcaggattactactttgcctcttcagcagcatctactctaggcatattgatcattttagacactgggagaagagaacctcaaactaggaggaaaagacagagcctccacttagttttgggaggggatggcagacagtcaaggagatgagcgtcctaaggcatgttgggatagggtcagatgcaccacccatggagaggtttgtcaacacaaagacatggaaggttagaggtttgtcaacaaaaagacatggaaggttaggtttgtcaacacaaagacatggaagattagaggtttgtcaacacaaagacacaggaagaatgggctgcagaagatttagatgttttccatttgggcacattttacttagctggagaactaggtttaaaacagcctgggtaggaaaattagaagcaagctggatgcagtggctcatgcctgtaatcccaacacttttgggaggtccaggcaggaggatcacttgggcccaggaggtcaagcctgcagcgagctgagatcacaccactgcactccagcctggggtgatagaacaagaccctgtctcaaaaaaaaaaaaaacaacaaaaacttagaattgaggagttgtacctccattggcttcctcactccaaaataggtgctgatccttcctattcctattctttgccaccttttgggtgtggtgtcaccagcctgtttagccaagtagctttgggcataggctgcccaatctgagcaaacaccagtgaggctctattgagccaagaccaagtcctcaaagcacctgaaccactgtggccttctcagcctacagcagtgtggtctcttacatggccacaaagggacacacagtgacaaaaggctcggaatgttacaatggtaaaatgagtgatctcaaatccactgacagatataaaataggcttagagaggaaaagctgcctctggtcaagtagatcatggcagcatgaattccaactcacttttttacaactccaacttctatgtttatctttgttactttcacttttttacaacctggccagaggcattttttaaatcaggcccaatatcagtattctttttgtgtgtgccaattttgttatcacatccctatgaagttgaaaaataaagttaattttgaccaaaag

SEQ ID NO: 342110 - DNA, 1083 bp, Artificial Sequence
  derived and/or modified sequence
atgaatagtctcctgattggggaattgtccccggagcagccttcctttgaacccactaaaaacaaggagctaaccgatgaatttagagagctccgtgcgaccgtggagcggatgggcttaatgaaggccaaccacgtgttctttctgctatacttgctgcacatccttctcttagacggcgcggcttggttgaccctgtgggtgtttggcactagctttctgcccttccttctgtgtgccgtcctcttgagtgcagttcaggcacaagcaggctggctgcagcatgatttcggtcacttatccgttttttctacaagtaagtggaaccacctgctgcaccacttcgtgatcgggcatcttaagggggcacccgcgtcttggtggaatcacatgcacttccaacaccacgccaaacccaattgtttccgtaaggacccagacattaatatgcacccctttttcttcgccctgggtaagatcctatccgtggaactaggtaagcagaaaaaaaagtatatgccctacaaccatcagcacaaatactttttcctcatcggcccacccgccctgctaccgctgtacttccagtggtacatattctattttgtcatacaacgtaagaagtgggtagacttggcgtggatgatcactttttacgtgaggttcttcttgacttatgtacctttgctgggcctcaaggccttcttgggattgttcttcatcgtgcgcttcctcgaaagcaactggtttgtgtgggttacgcagatgaaccatatccctatgcacatcgatcatgatagaaacatggattgggtcagtacacagctgcaggctacatgtaacgtgcacaagagtgcatttaatgactggttctccggtcatttaaacttccaaattgagcaccatctattccccacgatgccccggcataactaccacaaggttgcgccactggtgcaaagcctgtgcgcaaagcacggcattgaatatcagtcaaagcccctcctctccgcctttgctgacatcattcattccctcaaggagagcggccaattatggttggatgcctacctgcatcagtag

SEQ ID NO: 342111 - DNA, 1083 bp, Artificial Sequence
  derived and/or modified sequence
atgaattccctgcttattggtgaattatccccggagcagccgtccttcgagcctaccaagaataaggaactgacggacgagttcagagaactgagagccacagttgagcgtatgggattaatgaaggcgaaccacgtgttcttcctactctaccttctccatatcctactcctggacggtgccgcgtggctgactctgtgggtgtttggcacatcctttctgccttttcttctgtgtgcggtactgttatccgccgtgcaggctcaagccggctggcttcagcacgactttggacatctttccgtgtttagcacttccaaatggaatcaccttctacatcatttcgtcattggacatctgaagggcgcccctgcttcttggtggaaccacatgcacttccagcatcacgcgaagcctaactgcttcaggaaggatcctgacatcaacatgcacccatttttcttcgccctggggaagattctttctgtggagctgggaaagcagaagaaaaagtatatgccctacaatcatcaacacaagtacttctttcttatcgggccccccgcactgctgccactgtattttcagtggtatattttttattttgtgatccagcggaaaaaatgggtggacctggcttggatgattacattctatgtaaggttctttctgacatatgttccacttctggggctcaaagcctttctcgggctgttctttatagtgcgctttcttgagagtaattggtttgtgtgggtaacgcagatgaatcatatcccaatgcacatagatcacgatcgcaacatggattgggtgtcaacccagctgcaggcgacatgtaatgtacacaagagcgcgttcaacgactggtttagcggccacttaaacttccaaatcgagcaccacctctttccgacgatgccacgtcacaactatcacaaagttgcgccactagtgcagagtctctgcgcgaagcacggtattgaatatcagagcaagccattgctctctgctttcgcagacatcatccactctctgaaggaaagtgggcagctgtggctggacgcatatctgcaccagtag

SEQ ID NO: 342112 - DNA, 1083 bp, Artificial Sequence
  derived and/or modified sequence
atgaacagcctactgattggtgagctgtcaccggagcagccaagcttcgaacctactaagaacaaggagttaacggatgagtttcgtgagcttcgggccacagtggagcgaatggggctgatgaaggcaaaccacgtgtttttcttgctgtatctgctgcatatcctgctccttgatggcgccgcatggctgacgctatgggttttcggcacctcctttctcccgtttttgctctgtgctgtgctcctgtcagccgtccaggcacaagctggctggctgcagcatgatttcggtcacctgtctgtgttcagcactagtaagtggaaccacttactgcatcacttcgtgatagggcacctgaaaggtgctcctgcttcttggtggaatcacatgcacttccagcaccacgccaagccgaattgcttccggaaagacccggacattaacatgcatcccttcttcttcgctttgggcaagattctaagcgtggaattaggaaagcaaaagaaaaagtatatgccctacaaccatcagcataagtacttttttctgattggtcctcccgcgttgctcccattatactttcagtggtatatcttctactttgtgatacagcggaagaaatgggtggacctggcttggatgattactttttacgtgaggtttttcctgacctacgtgcctctgctggggctcaaggcattcttaggtctattcttcatcgtccgcttcctagagtctaattggtttgtttgggtgactcaaatgaaccacatacccatgcatattgaccatgacagaaatatggactgggtttccacccagctgcaggcaacctgcaatgtccataaaagtgcattcaacgattggttctctggacacctcaacttccagatcgaacaccatttgtttcctactatgcccaggcacaactaccataaggtagcacctctggtgcaatccctgtgcgctaaacatggaatagagtatcaatctaaaccactgttgagcgcgtttgctgatatcattcatagcctaaaggagagtggtcagctatggctcgatgcgtacctccaccagtag

SEQ ID NO: 342113 - DNA, 1131 bp, Artificial Sequence
  derived and/or modified sequence
caagacgccttcagggccttccaccaggaccttaactttgttaggaaatttttacagccgctgctcatcggtgaactggctccagaagagcccagccaggacgggcctttgaacgcccaactggtggaggattttcgcgccctccatcaggccgcagaggacatgaagttatttgatgcttcccctaccttttttgcttttctcctggggcacatcttggccatggaggtcctggcctggttactgatctacctgctgggacccggatgggtgccttcggcgctcgctgcctttatattggcaattagccaagcccaagcaggctggctccagcacgacttcggccacctgagtgtgttctccacatcaaagtggaaccacctccttcaccacttcgtaatcggacatttaaaaggggcaccagcaagctggtggaaccacatgcacttccagcaccacgccaagcctaattgctttcggaaagatcccgacattaatatgcatccattctttttcgccttgggaaaaatcttaagtgtggagctgggcaagcagaagaagaagtacatgccctataaccatcaacacaaatacttctttctgattgggccccccgcgttacttcccctgtacttccaatggtatatcttctatttcgtcatacagcgcaagaagtgggtcgatcttgcatggatgattaccttttacgtaagattcttcctgacctatgtgcccttgctgggattgaaagcattccttggtctgttttttattcgatttctggaaagtaattggttcgtgtgggtcacacagatgaatcatatccccatgcacatcgatcacgaccgaaatatggactgggtgtctacccagctccaagctacgtgcaatgtacacaaatctgcattcaatgactggttttcaggccatcttaacttccagatcgaacatcacctgttccctaccatgcccagacataactaccataaggtggccccactcgtgcagtcattgtgcgccaaacatggtatcgaataccagtcaaagccccttctgtccgcattcgctgatatcattcactccctgaaggagtctgggcagctttggctggatgcttatctgcaccagtag

SEQ ID NO: 342114 - DNA, 1083 bp, Artificial Sequence
  derived and/or modified sequence
atgaacagcctgctgattggagagctgagccctgagcagcccagctttgagcccaccaagaacaaggagctgacagatgagttccgggagctgcgggccaccgtggagaggatgggcctgatgaaggccaaccacgtgttcttcctgctgtacctgctgcacatcctgctgctggatggagctgcctggctgaccctgtgggtgtttggcaccagcttcctgcccttcctgctgtgtgctgtgctgctgtctgctgtgcaggcccaggccggctggctgcagcacgactttggccacctgtctgtgttcagcaccagcaagtggaaccacctgctgcaccactttgtgattggccacctgaagggggccccagcctcctggtggaaccacatgcacttccagcaccacgccaagcccaactgcttcaggaaggaccctgacatcaacatgcaccccttcttctttgccctgggcaagatcctgtctgtggagctgggcaagcagaagaagaagtacatgccctacaaccaccagcacaagtacttcttcctgattggccccccagccctgctgcccctgtacttccagtggtacatcttctacttcgtcatccagaggaagaagtgggtggacctggcctggatgatcaccttctacgtgcgcttcttcctgacctacgtgcccctgctgggcctgaaggccttcctgggcctcttcttcatcgtgcgcttcctggagagcaactggtttgtgtgggtgacccagatgaaccacatccccatgcacatcgaccatgacaggaacatggactgggtgtccacccagctgcaggccacctgcaatgtgcacaagagcgccttcaatgactggttcagcggccacctgaacttccagatcgagcaccacctgttccccaccatgcccaggcacaactaccacaaggtggcccccctggtgcagagcctgtgtgccaagcacggcatcgagtaccagagcaagcccctgctgagcgcctttgctgacatcatccacagcctgaaggagagcggccagctgtggctggatgcctacctgcaccagtag

SEQ ID NO: 342115 - DNA, 1131 bp, Artificial Sequence
  derived and/or modified sequence
caggatgccttccgggccttccaccaggacctgaactttgtgaggaagttcctgcagcccctgctgattggagagctggcccctgaggagcccagccaggacggccccctgaatgcccagctggtggaggacttccgggccctgcaccaggccgctgaggacatgaagctgtttgatgccagccccaccttctttgccttcctgctgggccacatcctggccatggaggtgctggcctggctgctgatctacctgctgggccctggctgggtgcccagcgccctggccgccttcatcctggccatcagccaggcccaggccggctggctgcagcacgactttggccacctgagcgtcttcagcaccagcaagtggaaccacctgctgcaccacttcgtcatcggccacctgaagggggccccagcctcctggtggaaccacatgcacttccagcaccacgccaagcccaactgcttcaggaaggaccctgacatcaacatgcaccccttcttctttgccctgggcaagatcctgtctgtggagctgggcaagcagaagaagaagtacatgccctacaaccaccagcacaagtacttcttcctgattggccccccagccctgctgcccctgtacttccagtggtacatcttctactttgtgatccagaggaagaagtgggtggacctggcctggatgatcaccttctacgtgcgcttcttcctgacctacgtgcccctgctgggcctgaaggccttcctgggcctcttcttcatccgcttcctggagagcaactggtttgtgtgggtgacccagatgaaccacatccccatgcacatcgaccatgacaggaacatggactgggtgtccacccagctgcaggccacctgcaatgtgcacaagagcgccttcaatgactggttcagcggccacctgaacttccagatcgagcaccacctgttccccaccatgcccaggcacaactaccacaaggtggcccccctggtgcagagcctgtgtgccaagcacggcatcgagtaccagagcaagcccctgctgagcgcctttgctgacatcatccacagcctgaaggagagcggccagctgtggctggatgcctacctgcaccagtag

SEQ ID NO: 342116 - DNA, 1083 bp, Artificial Sequence
  derived and/or modified sequence
atgaacagcctgctgatcggcgagctgagccccgagcagcccagcttcgaacccacaaagaacaaggaattaacggatgaattcagagagttgcgcgcaactgtggagcggatggggctgatgaaggccaatcacgtgttcttcctgctttatctgctccatattctcctgcttgatggtgcagcttggctgacactgtgggtgttcggcacttccttccttcccttccttctctgtgccgtcttactgtctgccgtccaggctcaggctgggtggttgcaacatgacttcggccatctttctgtcttctccactagtaaatggaaccacctcttgcatcactttgtgatcgggcacctcaaaggcgcccccgcatcttggtggaatcatatgcacttccagcaccacgcgaagccaaactgctttaggaaggaccccgatatcaatatgcacccattctttttcgcactcggtaagatcttgtccgttgagcttgggaagcagaagaagaaatacatgccatataaccatcagcataaatactttttcttaattggtccacccgcactccttcctctgtatttccaatggtatatcttttattttgtgatccaaagaaagaaatgggtagatcttgcctggatgattactttttatgtgagattcttcctcacatatgtccctctgctagggttgaaagcctttctgggccttttctttatcgtgagatttctggaatcaaattggttcgtctgggtgacacagatgaatcatatccccatgcatatcgaccacgacagaaatatggattgggttagtactcagctacaggctacctgtaatgttcacaagagcgcgttcaacgactggttttccggacacttgaatttccagatcgaacaccatttgttccctacgatgccacgtcacaactatcacaaagttgcacctctggtgcagagcctctgtgcgaagcatggaatagagtaccagagtaagcctctcctcagtgcctttgccgatattatccactctctgaaagaaagtggtcagctgtggcttgatgcttatttgcaccagtag

SEQ ID NO: 342117 - DNA, 1083 bp, Artificial Sequence
  derived and/or modified sequence
atgaacagcctgctgatcggcgagctgagccccgagcagcccagctttgagcccacaaaaaacaaggaactgacagatgaattccgggagttgagagccaccgtggaacgtatgggcttaatgaaggctaaccacgtgtttttcctcctgtatctcctccacatcctgctcttggatggtgctgcttggcttaccctctgggtatttggaaccagtttccttccttttcttctatgtgccgtcctactttctgcagtacaggcccaggcaggctggctgcaacacgacttcggccatttgtccgttttctcaacgtccaagtggaatcacctgttgcatcacttcgtaatcgggcatctgaagggcgctcctgcttcgtggtggaaccatatgcattttcagcatcacgcgaaaccaaactgctttcgcaaggatcctgatataaatatgcacccttttttcttcgctctcggcaaaattcttagcgtcgagttaggaaaacaaaaaaagaaatatatgccatacaatcaccagcataaatactttttcttgatagggcccccagctctgctgcctctgtattttcagtggtacatcttctattttgttattcagcggaaaaaatgggtggacctggcatggatgataaccttttatgtgcgctttttcctcacgtacgtgcccttacttggactgaaggcctttcttgggctcttcttcatcgtgcgcttcttagaaagtaattggtttgtgtgggtgacacagatgaaccatatccctatgcacatcgaccatgatagaaacatggattgggtctccacgcaactgcaggccacatgtaacgtgcataaatctgccttcaacgattggttttcaggacatctgaactttcaaatcgaacaccatctgttccccacaatgccgcgacacaactatcacaaggtggcccccttggttcagtccttatgcgccaagcacggaattgagtaccagtcaaaacctctgttgtctgcatttgccgatatcattcatagcctgaaagagtctggccagttgtggctggacgcctacctgcaccagtag

SEQ ID NO: 342118 - DNA, 1083 bp, Artificial Sequence
  derived and/or modified sequence
atgaacagcctgctgatcggcgagctgagccccgagcagcccagctttgaaccgaccaaaaataaagagttgactgatgagtttagggaactcagagctactgtcgagaggatgggtctcatgaaagccaaccacgtgttcttcctcttgtatctgctccatattctgttattagatggggccgcatggctgactctgtgggtttttgggacgagctttctcccctttcttctgtgtgctgtgcttctatctgctgtccaggctcaggctgggtggctgcagcatgatttcggccatttaagcgttttcagcacttctaaatggaaccacctgctgcatcacttcgttataggacatctcaagggggcacccgcctcctggtggaatcatatgcacttccagcatcacgcaaagccaaactgctttaggaaagatccagatatcaatatgcatccctttttctttgctttaggaaagatcttatcagtggaacttggaaagcagaagaagaaatacatgccttataatcaccagcataaatatttctttctgattgggccccccgccctcctgccactctacttccaatggtacatcttttactttgtgattcagcgtaaaaaatgggtagatctggcctggatgatcactttctatgtgcggttcttcctcacctatgtacccctcttagggctcaaagccttcctggggctcttcttcattgtgcgtttcctcgagagcaattggtttgtctgggtgacacagatgaaccatatcccaatgcatatcgaccacgacagaaacatggactgggttagtacacagctgcaggcaacttgtaatgttcacaaatcagcttttaatgactggttcagtggccatctgaactttcagatcgagcaccatctattccccacgatgcccaggcacaattaccacaaagtggctcccctggttcagagcctctgtgcaaaacacgggatagaataccagagtaagcccttgctgagtgcttttgccgatatcatacactctctaaaggagagcgggcagctctggctcgatgcctacctgcaccagtag

SEQ ID NO: 342119 - DNA, 1131 bp, Artificial Sequence
  derived and/or modified sequence
caggacgccttccgggccttccaccaggacctgaacttcgtgcggaagttcctccagcctctgctgataggcgagcttgctcctgaggaacctagccaggacggcccattgaacgcccagctcgtcgaggatttcagagccctgcaccaggcagcagaggacatgaagctgttcgacgcctcacctactttttttgcttttctgctgggtcacatcctcgccatggaggtcctggcatggctgcttatctatttactcggacccggctgggtgccaagtgcattggccgctttcattctggccataagccaagcccaggccggatggctacagcatgacttcgggcatttatctgtgtttagtacctcaaagtggaatcatttattgcaccactttgttattggccatctgaagggggccccagcgtcatggtggaaccacatgcacttccaacatcatgctaagccaaactgctttcggaaagatcctgatattaatatgcacccattcttttttgcattgggcaagatactgagcgtcgaactgggaaagcaaaagaagaagtacatgccttataatcatcaacacaaatacttttttttaattggtcctcccgctttattgccactgtacttccagtggtatatcttctatttcgtcattcaacgcaaaaagtgggttgacctcgcttggatgattaccttctatgtacggttcttcttgacctatgtcccactgttaggtctcaaggcgttcctcggtctgtttttcatccgcttccttgaaagcaattggttcgtctgggttacccagatgaaccacattccgatgcatattgaccatgatcggaacatggactgggtaagcacacagctccaggctacctgcaatgtccacaagtctgcttttaacgactggttcagcggccacctaaacttccaaattgagcaccatctgttcccaacgatgccaaggcataattaccacaaggtggcacccctggtacagagtctctgtgctaaacacggcatcgagtaccagtccaagcctctcctgagcgccttcgcggatatcatccacagtctcaaagaaagcggacaactgtggctggatgcttacttgcaccagtag

SEQ ID NO: 342120 - DNA, 1083 bp, Artificial Sequence
  derived and/or modified sequence
atgaactcactcctgatcggcgaactgagtccagagcagccctccttcgaacccaccaagaacaaagagttgacagacgagtttagggagctgcgagcgaccgttgagcggatggggcttatgaaggccaatcatgtgttcttcctgctgtatctactgcatatcttgctgctcgacggagccgcatggctgaccctttgggtttttggcaccagctttctgcctttcctactgtgtgcagtactcttgagtgccgtgcaagcacaggctggctggctacagcatgattttgggcatctaagtgtgttctctacaagcaaatggaatcacctgctgcatcattttgtaattgggcaccttaagggcgctccagcgagctggtggaaccacatgcacttccaacatcacgcgaaaccaaattgtttcagaaaagaccctgacatcaacatgcatcccttcttcttcgccctggggaaaatattgtcggtggagctgggaaagcaaaagaaaaagtatatgccctacaaccatcagcataagtacttctttctgataggtccaccagcactgctgccactctacttccagtggtatattttttatttcgtcatccaacggaaaaagtgggtcgatctggcctggatgatcaccttctacgtgagattctttctgacatatgtgccactcttggggcttaaggcgttcctcggacttttcttcattgtgcggttcctggaatcaaattggtttgtatgggtgactcagatgaaccacattccaatgcacatcgatcatgacagaaatatggactgggtctcgacacagctgcaagccacatgcaacgtccataagtccgcctttaatgattggttctctggacacctgaatttccaaattgagcatcatcttttccccacaatgcctaggcataattatcataaagttgcccctcttgtgcagtctttatgtgctaaacacggtattgagtaccagagcaagcctctcctgagcgctttcgcagatatcatccactctcttaaagagtccggtcaactctggctagacgcgtacctgcaccagtag

SEQ ID NO: 342121 - DNA, 1083 bp, Artificial Sequence
  derived and/or modified sequence
atgaattccctgttgatcggagagttgtcccctgagcaaccctctttcgagcccactaaaaataaagagttaacagatgagttcagagagttgcgtgccaccgtagaacggatgggactgatgaaagccaaccatgtgtttttcctgctgtatctactgcatattctgctccttgacggggcagcttggcttacactgtgggtttttggcacttcttttctgcctttcttgctttgcgctgtcttgctgtcagccgtccaggcacaggccggatggttacagcacgacttcgggcatttgtcagttttctccacttcgaagtggaaccatttgctgcatcattttgtgataggacatttgaaaggcgctcctgccagctggtggaatcacatgcactttcagcaccatgctaaacccaattgtttccgtaaagaccccgacatcaacatgcaccctttcttttttgcactaggaaagatcctgtctgtggagctgggcaaacagaaaaagaaatacatgccatataaccaccagcataaatatttcttcctcatcggccctccagcactgctgcccctgtacttccagtggtacatcttctacttcgtgatacaaagaaagaaatgggtggatctggcctggatgatcacattttatgttaggtttttcctgacatacgtcccactcttagggcttaaggcctttcttggactgttctttatcgtccgctttctcgagtcaaactggttcgtgtgggtgacccagatgaaccatattcccatgcacatcgaccatgacagaaatatggactgggtcagcacccagctgcaggctacttgtaatgtccacaagtccgccttcaacgattggttcagcggccatcttaatttccagatagagcaccacttgttccctaccatgcccagacacaactatcacaaggtcgctcccctggtccagagcctgtgcgctaaacatggaattgaataccagtcaaagcccctgctcagtgcctttgccgatattatccacagtctcaaggagtcggggcaactgtggctggacgcttatctccaccagtag

SEQ ID NO: 342122 - DNA, 1083 bp, Artificial Sequence
  derived and/or modified sequence
atgaacagcctactgatcggcgagttatcccctgaacagccatctttcgaaccaaccaagaataaggaactgaccgacgaatttcgagaactcagggccaccgtggagagaatgggcctgatgaaggctaaccacgtatttttcctgctgtacctcttgcatatcctactgctcgatggagccgcttggttgacactgtgggtatttgggacctcatttctccctttcttgctgtgcgccgtgctgctgtctgccgtgcaggcccaggcaggctggcttcagcatgactttggacacttaagcgtgttctccacatccaaatggaaccacctcctgcaccactttgtaatcggccatttaaaaggggcacccgcttcctggtggaatcatatgcattttcagcaccacgccaaacccaactgctttaggaaggatcccgatattaacatgcatcctttcttcttcgccttgggcaaaattttatctgttgaattgggcaagcaaaaaaaaaagtatatgccatataatcaccagcataaatactttttcctcattggaccccctgccctattaccactctattttcagtggtacatcttttacttcgtgattcagcgcaaaaagtgggtggatttggcctggatgatcacattttacgtacgttttttcctgacatatgttcctctgcttggtctgaaagcattcctcggactgtttttcatcgttcgctttctggagtccaactggtttgtctgggtgacacagatgaaccatattcctatgcatatcgatcacgatcgaaacatggattgggtgtccactcagctgcaggcgacatgcaacgtccacaagtctgcctttaacgattggttctctgggcacctgaacttccagatcgagcatcacctcttcccaaccatgccccgacataactaccataaagtggcccctctagtacagtcactctgtgcaaagcacgggatcgaatatcaatcgaagccacttctgagtgcattcgcggacataatccactccctgaaagagtcgggccaactgtggttggacgcctacctgcatcaatag

SEQ ID NO: 342123 - DNA, 1131 bp, Artificial Sequence
  derived and/or modified sequence
caggacgcctttcgcgcatttcaccaggacttgaacttcgttcgaaagtttttacagccgttactcatcggcgagcttgcccctgaagaaccgagtcaggacggacctctgaatgctcagctggttgaagactttagagcccttcatcaggccgctgaggacatgaaattatttgatgctagtcccacattcttcgcctttctgctgggccatatactggctatggaggtgcttgcctggctcctgatttatctcctaggacccggttgggtgccttctgccttagccgcattcattttagcaattagtcaggctcaggcgggttggctgcaacacgacttcggacacctctctgtatttagcaccagcaagtggaaccatctccttcaccacttcgttatcggccacctgaaaggcgctccagcgagttggtggaatcatatgcacttccaacaccacgccaaacccaactgctttagaaaggatccagatattaatatgcacccattcttctttgctctgggaaagatcctctccgtcgaattgggaaagcagaaaaaaaaatatatgccttataatcatcagcacaagtacttcttcctgattggcccacccgctctcctgcccctatactttcagtggtatatcttctactttgtgatccaaaggaaaaaatgggttgatttagcttggatgattacattctatgtaagatttttcctcacatacgtccccttactcgggcttaaggcatttttaggactgtttttcattagatttcttgagagcaactggttcgtatgggttacacagatgaaccacatccccatgcacatcgaccacgataggaatatggattgggtgtcaacgcaattgcaagcaacgtgtaatgtccacaagtccgcttttaacgattggttctccggccacctgaatttccagatagaacatcacctatttcccacaatgccgagacataactaccataaggttgcaccattggttcagagtctgtgtgcaaagcacggtatcgaataccagtccaagcccctgctttccgcttttgctgacattattcacagccttaaggaatcaggccagctctggctggacgcatacctgcaccagtag

SEQ ID NO: 342124 - DNA, 1083 bp, Artificial Sequence
  derived and/or modified sequence
atgaacagcctgctgatcggcgagctgagccccgagcagcccagcttcgagcccaccaagaacaaggagctgaccgacgagttcagagagctgagagccaccgtggagagaatgggcctgatgaaggccaaccacgtgttcttcctgctgtacctgctgcacatcctgctgctggacggcgccgcctggctgaccctgtgggtgttcggcaccagcttcctgcccttcctgctgtgcgccgtgctgctgagcgccgtgcaggcccaggccggctggctgcagcacgacttcggccacctgagcgtgttcagcaccagcaagtggaaccacctgctgcaccacttcgtgatcggccacctgaagggcgcccccgccagctggtggaaccacatgcacttccagcaccacgccaagcccaactgcttcagaaaggaccccgacatcaacatgcaccccttcttcttcgccctgggcaagatcctgagcgtggagctgggcaagcagaagaagaagtacatgccctacaaccaccagcacaagtacttcttcctgatcggcccccccgccctgctgcccctgtacttccagtggtacatcttctacttcgtgatccagagaaagaagtgggtggacctggcctggatgatcaccttctacgtgagattcttcctgacctacgtgcccctgctgggcctgaaggccttcctgggcctgttcttcatcgtgagattcctggagagcaactggttcgtgtgggtgacccagatgaaccacatccccatgcacatcgaccacgacagaaacatggactgggtgagcacccagctgcaggccacctgcaacgtgcacaagagcgccttcaacgactggttcagcggccacctgaacttccagatcgagcaccacctgttccccaccatgcccagacacaactaccacaaggtggcccccctggtgcagagcctgtgcgccaagcacggcatcgagtaccagagcaagcccctgctgagcgccttcgccgacatcatccacagcctgaaggagagcggccagctgtggctggacgcctacctgcaccagtag

SEQ ID NO: 342125 - DNA, 1131 bp, Artificial Sequence
  derived and/or modified sequence
caggacgccttcagagccttccaccaggacctgaacttcgtgagaaagttcctgcagcccctgctgatcggcgagctggcccccgaggagcccagccaggacggccccctgaacgcccagctggtggaggacttcagagccctgcaccaggccgccgaggacatgaagctgttcgacgccagccccaccttcttcgccttcctgctgggccacatcctggccatggaggtgctggcctggctgctgatctacctgctgggccccggctgggtgcccagcgccctggccgccttcatcctggccatcagccaggcccaggccggctggctgcagcacgacttcggccacctgagcgtgttcagcaccagcaagtggaaccacctgctgcaccacttcgtgatcggccacctgaagggcgcccccgccagctggtggaaccacatgcacttccagcaccacgccaagcccaactgcttcagaaaggaccccgacatcaacatgcaccccttcttcttcgccctgggcaagatcctgagcgtggagctgggcaagcagaagaagaagtacatgccctacaaccaccagcacaagtacttcttcctgatcggcccccccgccctgctgcccctgtacttccagtggtacatcttctacttcgtgatccagagaaagaagtgggtggacctggcctggatgatcaccttctacgtgagattcttcctgacctacgtgcccctgctgggcctgaaggccttcctgggcctgttcttcatcagattcctggagagcaactggttcgtgtgggtgacccagatgaaccacatccccatgcacatcgaccacgacagaaacatggactgggtgagcacccagctgcaggccacctgcaacgtgcacaagagcgccttcaacgactggttcagcggccacctgaacttccagatcgagcaccacctgttccccaccatgcccagacacaactaccacaaggtggcccccctggtgcagagcctgtgcgccaagcacggcatcgagtaccagagcaagcccctgctgagcgccttcgccgacatcatccacagcctgaaggagagcggccagctgtggctggacgcctacctgcaccagtag

SEQ ID NO: 342126 - protein, 385 aa, Artificial Sequence [sequence omitted]

SEQ ID NO: 342127 - DNA, 600 bp, Artificial Sequence
  derived and/or modified sequence
tggggatggacgacagcacccagaagatcattgtggacttggacatttactggcccaatagactgaccatcgacctgggggagaagaagctctactgggctgacactaagctcggcttcatccaccgtgccaacctggacggctcgttccggcagaaggtggtgaagggcagcctgacgcaccccttcaccctgacactctccggggacactctgcactggatggactggctgacgtgctccatccatgcctgcaacaggaacactgcggggaagaggaacgagatcttgagcgccctctactcagcatggatatccaggtgctgagccaggagcagcagcctttctagagggggtttttgagactagaatcacctcagcatcctcctgtccccagctgtgtccagcctgtctgcagggacatcctgagaggactaggctctcccctcatccacctgcgagccaaggaggtcctgctgctggcccggtagacggaccaatggagggtctcgctggacacaccggacttcaccgacatcgtgctgcagctggacgacatccagcatgccatcgccatcaactatgacccaatggagggcca

SEQ ID NO: 342128 - protein, 263 aa, Artificial Sequence
  derived and/or modified sequence
MLFGSEICKEGKCVNTQPGYECYCKQGFYYDGNLLECVDVDECLDESNCRNGVCENTRGGYRCACTPPAEYSPAQRQCLSPEEMDVDECQDPAACRPGRCVNLPGSYRCECRPPWVPGPSGRDCQLPESPAERAPERRDVCWSQRGEDGMCAGPLAGPALTFDDCCCRQGRGWGAQCRPCPPRGAGSHCPTSQSESNSFWDTSPLLLGKPPRDEDSSEEDSDECRCVSAAACRGRAAPCASVPAASSSTPPAPAAWISTSAES

SEQ ID NO: 342129 - protein, 733 aa, Artificial Sequence
  derived and/or modified sequence
MPAETDECRLNQNICGHGECVPGPPDYSCHCNPGYRSHPQHRYCVDVNECEAEPCGPGRGICMNTGGSYNCHCNRGYRLHVGAGGRSCVDLNECAKPHLCGDGGFCINFPGHYKCNCYPGYRLKASRPPVCEDIDECRDPSSCPDGKCENKPGSFKCIACQPGYRSQGGGACRDVNECAEGSPCSPGWCENLPGSFRCTCAQGYAPAPDGRSCLDVDECEAGDVCDNGICSNTPGSFQCQCLSGYHLSRDRSHCEDIDECDFPAACIGGDCINTNGSYRCLCPQGHRLVGGRKCQDIDECSQDPSLCLPHGACKNLQGSYVCVCDEGFTPTQDQHGCEEVEQPHHKKECYLNFDDTVFCDSVLATNVTQQECCCSLGAGWGDHCEIYPCPVYSSAEFHSLCPDGKGYTQDNNIVNYGIPAHRDIDECMLFGSEICKEGKCVNTQPGYECYCKQGFYYDGNLLECVDVDECLDESNCRNGVCENTRGGYRCACTPPAEYSPAQRQCLSPEEMDVDECQDPAACRPGRCVNLPGSYRCECRPPWVPGPSGRDCQLPESPAERAPERRDVCWSQRGEDGMCAGPLAGPALTFDDCCCRQGRGWGAQCRPCPPRGAGSHCPTSQSESNSFWDTSPLLLGKPPRDEDSSEEDSDECRCVSGRCVPRPGGAVCECPGGFQLDASRARCVDIDECRELNQRGLLCKSERCVNTSGSFRCVCKAGFARSRPHGACVPQRRR

SEQ ID NO: 342130 - protein, 882 aa, Artificial Sequence
  derived and/or modified sequence
MTLIGENGHSTDTLTGSGFRVADKPEEKSLCFRLVSPEHQCQHPLTTRLTRQLCCCSVGKAWGARCQRCPTDGTAAFKEICPAGKGYHILTSHQTLTIQGESDFSLFLHPDGPPKPQQLPESPSQAPPPEDTEEERGVTTDSPVSEERSVQQSHPTATTTPARPYPELISRPSPPTMRWFLPDLPPSRSAVEIAPTQVTETDECRLNQNICGHGECVPGPPDYSCHCNPGYRSHPQHRYCVDVNECEAEPCGPGRGICMNTGGSYNCHCNRGYRLHVGAGGRSCVDLNECAKPHLCGDGGFCINFPGHYKCNCYPGYRLKASRPPVCEDIDECRDPSSCPDGKCENKPGSFKCIACQPGYRSQGGGACRDVNECAEGSPCSPGWCENLPGSFRCTCAQGYAPAPDGRSCLDVDECEAGDVCDNGICSNTPGSFQCQCLSGYHLSRDRSHCEDIDECDFPAACIGGDCINTNGSYRCLCPQGHRLVGGRKCQDIDECSQDPSLCLPHGACKNLQGSYVCVCDEGFTPTQDQHGCEEVEQPHHKKECYLNFDDTVFCDSVLATNVTQQECCCSLGAGWGDHCEIYPCPVYSSAEFHSLCPDGKGYTQDNNIVNYGIPAHRDIDECMLFGSEICKEGKCVNTQPGYECYCKQGFYYDGNLLECVDVDECLDESNCRNGVCENTRGGYRCACTPPAEYSPAQRQCLSPEEMERAPERRDVCWSQRGEDGMCAGPLAGPALTFDDCCCRQGRGWGAQCRPCPPRGAGSHCPTSQSESNSFWDTSPLLLGKPPRDEDSSEEDSDECRCVSGRCVPRPGGAVCECPGGFQLDASRARCVDIDECRELNQRGLLCKSERCVNTSGSFRCVCKAGFARSRPHGACVPQRRR

SEQ ID NO: 342131 - DNA, 555 bp, Artificial Sequence
  derived and/or modified sequence
atgcccgtgaagggcgccagcagcctgctgttcctgcccctgcccccttcagcgtggcagctgtgtctcttgtctaagcgccgggtgcaccctatccggactccgttaccatttcactcttggatcaaagctttggtcatctcaaaccagaaagtgcccgagcgtgagaggcccgagggaaccggtgttctgtctgatggctgtttgggccagtcgcaggagggcgaacccttgctgagccctcctgcccttgcgcattttcccttacatgctagatgctgcggatcatcttgggcctggcccggctcagccggcgaagcaattcgtatggtaagcggggccccttttctctgcttccttgatggcctcgacgggctcccctgcagtagccctatggctgccctgcccgcaccaatggccgcactgcccgcccgacgacagcgtcaggagcacattgaaggaggcagtcagggctgcggagttagatcccctgccccatgtcggggcaaacccgggtccgccacatccagcacactccgattatgtcctgcctag

SEQ ID NO: 342132 - protein, 2091 aa, Artificial Sequence
  derived and/or modified sequence
ALLQKGDHVWMDLRLGQEFDVPIGAVVKLCDSGQVQVVDDEDNEHWISPQNATHIKPMHPTSVHGVEDMIRLGDLNEAGILRNLLIRYRDHLIYTYTGSILVAVNPYQLLSIYSPEHIRQYTNKKIGEMPPHIFAIADNCYFNMKRNSRDQCCIISGESGAGKTESTKLILQFLAAISGQHSWIEQQVLEATPILEAFGNAKTIRNDNSSRFGKYIDIHFNKRGAIEGAKIEQYLLEKSRVCRQALDERNYHVFYCMLEGMSEDQKKKLGLGQASDYNYLAMVNPPDLMSCLTSRTLITRGETVSTPLSREQALDVRDAFVKGIYGRLFVWIVDKINAAIYKPPSQDVKNSRRSIGLLDIFGFENFAVNSFEQLCINFANEHLQQFFVRHVFKLEQEEYDLESIDWLHIEFTDNQDALDMIANKPMNIISLIDEESKFPKFLEKNRDTLHGDIIQLVHSSRNKFIKQIFQADVAMGAETRKRSPTLSSQFKRSLELLMRTLGACQPFFVRCIKPNEFKKPMLFDRHLCVRQLRYSGMMETIRIRRAGYPIRYSFVEFVERYRVLLPGVKPAYKQGDLRGTCQRMAEAVLGTHDDWQIGKTKIFLKDHHDMLLEVERDKAITDRVILLQKVIRGFKDRSNFLKLKNAATLIQRHWRGHNCRKNYGLMRLGFLRLQALHRSRKLHQQYRLARQRIIQFQARCRAYLVRKAFRHRLWAVLTVQAYARGMIARRLHQRLRAEYLWRLEAEKMRLAEEEKLRKEMSAKKAKEEAERKHQERLAQLAREDAERELKEKEAARRKKELLEQMERARHEPVNHSDMVDKMFGFLGTSGGLPGQEGQAPSGFEDLERGRREMVEEDLDAALPLPDEDEEDLSEYKFAKFAATYFQGTTTHSYTRRPLKQPLLYHDDEGDQLAALAVWITILRFMGDLPEPKYHTAMSDGSEKIPVMTKIYETLGKKTYKRELQALQGEGEAQLPEGQKKSSVRHKLVHLTLKKKSKLTEEVTKRLHDGESTVQGNSMLEDRPTSNLEKLHFIIGNGILRPALRDEIYCQISKQLTHNPSKSSYARGWILVSLCVGCFAPSEKFVKYLRNFIHGGPPGYAPYCEERLRRTFVNGTRTQPPSWLELQATKSKKPIMLPVTFMDGTTKTLLTDSATTAKELCNALADKISLKDRFGFSLYIALFDKVSSLGSGSDHVMDAISQCEQYAKEQGAQERNAPWRLFFRKEVFTPWHSPSEDNVATNLIYQQVVRGVKFGEYRCEKEDDLAELASQQYFVDYGSEMILERLLNLVPTYIPDREITPLKTLEKWAQLAIAAHKKGIYAQRRTDAQKVKEDVVSYARFKWPLLFSRFYEAYKFSGPSLPKNDVIVAVNWTGVYFVDEQEQVLLELSFPEIMAVSSSRECRVWLSLGCSDLGCAAPHSGWAGLTPAGPCSPCWSCRGAKTTAPSFTLATIKGDEYTFTSSNAEDIRDLVVTFLEGLRKRSKYVVALQDNPNPAGEESGFLSFAKGDLIILDHDTGEQVMNSGWANGINERTKQRGDFPTDSVYVMPTVTMPPREIVALVTMTPDQRQDVVRLLQLRTAEPEVRAKPYTLEEFSYDYFRPPPKHTLSRVMVSKARGKDRLWSHTREPLKQALLKKLLGSEELSQEACLAFIAVLKYMGDYPSKRTRSVNELTDQIFEGPLKAEPLKDEAYVQILKQLTDNHIRYSEERGWELLWLCTGLFPPSNILLPHVQRFLQSRKHCPLAIDCLQRLQKALRNGSRKYPPHLVEVEAIQHKTTQIFHKVYFPDDTDEAFEVESSTKAKDFCQNIATRLLLKSSEGFSLFVKIADKVLSVPENDFFFDFVRHLTDWIKKARPIKDGIVPSLTYQVFFMKKLWTTTVPGKDPMADSIFHYYQELPKYLRGYHKCTREEVLQLGALIYRVKFEEDKSYFPSIPKLLRELVPQDLIRQVSPDDWKRSIVAYFNKHAGKSKEEAKLAFLKLIFKWPTFGSAFFEVKQTTEPNFPEILLIAINKYGVSLIDPKTKDILTTHPFTKISNWSSGNTYFHITIGNLVRGSKLLCETSLGYKMDDLLTSYISQMLTAMSKQRGSRSGK

SEQ ID NO: 342133 - DNA, 6276 bp, Artificial Sequence
  derived and/or modified sequence
gcccttcttcagaagggcgaccacgtttggatggacctccggctggggcaggagttcgatgtcccaatcggggccgttgttaagctttgcgactcaggtcaggtgcaagtggtggacgatgaggacaacgagcattggatcagtccccagaacgcgacgcacataaagccgatgcaccccacttcggtacacggggtagaggatatgatccgcctgggagacctgaacgaggctggcattctgcgcaaccttctgatccggtatcgcgatcacctgatctacacctacacaggaagcatactcgttgcggtaaacccctaccagctgctatctatttacagtccggaacatatcaggcagtacacaaacaaaaagatcggggaaatgcccccccatattttcgccattgcagataattgctatttcaacatgaagaggaactctagagaccagtgttgcatcatatcaggggagagtggggctggcaagacggagagcactaaactcattctccagtttttagctgccatctccggccagcattcttggattgagcaacaggtcctagaagctacccctattctggaggcgttcggcaatgccaaaacgattcggaacgataactcatctaggtttggtaaatatattgacatccattttaataaacgcggtgcaattgaaggcgccaaaattgagcagtatcttctggaaaaatctcgagtgtgcaggcaggcactggatgaacgcaattaccatgtgttttattgcatgttggagggcatgtctgaggaccagaaaaaaaagttggggctgggacaggctagcgactataactatctcgccatggtcaatccaccagatctgatgagctgtttgacaagcaggaccctcataacaagaggggagaccgttagcacaccccttagccgcgagcaggcattggacgttcgagacgcattcgtgaaggggatctacggcaggctttttgtgtggatagtggataagattaatgccgccatctacaagccaccttcccaggatgttaagaactcacgacgaagtataggcctgttggatatctttgggtttgagaatttcgccgtgaatagcttcgagcagctgtgtatcaattttgcaaacgagcacctgcagcagttcttcgtgaggcacgtgtttaaactcgaacaggaggaatacgacttggagtccattgactggctgcacatcgagttcacggacaatcaggacgctctggatatgattgcaaacaaacccatgaacattatttctctgattgacgaggaatctaaattccccaagtttctggagaagaatagggatacattgcatggggacatcatccagctagttcactcatcccgcaacaaattcattaaacagatctttcaggctgacgtggcaatgggagcagagacacggaagaggtccccaacccttagctcccaattcaaacgcagtctagagttgttaatgcgcacgctgggcgcgtgtcagcccttctttgtgcgctgtatcaaaccgaacgaatttaagaagcccatgctgtttgataggcatctgtgtgtacgccagcttagatactcgggaatgatggaaaccataagaatccgcagggcaggatacccgatccgctacagttttgttgaattcgtggagcgatatagagtactccttccgggcgtgaagcccgcttataagcagggcgacctccggggaacctgccagaggatggccgaagctgttctcgggactcacgacgactggcaaattggaaagaccaagatattcttgaaagatcaccatgatatgctgctggaagtcgagagggataaggccatcaccgatcgggtgatactgttgcagaaggtcattcgcggctttaaggataggtccaattttcttaagttgaaaaatgccgcgacgcttattcaaaggcactggaggggacacaattgtagaaaaaactatggcctgatgcggctaggcttcctccgcctgcaggccttgcatagatcgcggaaattgcatcagcagtaccgtcttgctagacagcgcattattcagttccaggcgaggtgccgagcatacctggtgcggaaggctttcagacatagactctgggcagtcctcacagtacaggcttacgctcgaggtatgatcgcacgtcggctccatcagcggttgagggccgagtatttatggagactcgaggccgaaaaaatgagactcgccgaggaagagaagctgcgcaaggagatgtccgcaaagaaggccaaagaagaggcagagcgcaaacaccaggaacgtctggcccagcttgccagggaggatgcagagagggaattgaaagagaaagaggcagctcgccggaaaaaagaacttctggagcagatggagcgggcgaggcacgagcctgtaaaccactctgacatggttgataagatgttcgggttcctcgggacttccggcggtctgcccggtcaagagggccaggcacccagtggattcgaagacctggagagaggacggcgtgaaatggtagaggaagaccttgacgctgctttgcccttacctgacgaagacgaggaggatctcagtgaatataagttcgctaagttcgccgcgacttacttccagggcacaacaacgcatagctatacacggagaccgctgaagcagccactactctatcatgatgacgagggggatcagttggccgcccttgcagtgtggattactattctgaggttcatgggagacctcccagaacctaagtaccacaccgctatgtccgacggttcagagaagatacctgtaatgaccaagatttacgagacgttaggcaagaagacctacaagcgggagctgcaagcattgcaaggcgagggggaagcacagcttccggagggacagaagaaatcgagcgtgcgtcacaaactggtgcatctgacgctgaaaaagaaatccaagctcaccgaagaggtaacaaagcgccttcacgacggggagtccaccgtgcaaggtaactcaatgctcgaggatcggcctacaagtaatctggaaaaactccatttcataattggtaacggtatcctaagaccagcactgcgggatgagatctattgccaaatctccaagcagctcacgcacaatccctccaaaagcagctacgcgagagggtggatactagtatcactgtgcgttggctgctttgccccttcagaaaaatttgtgaagtatctcagaaatttcatccacggtgggcctcccggatatgctccgtactgtgaggagagactgagaagaacctttgtgaatggaacccgtacacagccccccagctggctcgagctgcaagccaccaagtcaaagaaacccattatgcttcccgtcacctttatggatgggaccactaaaactctgctcaccgacagcgccacaactgctaaggaattgtgcaacgccctggccgataagatctcgcttaaggatcgattcgggttctcgctctacatagctctgtttgataaagtcagcagtctcggctctggctcagaccatgtgatggacgccatatcacaatgcgaacagtatgccaaagagcagggcgctcaggagagaaacgcaccctggaggctgttctttcgtaaggaagtttttactccctggcatagcccatccgaggacaacgtggccacaaacctgatttaccaacaagtcgtgagaggagtaaaatttggcgaatacagatgtgagaaagaggatgatctggctgaactggccagccaacagtatttcgtcgattacggaagcgaaatgattcttgagaggctcctgaacctggtgcccacatacatacctgacagagaaatcaccccccttaagaccctcgagaaatgggctcagctggcgattgcagcacacaagaagggaatctatgctcagcgcagaactgatgctcagaaagtcaaagaagacgttgtctcctacgctaggtttaagtggccacttctgttctcccgtttttatgaagcgtacaaatttagcggcccttctctccccaagaatgatgtgatcgtcgcggtgaattggaccggtgtgtatttcgtggacgagcaggaacaagtgttgttagaactgtccttccctgagatcatggctgtaagttcctcccgtgaatgtcgggtttggttgagcttgggatgttcagacctcgggtgcgcagcaccccattctgggtgggcaggactgacacctgccggaccgtgttctccctgctggtcttgccgcggcgccaaaacgaccgcgccctcatttaccttagcaacaatcaagggcgacgaatacacttttaccagcagcaacgctgaggacattagagacctggtcgtcacattcctcgaagggctaaggaaacgctccaaatacgttgtggctttgcaggataatcccaaccccgctggagaagagtccgggttcctatcgtttgctaagggtgatctcatcatcttggatcacgacactggagagcaggttatgaacagcggctgggccaatggtatcaacgaaagaactaaacagaggggcgactttcctactgattccgtctacgttatgccgacagtgaccatgcccccccgcgagattgtggcgctcgtgaccatgactcctgatcaaaggcaagatgttgttagactcctgcaactgcggacagccgagcctgaagtgcgtgctaagccctacacactggaggagtttagctatgattactttagaccgccgcctaaacatactctaagccgcgtgatggtgtcaaaagccagaggaaaggaccgactgtggtctcatacaagggaacccctcaaacaggccctgttgaaaaaactcttaggctctgaggagttatcacaggaggcatgtctagcttttattgccgtgttaaagtacatgggggactacccttccaagcgtacccggtcagttaacgaacttaccgatcagatcttcgaggggcccctcaaggccgaacccctgaaagacgaggcatatgtccagatactaaagcaacttacagacaatcacatacgctactcggaagagcgcgggtgggagctgttgtggctctgtacaggcctcttccccccttctaatatcttgctgccgcatgtccagaggtttcttcagtctcgaaaacattgtccattagccatcgactgtcttcagcggctgcaaaaagccctgagaaatggcagcagaaagtatccacctcacctggttgaagtggaggctattcagcacaagaccacacaaatttttcataaagtgtatttcccagacgatactgacgaggctttcgaggtcgaaagtagtactaaagcaaaagatttttgtcagaatatcgcaacccggctgctgctgaaatcaagtgaaggcttctcactgtttgtaaaaatcgctgacaaagtgctgtctgttcccgagaacgattttttcttcgattttgtccgacatctaacagactggatcaaaaaggctcggccaatcaaagacggaattgtgccatcgcttacctaccaagtttttttcatgaaaaagctgtggaccacaactgtacctggaaaagatcccatggctgacagtatcttccattattatcaggagctgccaaagtacctgagagggtaccacaagtgtacacgggaggaagtcctgcagctcggcgcactgatttatcgcgtcaagtttgaagaagacaagtcctattttcccagcataccgaagcttctccgagaactggtgccacaggacctgatccgccaggtcagtccagatgactggaaaagaagtatcgtcgcttatttcaataaacatgccggtaagagcaaggaggaggcaaaactggcctttctcaaactaatctttaagtggccgaccttcggttcggctttcttcgaggttaaacaaacaacagagccaaactttcctgagattttgctgattgccatcaataagtatggagtttcattgatcgaccctaagaccaaagatatactgactactcatccattcacgaaaatcagcaactggtcctctgggaatacctacttccacattaccattgggaacctggttaggggatcaaagctcctctgtgaaacgagtcttgggtataaaatggatgacctcctgaccagttatatctcccagatgctaacagctatgtcgaagcaaagaggatcaagatccggcaaatag

SEQ ID NO: 342134 - DNA, 6276 bp, Artificial Sequence
  derived and/or modified sequence
gccctgctgcagaagggggaccacgtgtggatggacctgcggctgggccaggagtttgatgtgcccatcggggctgtggtgaagctgtgtgacagcggccaggtgcaggtggtggatgatgaagataatgagcactggatcagcccccagaatgccacccacatcaagcccatgcaccccacctctgtgcacggcgtggaggacatgatccggctgggggacctgaatgaggccggcatcctgaggaacctgctgatccgctacagagaccacctgatctacacctacacaggcagcatcctggtggccgtgaacccctaccagctgctgagcatctacagccctgagcacatccggcagtacaccaacaagaagatcggggagatgccaccccacatctttgccatcgctgacaactgctacttcaacatgaagaggaacagccgggaccagtgctgcatcatcagcggggagagcggggccggcaagacagagagcaccaagctgatcctgcagttcctggccgccatcagcggccagcacagctggattgagcagcaggtgctggaggccacccccatcctggaggcctttggaaatgccaagaccatcagaaatgacaacagcagcagatttgggaagtacatcgacatccacttcaacaagagaggagccatcgagggcgccaagattgagcagtacctgctggagaagagccgggtgtgccggcaggccctggatgaaagaaactaccacgtgttctactgcatgctggagggcatgtctgaggaccagaagaagaagctgggcctgggccaggccagtgactacaactacctggccatggtgaaccccccagacctgatgagctgcctgaccagcaggaccctcatcaccagaggagaaacagtgtccacccccctgagccgggagcaggccctggatgtgagagatgcctttgtgaagggcatctacggccgcctgtttgtgtggatcgtggacaagatcaatgctgccatctacaagccacccagccaggatgtgaagaacagccgccgcagcatcggcctgctggacatctttggatttgagaactttgctgtgaacagctttgagcagctgtgcatcaactttgccaatgagcacctgcagcagttctttgtgcgccacgtgttcaagctggagcaggaggagtatgacctggagagcattgactggctgcacatcgagttcacagacaaccaggatgccctggacatgattgccaacaagcccatgaacatcatcagcctgattgatgaggagagcaagttccccaagttcctggagaagaacagagacaccctgcacggggacatcatccagctggtgcacagcagcaggaacaagttcatcaagcagatcttccaggctgatgtggccatgggcgctgagaccaggaagaggagccccaccctgagcagccagttcaagaggagcctggagctgctgatgaggaccctgggcgcctgccagcccttctttgtgcgctgcatcaagcccaatgagttcaagaagcccatgctgtttgacagacacctgtgtgtgcggcagctgcgctacagcggcatgatggagaccatccgcatccggcgggccggctaccccatccgctacagctttgtggagtttgtggagcgctacagagtgctgctgcccggggtgaagccagcctacaagcagggcgacctgcggggcacctgccagaggatggccgaggccgtgctgggcacccatgatgactggcagatcggcaagaccaagatcttcctgaaggaccaccacgacatgctgctggaggtggagcgggacaaggccatcacagacagagtcatcctgctgcagaaggtgatccggggcttcaaggacaggagcaacttcctgaagctgaagaatgctgccaccctcatccagaggcactggaggggccacaactgcaggaagaactacggcctgatgaggctgggcttcctgcggctgcaggccctgcacaggagcaggaagctgcaccagcagtaccgcctggcccggcagaggatcatccagttccaggcccgctgccgggcctacctggtgaggaaggccttccgccaccggctgtgggccgtgctgactgtgcaggcctatgcccggggcatgattgcccggcggctgcaccagaggctgcgggcagagtacctgtggaggctggaggccgagaagatgaggctggccgaggaggagaagctgaggaaggagatgtctgccaagaaggccaaggaggaggccgagaggaagcaccaggagcggctggcccagctggccagagaagatgctgagcgggagctgaaggagaaggaggccgcccggaggaagaaggagctgctggagcagatggagcgggcccggcatgagcctgtgaaccacagcgacatggtggacaagatgtttggcttcctgggcaccagcggcggcctgcccggccaggagggccaggcccccagcggctttgaggacctggagcggggccggcgggagatggtggaggaggacctggatgctgccctgcccctgcctgatgaagatgaggaggacctgtctgagtacaagtttgccaagtttgctgccacctacttccagggcaccaccacccacagctacacccggcggcccctgaagcagcccctgctgtaccatgatgatgaaggagaccagctggccgccctggccgtgtggatcaccatcctgcgcttcatgggagacctgcctgagcccaagtaccacacagccatgtctgatggcagcgagaagatccctgtgatgaccaagatctatgagaccctgggcaagaagacctacaagcgggagctgcaggccctgcagggcgagggggaggcccagctgcctgagggccagaagaagagctctgtgcgccacaagctggtgcacctgaccctgaagaagaagagcaagctgacagaggaggtgaccaagaggctgcatgatggagagagcacagtgcagggcaacagcatgctggaggaccggcccaccagcaacctggagaagctgcacttcatcattggaaatggcatcctgcggcctgccctgagagatgagatctactgccagatcagcaagcagctgacccacaaccccagcaagagcagctatgcccggggctggatcctggtgtccctgtgtgtgggctgctttgcccccagcgagaagtttgtgaagtacctgaggaacttcatccatggaggccccccaggctacgccccctactgtgaggagcggctgcggaggacctttgtgaatggcaccaggacccagcccccatcctggctggagctgcaggccaccaagagcaagaagcccatcatgctgcctgtgaccttcatggatggcaccaccaagaccctgctgacagacagcgccaccacagccaaggagctgtgcaatgccctggccgacaagatcagcctgaaggacagatttggcttcagcctgtacatcgccctgtttgacaaggtgagcagcctgggcagcggcagtgaccacgtgatggatgccatcagccagtgtgagcagtatgccaaggagcagggcgcccaggagagaaatgccccctggaggctcttcttcaggaaggaggtgttcaccccctggcacagccccagtgaagataatgtggccaccaacctgatctaccagcaggtggtgcggggcgtgaagtttggagagtaccgctgtgagaaggaggatgacctggccgagctggccagccagcagtactttgtggactatggcagcgagatgatcctggagcggctgctgaacctggtgcccacctacatcccagaccgggagatcacccccctgaagaccctggagaagtgggcccagctggccatcgccgcccacaagaagggcatctatgcccagaggagaacagatgcccagaaggtgaaggaggatgtggtgtcctatgcccgcttcaagtggcccctgctcttcagccgcttctatgaggcctacaagttcagcggccccagcctgcccaagaatgatgtgattgtggccgtgaactggacaggagtgtactttgtggatgagcaggagcaggtgctgctggagctgtccttccctgagatcatggctgtgagcagcagccgggagtgccgggtgtggctgagcctgggctgcagcgacctgggctgtgccgccccccacagcggctgggccggcctgaccccagctggcccctgcagcccctgctggagctgccgcggggccaagaccacagcccccagcttcaccctggccaccatcaagggagatgagtacaccttcaccagcagcaatgctgaggacatccgggacctggtggtgaccttcctggagggcctgaggaagaggagcaaatatgtggtggccctgcaggacaaccccaacccagctggggaggagagcggcttcctgagctttgccaagggggacctgatcatcctggaccatgacacaggagagcaggtgatgaacagcggctgggccaacggcatcaatgaaagaaccaagcagagaggagacttccccacagacagcgtgtatgtgatgcccaccgtgaccatgccaccccgggagatcgtggccctggtgaccatgaccccagaccagaggcaggatgtggtgcggctgctgcagctgaggacagctgagcctgaggtgcgggccaagccctacaccctggaggagttctcctatgactacttccggcccccacccaagcacaccctgagccgggtgatggtgtccaaggcccggggcaaggaccggctgtggagccacacccgggagcccctgaagcaggccctgctgaagaagctgctgggcagcgaggagctgagccaggaggcctgcctggccttcatcgctgtgctgaagtacatgggagactaccccagcaagaggaccaggtctgtgaatgagctgacagaccagatctttgagggccccctgaaggccgagcccctgaaggatgaggcctacgtgcagatcctgaagcagctgacagacaaccacatccgctacagcgaggagcggggctgggagctgctgtggctgtgcaccggcctcttcccccccagcaacatcctgctgccccacgtgcagcgcttcctgcagagcaggaagcactgccccctggccatcgactgcctgcagaggctgcagaaggccctgagaaatggcagcaggaagtacccaccccacctggtggaggtggaggccatccagcacaagaccacccagatcttccacaaggtgtacttcccagatgacacagatgaggcctttgaggtggagagcagcaccaaggccaaggacttctgccagaacatcgccacccggctgctgctgaagagcagcgagggcttcagcctgtttgtgaagattgctgacaaggtgctgtctgtgcctgaaaatgacttcttctttgattttgtgcgccacctgacagactggatcaagaaggcccggcccatcaaggatggcatcgtgcccagcctgacctaccaggtgttcttcatgaagaagctgtggaccaccaccgtgcctgggaaggaccccatggctgacagcatcttccactactaccaggagctgcccaagtacctgcggggctaccacaagtgcacccgggaggaggtgctgcagctgggcgccctgatctacagagtgaagtttgaggaggacaagagctacttccccagcatccccaagctgctgcgggagctggtgccccaggacctgatccggcaggtgtccccagatgactggaagaggagcatcgtggcctacttcaacaagcatgctgggaagagcaaggaggaggccaagctggccttcctgaagctgatcttcaagtggcccaccttcggcagcgccttctttgaggtgaagcagaccacagagcccaacttccctgagatcctgctgattgccatcaacaagtatggagtgtccctgattgaccccaagaccaaggacatcctgaccacccaccccttcaccaagatcagcaactggagcagcggcaacacctacttccacatcaccatcggcaacctggtgcggggcagcaagctgctgtgtgagaccagcctgggctacaagatggatgacctgctgaccagctacatcagccagatgctgacagccatgagcaagcagaggggcagccgcagcggcaagtag

SEQ ID NO: 342135 - DNA, 6534 bp, Artificial Sequence
  derived and/or modified sequence
gcactgctccagaagggggaccatgtgtggatggacctgagattggggcaggagttcgacgtgcccatcggggcggtggtgaagctctgcgactctgggcaggtccaggtggtggatgatgaagacaatgaacactggatctctccgcagaacgcaacgcacatcaagcctatgcaccccacgtcggtccacggcgtggaggacatgatccgcctgggggacctcaacgaggcgggcatcttgcgcaacctgcttatccgctaccgggaccacctcatctacacgtatacgggctccatcctggtggctgtgaacccctaccagctgctctccatctactcgccagagcacatccgccagtataccaacaagaagattggggagatgcccccccacatctttgccattgctgacaactgctacttcaacatgaaacgcaacagccgagaccagtgctgcatcatcagtggggaatctggggccgggaagacggagagcacaaagctgatcctgcagttcctggcagccatcagtgggcagcactcgtggattgagcagcaggtcttggaggccacccccattctggaagcatttgggaatgccaagaccatccgcaatgacaactcaagccgtttcggaaagtacatcgacatccacttcaacaagcggggcgccatcgagggcgcgaagattgagcagtacctgctggaaaagtcacgtgtctgtcgccaggccctggatgaaaggaactaccacgtgttctactgcatgctggagggtatgagtgaggatcagaagaagaagctgggcttgggccaggcctctgactacaactacttggccatggtgaaccccccagacctgatgagctgcctgactagccgcaccctcatcacccgcggggagacggtgtccaccccactgagcagggaacaggcactggacgtgcgcgacgccttcgtaaaggggatctacgggcggctgttcgtgtggattgtggacaagatcaacgcagcaatttacaagcctccctcccaggatgtgaagaactctcgcaggtccatcggcctcctggacatctttgggtttgagaactttgctgtgaacagctttgagcagctctgcatcaacttcgccaatgagcacctgcagcagttctttgtgcggcacgtgttcaagctggagcaggaggaatatgacctggagagcattgactggctgcacatcgagttcactgacaaccaggatgccctggacatgattgccaacaagcccatgaacatcatctccctcatcgatgaggagagcaagttccccaagttcctggagaagaaccgagacaccctgcatggggacattatccagctggtccactcctccaggaacaagttcatcaagcagatcttccaggccgatgtcgccatgggcgccgagaccaggaagcgctcgcccacacttagcagccagttcaagcggtcactggagctgctgatgcgcacgctgggtgcctgccagcccttctttgtgcgatgcatcaagcccaatgagttcaagaagcccatgctgttcgaccggcacctgtgcgtgcgccagctgcggtactcaggaatgatggagaccatccgaatccgccgagctggctaccccatccgctacagcttcgtagagtttgtggagcggtaccgtgtgctgctgccaggtgtgaagccggcctacaagcagggcgacctccgcgggacttgccagcgcatggctgaggctgtgctgggcacccacgatgactggcagataggcaaaaccaagatctttctgaaggaccaccatgacatgctgctggaagtggagcgggacaaagccatcaccgacagagtcatcctccttcagaaagtcatccggggattcaaagacaggtctaactttctgaagctgaagaacgctgccacactgatccagaggcactggcggggtcacaactgtaggaagaactacgggctgatgcgtctgggcttcctgcggctgcaggccctgcaccgctcccggaagctgcaccagcagtaccgcctggcccgccagcgcatcatccagttccaggcccgctgccgcgcctatctggtgcgcaaggccttccgccaccgcctctgggctgtgctcaccgtgcaggcctatgcccggggcatgatcgcccgcaggctgcaccaacgcctcagggctgagtatctgtggcgcctcgaggctgagaaaatgcggctggcggaggaagagaagcttcggaaggagatgagcgccaagaaggccaaggaggaggccgagcgcaagcatcaggagcgcctggcccagctggctcgtgaggacgctgagcgggagctgaaggagaaggaggccgctcggcggaagaaggagctcctggagcagatggaaagggcccgccatgagcctgtcaatcactcagacatggtggacaagatgtttggcttcctggggacttcaggtggcctgccaggccaggagggccaggcacctagtggctttgaggacctggagcgagggcggagggagatggtggaggaggacctggatgcagccctgcccctgcctgacgaggatgaggaggacctctctgagtataaatttgccaagttcgcggccacctacttccaggggacaaccacgcactcctacacccggcggccactcaaacagccactgctctaccatgacgacgagggtgaccagctggcagccctggcggtctggatcaccatcctccgcttcatgggggacctccctgagcccaagtaccacacagccatgagtgatggcagtgagaagatccctgtgatgaccaagatttatgagaccctgggcaagaagacgtacaagagggagctgcaggccctgcagggcgagggcgaggcccagctccccgagggccagaagaagagcagtgtgaggcacaagctggtgcatttgactctgaaaaagaagtccaagctcacagaggaggtgaccaagaggctgcatgacggggagtccacagtgcagggcaacagcatgctggaggaccggcccacctccaacctggagaagctgcacttcatcatcggcaatggcatcctgcggccagcactccgggacgagatctactgccagatcagcaagcagctgacccacaacccctccaagagcagctatgcccggggctggattctcgtgtctctctgcgtgggctgtttcgccccctccgagaagtttgtcaagtacctgcggaacttcatccacgggggcccgcccggctacgccccgtactgtgaggagcgcctgagaaggacctttgtcaatgggacacggacacagccgcccagctggctggagctgcaggccaccaagtccaagaagccaatcatgttgcccgtgacattcatggatgggaccaccaagaccctgctgacggactcggcaaccacggccaaggagctctgcaacgcgctggccgacaagatctctctcaaggaccggttcgggttctccctctacattgccctgtttgacaaggtgtcctccctgggcagcggcagtgaccacgtcatggacgccatctcccagtgcgagcagtacgccaaggagcagggcgcccaggagcgcaacgccccctggaggctcttcttccgcaaagaggtcttcacgccctggcacagcccctccgaggacaacgtggccaccaacctcatctaccagcaggtggtgcgaggagtcaagtttggggagtacaggtgtgagaaggaggacgacctggctgagctggcctcccagcagtactttgtagactatggctctgagatgatcctggagcgcctcctgaacctcgtgcccacctacatccccgaccgcgagatcacgcccctgaagacgctggagaagtgggcccagctggccatcgccgcccacaagaaggggatttatgcccagaggagaactgatgcccagaaggtcaaagaggatgtggtcagttatgcccgcttcaagtggcccttgctcttctccaggttttatgaagcctacaaattctcaggccccagtctccccaagaacgacgtcatcgtggccgtcaactggacgggtgtgtactttgtggatgagcaggagcaggtacttctggagctgtccttcccagagatcatggccgtgtccagcagcagggagtgccgtgtctggctctcactgggctgctctgatcttggctgtgctgcgcctcactcaggctgggcaggactgaccccggcggggccctgttctccgtgttggtcctgcaggggagcgaaaacgacggcccccagcttcacgctggccaccatcaagggggacgaatacaccttcacctccagcaatgctgaggacattcgtgacctggtggtcaccttcctagaggggctccggaagagatctaagtatgttgtggccctgcaggataaccccaaccccgcaggcgaggagtcaggcttcctcagctttgccaagggagacctcatcatcctggaccatgacacgggcgagcaggtcatgaactcgggctgggccaacggcatcaatgagaggaccaagcagcgtggggacttccccaccgacagtgtgtacgtcatgcccactgtcaccatgccaccgcgggagattgtggccctggtcaccatgactcccgatcagaggcaggacgttgtccggctcttgcagctgcgaacggcggagcccgaggtgcgtgccaagccctacacgctggaggagttttcctatgactacttcaggcccccacccaagcacacgctgagccgtgtcatggtgtccaaggcccgaggcaaggaccggctgtggagccacacgcgggaaccgctcaagcaggcgctgctcaagaagctcctgggcagtgaggagctctcgcaggaggcctgcctggccttcattgctgtgctcaagtacatgggcgactacccgtccaagaggacacgctccgtcaacgagctcaccgaccagatctttgagggtcccctgaaagccgagcccctgaaggacgaggcatatgtgcagatcctgaagcagctgaccgacaaccacatcaggtacagcgaggagcggggttgggagctgctctggctgtgcacgggccttttcccacccagcaacatcctcctgccccacgtgcagcgcttcctgcagtcccgaaagcactgcccactcgccatcgactgcctgcaacggctccagaaagccctgagaaacgggtcccggaagtaccctccgcacctggtggaggtggaggccatccagcacaagaccacccagattttccacaaagtctacttccctgatgacactgacgaggccttcgaagtggagtccagcaccaaggccaaggacttctgccagaacatcgccaccaggctgctcctcaagtcctcagagggattcagcctctttgtcaaaattgcagacaaggtcctcagcgttcctgagaatgacttcttctttgactttgttcgacacttgacagactggataaagaaagctcggcccatcaaggacggaattgtgccctcactcacctaccaggtgttcttcatgaagaagctgtggaccaccacggtgccagggaaggatcccatggccgattccatcttccactattaccaggagttgcccaagtatctccgaggctaccacaagtgcacgcgggaggaggtgctgcagctgggggcgctgatctacagggtcaagttcgaggaggacaagtcctacttccccagcatccccaagctgctgcgggagctggtgccccaggaccttatccggcaggtctcacctgatgactggaagcggtccatcgtcgcctacttcaacaagcacgcagggaagtccaaggaggaggccaagctggccttcctgaagctcatcttcaagtggcccacctttggctcagccttcttcgaggtgaagcaaactacggagccaaacttccctgagatcctcctaattgccatcaacaagtatggggtcagcctcatcgatcccaaaacgaaggatatcctcaccactcatcccttcaccaagatctccaactggagcagcggcaacacctacttccacatcaccattgggaacttggtgcgcgggagcaaactgctctgcgagacgtcactgggctacaagatggatgacctcctgacttcctacattagccagatgctcacagccatgagcaaacagcggggctccaggagcggcaagtgaacagtcacggggaggtgctggttccatgcctgctctcgaggcagcagtgggttcaggcccatcagctacccctgcagctggggaagacttatgccatcccggcagcgaggctgggctggccagccaccactgactataccaactgggcctctgatgttcttccagtgaggcatctctctgggatgcagaacttccctccatccacccctctggcacctgggttggtctaatcctagtttgctgtggccttcccggttg

SEQ ID NO: 342136 - DNA, 6276 bp, Artificial Sequence
  derived and/or modified sequence
gccctgctgcagaagggcgaccacgtgtggatggacctgcggctgggacaggaatttgacgtgcccattggcgccgttgtaaaactgtgcgattccggtcaagtacaggttgtggacgatgaggacaatgaacactggatcagtccccagaacgccactcacataaaacccatgcatccaacgtcagtgcacggtgttgaggatatgattaggctcggcgaccttaacgaagcaggaattctgcggaacctcttaattaggtaccgtgaccatctcatctatacttatacagggagtatcctggtcgctgtaaatccctatcagttgctctccatctatagcccagagcacataaggcaatacactaataagaagatcggggaaatgcccccccacatttttgcgatcgccgacaactgttacttcaacatgaagcgaaattcccgggatcagtgctgtataatttccggcgagtctggcgctggcaagacagagtctacaaaacttatactgcagtttttggctgctatctctgggcagcactcatggatagaacagcaggtgcttgaggccacacccattctagaggccttcggaaatgcgaaaactattaggaatgataactcgtcaagatttggtaaatacatcgatatccacttcaacaaaagaggcgctatcgaaggtgcaaaaattgaacagtacctgttggaaaaaagcagggtgtgtcgccaggctctggacgagcgaaactatcatgtgttctattgtatgttggaaggcatgtccgaggatcaaaagaaaaagctcggcctgggtcaggcctcagactacaactatcttgctatggtaaaccctccagatctgatgtcttgtctgacgagcaggaccctcattactagaggggagactgtttccacgcccctgagccgagagcaggctctcgatgtcagggatgccttcgttaaaggaatctacggtagactcttcgtttggattgtagacaagatcaatgctgccatatataagcctccttcacaggatgtcaagaactcacgacggtcaattgggttacttgatatctttggcttcgagaattttgccgttaattctttcgaacaactctgcataaattttgccaacgaacaccttcaacagttcttcgtaagacacgtctttaaactggagcaggaggagtatgatctggagtccattgactggctacacattgagttcacagacaatcaggatgcacttgatatgatcgctaacaagcccatgaacattatatcgttaattgacgaagaatcgaagtttccaaaattcctggagaaaaatcgtgatacccttcacggtgatattatccagttggtgcacagcagcaggaacaagttcatcaaacagatcttccaggccgacgtcgccatgggtgccgagaccagaaagaggtctccaaccctgagcagccagttcaagaggtccttggaactcctgatgcgcacactaggagcgtgtcaaccattctttgtgcgatgcatcaaacccaacgaattcaaaaagcctatgctgttcgacaggcatctgtgcgtacgccagcttcggtatagcgggatgatggaaaccatcagaattagaagggccggttatccgatcagatatagctttgtggaatttgttgagaggtaccgggtgctactgcccggagtgaaacccgcttataagcagggcgatctgcggggcacgtgccagaggatggcagaggcagttttgggcacacacgacgattggcaaatcgggaagaccaagatattcctgaaagaccaccatgacatgcttttggaggtcgaacgggacaaggcgataactgaccgggtgatcttattacaaaaagttattcgaggcttcaaggaccgttcaaatttccttaaactgaagaacgccgctacactgattcaacggcattggcgaggccacaattgtcggaagaattacgggctgatgcggttgggatttcttaggctccaggcgctgcacaggtcaagaaagttacatcagcagtataggctcgctaggcagagaatcatccagttccaagccaggtgtagggcatatctggttcgcaaggcattcaggcacagattgtgggctgtgcttaccgtccaagcctacgctcgggggatgatcgccaggcggcttcaccaacggctgagggccgaatatctgtggagactggaagcagagaagatgaggcttgccgaagaagaaaagttgaggaaagagatgtcagctaaaaaagccaaggaggaagctgaacgcaaacatcaagagaggctggcacagttggcaagagaagatgcagagcgcgaactcaaggagaaggaagctgccaggcgcaagaaggagctgttagagcagatggagagagcacgccacgaacctgtgaatcattccgatatggttgataagatgttcggcttcctgggcacctctggagggttacctgggcaggagggtcaagccccttctggctttgaagacctggaaagaggtagaagagagatggtcgaggaggatctggatgctgctctacctctgccagatgaggacgaagaagacctgtcagagtacaagtttgccaagttcgccgccacttactttcagggtactaccactcactcttatacccgaaggccgttgaagcagccattgctataccatgatgacgagggcgaccaacttgccgcactggccgtgtggatcaccattttaaggtttatgggggatctgccagagccgaaataccacaccgctatgagtgacgggtcggagaagatccctgtcatgaccaaaatttatgaaacattaggcaaaaagacctataaaagggagcttcaggcgctgcagggtgagggcgaggctcagttgccggaggggcagaagaaatcgtccgtgagacacaagttggtgcaccttactctgaaaaagaagtctaaactcactgaggaagtgaccaagaggctgcacgatggtgaaagtacagtccaaggtaattcgatgctcgaggatcggccgacttccaatttggaaaagttgcactttatcattgggaacgggatcctgcgaccggctttaagggacgaaatctactgccagatttccaagcagttaacccacaatccatccaagtcctcttatgctcggggatggattctggtgtccctgtgtgtcgggtgttttgcccccagcgagaaatttgttaagtacctcagaaattttatacatggggggcctcccggatacgccccatactgtgaagaaagactgaggcgaacatttgtgaatggtaccaggactcagccaccgtcatggctcgaactgcaggctactaagagtaagaagcccattatgctcccagtgacctttatggatggcacgaccaagacccttcttactgactctgctacgaccgctaaggagctatgtaatgctctagccgacaagatcagcctcaaggaccgtttcggcttttcgttatacatagcgctttttgacaaggtaagttctctgggatcgggatccgaccacgtcatggatgccattagccagtgcgagcagtatgcaaaagaacagggtgcacaggagcgcaacgccccttggcggttgttcttccggaaggaggtttttacgccttggcattcacccagtgaagataatgttgcgaccaacttgatctatcaacaagtcgttcggggagtcaaatttggagaatacaggtgcgagaaggaggatgacctcgcagagctcgcgtcccagcagtattttgtggactatggtagcgagatgatcctggaacggctcctcaacttggtgccgacatatatcccagatcgcgagattactcctctgaagacacttgaaaagtgggcgcagttagctatcgccgcacataaaaaaggaatctacgctcagcggagaaccgacgcgcagaaggtgaaagaggacgtggtttcctacgccaggtttaagtggcccttgttgttcagccgcttctatgaggcttacaagttctcaggcccatcattgcccaaaaacgatgttatagtagctgtgaattggaccggcgtatacttcgtagacgaacaggagcaggtcttattggaactgagcttccctgagattatggccgtgtctagctcacgagagtgtcgggtgtggcttagcttgggttgttctgacctcggctgcgctgccccccatagtggatgggcagggttaaccccagccgggccctgctcgccttgttggagctgcaggggagcaaagacgactgcgccttccttcacactcgctaccatcaagggcgacgagtataccttcacaagttcgaacgctgaggacatccgggacttagttgtaacatttctcgagggtcttcggaagcgctcgaaatacgtcgtggccctacaagataatcctaaccctgcaggggaagaatcaggctttttgtcctttgcaaagggggatcttatcattttagaccatgacacgggagagcaagtgatgaactccgggtgggccaatggaattaacgaacggacaaaacagcgtggagactttccgacagactctgtgtacgtcatgccaactgtgactatgcccccaagagagattgtggccctcgttacaatgacacctgatcagaggcaggatgtcgtaagactgcttcagttacgcaccgctgaaccagaagtacgcgccaaaccctatacccttgaggaattctcttatgattatttccgacccccacctaaacataccctttctagggtgatggtgagcaaggctcgaggcaaagataggctgtggagccatacccgagagcctctcaagcaggcgctgctaaaaaaactgcttggatccgaagagctgtctcaagaagcgtgcctcgcattcatcgcggttcttaaatatatgggtgactatccgtccaagaggacccggtctgtgaatgagctgacagaccagatttttgaggggcctctgaaggcagaacccctgaaagatgaagcatacgtgcagatccttaagcagctgaccgataaccacattagatattctgaggaacgcggctgggagttgctgtggttatgcaccggcctttttcccccaagcaatattctgctaccacacgtgcagcgattcctgcagagccgcaagcactgtccattagcaatcgactgtctgcaacggctgcaaaaggcgttgcgcaatggctcccggaagtatccccctcatctcgtcgaggttgaagcgattcagcacaagaccacccagatcttccataaagtctattttccagatgacacagacgaggcattcgaggtggagagcagcaccaaggcaaaggatttctgtcagaatattgccacccgattactcctgaagagcagcgaaggattcagcttgttcgtcaaaatcgccgataaggtgctgtcagttcccgagaacgatttctttttcgacttcgtcaggcaccttacagattggatcaagaaggcacgtccaatcaaggacggcatcgtgccctccttaacgtatcaagttttttttatgaaaaaactgtggaccactaccgtgccgggcaaagacccaatggccgacagcatcttccattattaccaggaattgccgaaatatctccgcggctaccataaatgtacaagggaagaagttctccagttaggagccctcatttaccgtgtgaagtttgaggaagacaaatcttattttccatccatacccaaacttttaagggagctggtcccacaggacctgatacgccaagtctcacccgatgattggaagcggagcatagtggcctatttcaataaacatgcaggcaaatctaaggaggaggctaagctggccttcctgaagctgattttcaagtggccaactttcgggtccgcttttttcgaggtaaagcagactaccgagccaaatttcccagagatcctgctcattgccatcaataagtatggggtttccctgatagaccccaagaccaaggatattctgaccactcatccatttaccaagatttcaaattggagttcaggcaatacttattttcacataacgatcggcaacttggtgcgggggagtaagctcctttgtgaaacatctctgggttacaagatggatgacctgctgacctcttatatcagccagatgctcactgcaatgtccaagcagaggggttcccgctccggcaagtag

SEQ ID NO: 342137 - DNA, 6275 bp, Artificial Sequence
  derived and/or modified sequence
gccctgctgcagaagggagaccacgtgtggatggatctcaggctcggtcaagagtttgatgtgcctatcggcgctgtggtcaaattatgcgacagcgggcaggtacaggtagtggacgatgaggataatgagcactggatctcaccgcagaatgccacccacattaagcccatgcatccgaccagcgttcacggtgttgaggatatgatccgcctgggagacctcaatgaggccggaatcctgagaaacctgctcattagataccgtgaccatttaatatacacttataccgggagcatcctggttgccgtgaacccctaccagctgcttagtatctactcacccgaacacattcgccagtacaccaacaagaagataggcgaaatgccgccacatatttttgcaatcgccgataactgctattttaacatgaagcgcaactctagggaccaatgttgcatcatctctggtgagtcaggagcagggaaaactgagtccaccaaactcatcttacagtttctggccgctatctctggccaacactcttggatcgagcagcaggtcctggaggccactcccatcttggaagctttcggcaacgccaagaccatccggaacgataattccagtcgcttcggaaaatacatcgacatccatttcaacaaacgcggtgcaattgagggtgctaaaatcgaacagtacttgctcgaaaagagccgtgtctgccggcaggctctcgatgagcgaaattatcacgtgttctactgtatgctcgagggaatgtccgaggatcagaaaaagaagctggggctcggccaggcctccgactacaattatctggccatggtcaatccacccgacctcatgtcttgcctgacaagccggacactgattacccgcggtgagacagtcagcacacccctgtcacgggaacaggccctggatgtgagggatgcctttgttaagggaatctatggcagattattcgtctggattgttgataaaattaatgctgccatctacaaaccccctagtcaggatgtgaaaaattctcgcaggtcgatcgggctgttggatatttttgggttcgagaattttgcagtgaattcttttgaacagctttgcatcaactttgccaacgagcatctgcagcaattcttcgtcaggcatgtgtttaagctggagcaggaggagtacgatttggagagcatcgactggttacatatcgagtttaccgataatcaggacgcactcgacatgatcgcaaacaaaccaatgaatattatttccttgatcgacgaggagagtaaatttcccaaattcctggaaaagaacagagacacgctccatggcgatatcatccagctcgtgcacagcagtagaaataagttcatcaaacagattttccaagctgatgtcgccatgggagctgaaacacgaaaacgaagtcccacgttgtcatcccagttcaagcggtcgcttgaattgttgatgaggaccctgggggcttgccagccattctttgtccggtgtatcaaaccaaatgagttcaagaagcctatgctttttgacagacacttgtgcgttcgccaactgaggtatagcggaatgatggaaaccatacgcatccgacgggcaggctatcctattaggtactccttcgtggagttcgtggagaggtacagagtcctcctaccaggggtgaaaccagcatacaagcagggcgacctgcggggaacctgccagcgcatggcggaagctgtcttaggcacccatgacgactggcagattggcaagactaaaatctttttgaaggatcaccacgatatgttgctagaggtggaacgcgacaaggccataaccgatagagttatcctcctgcaaaaggtaattcgtggtttcaaagaccggagcaatttcttaaagctcaagaacgccgctaccctgatccagagacattggcgcggacataattgccgtaaaaactatggcttaatgcgtctaggattcctccgtctgcaggcactgcaccgatcaagaaaactgcaccaacagtacagattggctcgtcagcgcatcatccaattccaagccaggtgccgcgcatacctggtgcgaaaagcgttccggcatcgcctgtgggcggtgctgacagttcaggcttacgcgaggggaatgattgctagacgcctgcaccagagactacgtgcagagtacctctggcgcctggaagctgagaagatgcgactggcagaggaagagaaattacggaaagaaatgtctgccaagaaagccaaagaggaggcggagcggaaacaccaagagcgcctcgcccagcttgcccgtgaagatgctgaacgggaattgaaggagaaggaagccgctaggcgcaaaaaggagttgctggagcagatggagcgcgctcggcatgagcccgtgaaccacagtgacatggttgacaaaatgttcgggttcctggggacctccggcggactccctggacaggagggccaggccccttccgggtttgaagacttagaacggggaaggcgagagatggtggaagaggatttagatgccgcactgccacttccggacgaggacgaggaggatctgtccgagtataagtttgccaagttcgcggcaacctatttccagggcaccactacccactcatacaccaggcgacccttgaagcagcctcttctctaccacgatgacgaaggggaccaactggccgcactggccgtctggattaccatactacgcttcatgggtgatttgcctgagcccaagtatcacaccgcgatgagtgacggaagcgaaaaaatccctgttatgacaaaaatctacgagacattaggtaagaaaacttacaagcgcgaactccaggcactacagggggaaggtgaagctcaactgcccgagggacaaaaaaaaagtagtgttagacacaaactcgtgcacctgacactcaaaaagaagagcaaacttactgaggaggtcacaaaacgcttacacgatggagagtctaccgtccaaggaaatagcatgttggaggatcgcccaacatctaacctggaaaagctgcacttcattattggcaacggcattcttcgaccagcactgcgggatgagatttattgccagatatctaaacaactgacccacaatcccagcaagtctagctatgcacgcggttggattctggtgtctttgtgtgtaggatgctttgcccctagtgagaagttcgttaaatacctgcgcaactttatccatgggggtccacctggatacgctccatattgcgaagagcgccttcgcaggacgttcgtcaacggtacacggacacaaccgccaagctggctggaactgcaagccaccaagagcaagaaacccattatgctccccgttacttttatggacggaactaccaaaactctgctgaccgattccgccacaacagccaaggagctgtgcaacgccctggcagacaaaatcagcttgaaagatcgattcggcttcagcctgtacatcgcactttttgacaaggttagcagtctgggttcagggagcgaccacgtcatggacgccatttctcagtgtgagcagtatgcaaaggaacaaggggctcaggagcgcaatgcgccatggaggctgtttttccggaaggaagttttcaccccctggcactcccctagtgaagataatgtggccaccaacctgatatatcagcaggtggttcggggagtcaaatttggcgagtacagatgcgagaaagaggatgatctggctgagctagctagccagcagtatttcgtcgactatggatccgagatgattcttgaacgccttcttaatctagtgcccacttacatacctgatcgagaaatcacaccactcaagaccctggagaagtgggcgcaactggccatcgccgctcataaaaaagggatatacgctcagcgcagaactgacgcacaaaaggtcaaggaggacgtggtgtcatatgcacgcttcaaatggccactgctgttctcgaggttctacgaagcatataagttctcagggccatcactgcccaagaatgacgtaatcgtcgcagtaaattggaccggcgtgtactttgtcgacgaacaggagcaagtcctgctggaactgtctttccccgaaattatggctgtcagctcctctcgcgagtgtagagtgtggcttagcctcggctgcagcgatctcggctgtgccgctccacattcggggtgggcaggtctgactccagcaggtccttgctcaccctgctggagttgccgaggtgcaaaaacaacagctccttctttcacgttggccaccataaagggggacgagtataccttcactagctccaacgccgaggacattagggacttggtggtaacctttttggagggattgagaaaacggtccaaatacgtggttgctctgcaggataaccccaacccagcgggagaggaaagcgggtttctctcctttgccaagggtgacttgattattctggaccatgacacgggcgagcaggtgatgaatagcgggtgggccaacgggattaacgaacggacgaaacagcggggagatttcccaaccgatagtgtctatgtgatgccaacagtgactatgccacccagagagatagtggcgctggttaccatgacccctgaccagcgacaagacgttgtgcggttactgcagctgcggacagcggagccagaggtgagggccaagccttatacactagaagaattctcatatgattatttcagaccccctcctaaacacaccctcagtagagtgatggtgtccaaggcgcgagggaaagaccggctctggtctcacacaagagaacccctgaagcaggccttactcaaaaaactcttgggtagcgaggaactgagccaggaagcatgcctcgcgttcatcgcagtattaaagtacatgggtgactacccatccaagcgcactcgatctgtcaacgagctgacagatcaaatctttgaaggacccctgaaggcagagcctctgaaggacgaggcgtatgtccaaattctgaagcagctgaccgataaccacatccgttactccgaggagagagggtgggaactgctttggctgtgcaccggtttatttcccccttccaacatcctgctccctcacgtgcagcggttcttgcagtcccgcaagcactgtcccctcgctatagactgtctgcagaggctccagaaggcattaagaaacgggagtcgcaagtatccccctcacctcgttgaagtcgaggctattcagcacaagaccactcagatcttccataaagtatattttcccgacgataccgatgaggcatttgaggtcgagtctagcaccaaggctaaggacttctgccagaacattgctaccaggctgctactgaaatcatccgaagggttttccctttttgttaaaattgccgacaaggtgctttccgtgcccgaaaacgatttttttttcgactttgttcgccacttgactgattggattaagaaggctagacctatcaaggatggtattgtccccagcctgacataccaggtctttttcatgaagaagctatggacaacaaccgtgcccggtaaggaccccatggctgattcaatttttcattactaccaagagctgcctaaatatctcagggggtaccataaatgcacccgtgaggaagtacttcagctcggggctttaatttaccgcgtcaagtttgaagaggacaagtcatattttcctagcattcccaaactcctgcgcgaactggtcccacaagatctgatacgccaggtgtctcccgacgattggaagcgcagcatcgtcgcctactttaacaaacacgctgggaaatcaaaggaagaagcgaaactggccttcctgaagctgatctttaaatggccaacttttggtagcgcattctttgaagtcaaacagaccaccgagcccaatttcccagagatcctattgatcgctattaacaaatacggggtcagccttattgacccaaagacaaaggatattctaacaacccacccgtttacgaagatttcaaactggagctctgggaacacctacttccatattaccattgggaacctcgtgcgcggaagcaagctcttatgtgaaacctcgctggggtacaaaatggacgacttactcactagttacatttctcaaatgttgactgcaatgagcaaacaaaggggatctcgctccggtaagta

SEQ ID NO: 342138 - DNA, 6276 bp, Artificial Sequence
  derived and/or modified sequence
gccctgctgcagaagggcgaccacgtgtggatggacctgagactgggccaggagttcgacgtgcccatcggcgccgtggtgaagctgtgcgacagcggccaggtgcaggtggtggacgacgaggacaacgagcactggatcagcccccagaacgccacccacatcaagcccatgcaccccaccagcgtgcacggcgtggaggacatgatcagactgggcgacctgaacgaggccggcatcctgagaaacctgctgatcagatacagagaccacctgatctacacctacaccggcagcatcctggtggccgtgaacccctaccagctgctgagcatctacagccccgagcacatcagacagtacaccaacaagaagatcggcgagatgcccccccacatcttcgccatcgccgacaactgctacttcaacatgaagagaaacagcagagaccagtgctgcatcatcagcggcgagagcggcgccggcaagaccgagagcaccaagctgatcctgcagttcctggccgccatcagcggccagcacagctggatcgagcagcaggtgctggaggccacccccatcctggaggccttcggcaacgccaagaccatcagaaacgacaacagcagcagattcggcaagtacatcgacatccacttcaacaagagaggcgccatcgagggcgccaagatcgagcagtacctgctggagaagagcagagtgtgcagacaggccctggacgagagaaactaccacgtgttctactgcatgctggagggcatgagcgaggaccagaagaagaagctgggcctgggccaggccagcgactacaactacctggccatggtgaacccccccgacctgatgagctgcctgaccagcagaaccctgatcaccagaggcgagaccgtgagcacccccctgagcagagagcaggccctggacgtgagagacgccttcgtgaagggcatctacggcagactgttcgtgtggatcgtggacaagatcaacgccgccatctacaagccccccagccaggacgtgaagaacagcagaagaagcatcggcctgctggacatcttcggcttcgagaacttcgccgtgaacagcttcgagcagctgtgcatcaacttcgccaacgagcacctgcagcagttcttcgtgagacacgtgttcaagctggagcaggaggagtacgacctggagagcatcgactggctgcacatcgagttcaccgacaaccaggacgccctggacatgatcgccaacaagcccatgaacatcatcagcctgatcgacgaggagagcaagttccccaagttcctggagaagaacagagacaccctgcacggcgacatcatccagctggtgcacagcagcagaaacaagttcatcaagcagatcttccaggccgacgtggccatgggcgccgagaccagaaagagaagccccaccctgagcagccagttcaagagaagcctggagctgctgatgagaaccctgggcgcctgccagcccttcttcgtgagatgcatcaagcccaacgagttcaagaagcccatgctgttcgacagacacctgtgcgtgagacagctgagatacagcggcatgatggagaccatcagaatcagaagagccggctaccccatcagatacagcttcgtggagttcgtggagagatacagagtgctgctgcccggcgtgaagcccgcctacaagcagggcgacctgagaggcacctgccagagaatggccgaggccgtgctgggcacccacgacgactggcagatcggcaagaccaagatcttcctgaaggaccaccacgacatgctgctggaggtggagagagacaaggccatcaccgacagagtgatcctgctgcagaaggtgatcagaggcttcaaggacagaagcaacttcctgaagctgaagaacgccgccaccctgatccagagacactggagaggccacaactgcagaaagaactacggcctgatgagactgggcttcctgagactgcaggccctgcacagaagcagaaagctgcaccagcagtacagactggccagacagagaatcatccagttccaggccagatgcagagcctacctggtgagaaaggccttcagacacagactgtgggccgtgctgaccgtgcaggcctacgccagaggcatgatcgccagaagactgcaccagagactgagagccgagtacctgtggagactggaggccgagaagatgagactggccgaggaggagaagctgagaaaggagatgagcgccaagaaggccaaggaggaggccgagagaaagcaccaggagagactggcccagctggccagagaggacgccgagagagagctgaaggagaaggaggccgccagaagaaagaaggagctgctggagcagatggagagagccagacacgagcccgtgaaccacagcgacatggtggacaagatgttcggcttcctgggcaccagcggcggcctgcccggccaggagggccaggcccccagcggcttcgaggacctggagagaggcagaagagagatggtggaggaggacctggacgccgccctgcccctgcccgacgaggacgaggaggacctgagcgagtacaagttcgccaagttcgccgccacctacttccagggcaccaccacccacagctacaccagaagacccctgaagcagcccctgctgtaccacgacgacgagggcgaccagctggccgccctggccgtgtggatcaccatcctgagattcatgggcgacctgcccgagcccaagtaccacaccgccatgagcgacggcagcgagaagatccccgtgatgaccaagatctacgagaccctgggcaagaagacctacaagagagagctgcaggccctgcagggcgagggcgaggcccagctgcccgagggccagaagaagagcagcgtgagacacaagctggtgcacctgaccctgaagaagaagagcaagctgaccgaggaggtgaccaagagactgcacgacggcgagagcaccgtgcagggcaacagcatgctggaggacagacccaccagcaacctggagaagctgcacttcatcatcggcaacggcatcctgagacccgccctgagagacgagatctactgccagatcagcaagcagctgacccacaaccccagcaagagcagctacgccagaggctggatcctggtgagcctgtgcgtgggctgcttcgcccccagcgagaagttcgtgaagtacctgagaaacttcatccacggcggcccccccggctacgccccctactgcgaggagagactgagaagaaccttcgtgaacggcaccagaacccagccccccagctggctggagctgcaggccaccaagagcaagaagcccatcatgctgcccgtgaccttcatggacggcaccaccaagaccctgctgaccgacagcgccaccaccgccaaggagctgtgcaacgccctggccgacaagatcagcctgaaggacagattcggcttcagcctgtacatcgccctgttcgacaaggtgagcagcctgggcagcggcagcgaccacgtgatggacgccatcagccagtgcgagcagtacgccaaggagcagggcgcccaggagagaaacgccccctggagactgttcttcagaaaggaggtgttcaccccctggcacagccccagcgaggacaacgtggccaccaacctgatctaccagcaggtggtgagaggcgtgaagttcggcgagtacagatgcgagaaggaggacgacctggccgagctggccagccagcagtacttcgtggactacggcagcgagatgatcctggagagactgctgaacctggtgcccacctacatccccgacagagagatcacccccctgaagaccctggagaagtgggcccagctggccatcgccgcccacaagaagggcatctacgcccagagaagaaccgacgcccagaaggtgaaggaggacgtggtgagctacgccagattcaagtggcccctgctgttcagcagattctacgaggcctacaagttcagcggccccagcctgcccaagaacgacgtgatcgtggccgtgaactggaccggcgtgtacttcgtggacgagcaggagcaggtgctgctggagctgagcttccccgagatcatggccgtgagcagcagcagagagtgcagagtgtggctgagcctgggctgcagcgacctgggctgcgccgccccccacagcggctgggccggcctgacccccgccggcccctgcagcccctgctggagctgcagaggcgccaagaccaccgcccccagcttcaccctggccaccatcaagggcgacgagtacaccttcaccagcagcaacgccgaggacatcagagacctggtggtgaccttcctggagggcctgagaaagagaagcaagtacgtggtggccctgcaggacaaccccaaccccgccggcgaggagagcggcttcctgagcttcgccaagggcgacctgatcatcctggaccacgacaccggcgagcaggtgatgaacagcggctgggccaacggcatcaacgagagaaccaagcagagaggcgacttccccaccgacagcgtgtacgtgatgcccaccgtgaccatgccccccagagagatcgtggccctggtgaccatgacccccgaccagagacaggacgtggtgagactgctgcagctgagaaccgccgagcccgaggtgagagccaagccctacaccctggaggagttcagctacgactacttcagacccccccccaagcacaccctgagcagagtgatggtgagcaaggccagaggcaaggacagactgtggagccacaccagagagcccctgaagcaggccctgctgaagaagctgctgggcagcgaggagctgagccaggaggcctgcctggccttcatcgccgtgctgaagtacatgggcgactaccccagcaagagaaccagaagcgtgaacgagctgaccgaccagatcttcgagggccccctgaaggccgagcccctgaaggacgaggcctacgtgcagatcctgaagcagctgaccgacaaccacatcagatacagcgaggagagaggctgggagctgctgtggctgtgcaccggcctgttcccccccagcaacatcctgctgccccacgtgcagagattcctgcagagcagaaagcactgccccctggccatcgactgcctgcagagactgcagaaggccctgagaaacggcagcagaaagtaccccccccacctggtggaggtggaggccatccagcacaagaccacccagatcttccacaaggtgtacttccccgacgacaccgacgaggccttcgaggtggagagcagcaccaaggccaaggacttctgccagaacatcgccaccagactgctgctgaagagcagcgagggcttcagcctgttcgtgaagatcgccgacaaggtgctgagcgtgcccgagaacgacttcttcttcgacttcgtgagacacctgaccgactggatcaagaaggccagacccatcaaggacggcatcgtgcccagcctgacctaccaggtgttcttcatgaagaagctgtggaccaccaccgtgcccggcaaggaccccatggccgacagcatcttccactactaccaggagctgcccaagtacctgagaggctaccacaagtgcaccagagaggaggtgctgcagctgggcgccctgatctacagagtgaagttcgaggaggacaagagctacttccccagcatccccaagctgctgagagagctggtgccccaggacctgatcagacaggtgagccccgacgactggaagagaagcatcgtggcctacttcaacaagcacgccggcaagagcaaggaggaggccaagctggccttcctgaagctgatcttcaagtggcccaccttcggcagcgccttcttcgaggtgaagcagaccaccgagcccaacttccccgagatcctgctgatcgccatcaacaagtacggcgtgagcctgatcgaccccaagaccaaggacatcctgaccacccaccccttcaccaagatcagcaactggagcagcggcaacacctacttccacatcaccatcggcaacctggtgagaggcagcaagctgctgtgcgagaccagcctgggctacaagatggacgacctgctgaccagctacatcagccagatgctgaccgccatgagcaagcagagaggcagcagaagcggcaagtag

SEQ ID NO: 342139 - protein, 843 aa, Artificial Sequence
  derived and/or modified sequence
GLSVQWLLDGLACFFASLHVPLGRVQLHASARGIQEKEDDLAELASQQYFVDYGSEMILERLLNLVPTYIPDREITPLKTLEKWAQLAIAAHKKGIYAQRRTDAQKVKEDVVSYARFKWPLLFSRFYEAYKFSGPSLPKNDVIVAVNWTGVYFVDEQEQVLLELSFPEIMAVSSSRGAKTTAPSFTLATIKGDEYTFTSSNAEDIRDLVVTFLEGLRKRSKYVVALQDNPNPAGEESGFLSFAKGDLIILDHDTGEQVMNSGWANGINERTKQRGDFPTDSVYVMPTVTMPPREIVALVTMTPDQRQDVVRLLQLRTAEPEVRAKPYTLEEFSYDYFRPPPKHTLSRVMVSKARGKDRLWSHTREPLKQALLKKLLGSEELSQEACLAFIAVLKYMGDYPSKRTRSVNELTDQIFEGPLKAEPLKDEAYVQILKQLTDNHIRYSEERGWELLWLCTGLFPPSNILLPHVQRFLQSRKHCPLAIDCLQRLQKALRNGSRKYPPHLVEVEAIQHKTTQIFHKVYFPDDTDEAFEVESSTKAKDFCQNIATRLLLKSSEGFSLFVKIADKVLSVPENDFFFDFVRHLTDWIKKARPIKDGIVPSLTYQVFFMKKLWTTTVPGKDPMADSIFHYYQELPKYLRGYHKCTREEVLQLGALIYRVKFEEDKSYFPSIPKLLRELVPQDLIRQVSPDDWKRSIVAYFNKHAGKSKEEAKLAFLKLIFKWPTFGSAFFEVKVHHGLLRAEEEGNRALIKHRDSSLGLWERAMALDTCPGEGRRAAPSALSQLSVLAGVSPGDRGTRRSSAWQWRQTCKQAGVMEDGLCSDTGEPSPRWQSSGGSAGCEKAS

SEQ ID NO: 342140 - DNA, 2532 bp, Artificial Sequence
  derived and/or modified sequence
ggcctatcagtccagtggctgctggacggcctcgcttgcttcttcgcctccctccacgtgccactcggtcgagtgcagctacatgcatctgcccggggaatccaggaaaaggaagacgacctcgcagaactcgcttcacaacagtatttcgtagattatggctccgagatgatccttgagagacttctgaacttagttcccacctacattcctgatagagaaattacccctttgaagacgcttgaaaagtgggcccaattggctattgcagcgcacaagaaagggatctatgcccagcgtcgcacagatgcacagaaggtgaaggaggacgtggtcagttatgcacggtttaagtggcctttactgttctcccgtttttacgaggcttacaagttctctggaccttcactgcccaagaacgacgtcattgtcgcagtgaactggaccggcgtctactttgttgacgagcaagaacaagtgctacttgagttgtcatttcctgaaatcatggccgtgtcttcatccaggggagcgaagaccacagctccgagttttaccctggcaaccataaagggggacgagtacaccttcacctcaagcaatgctgaggatatcagggacttagtcgtgaccttcctcgagggactccgcaagcggtctaagtatgtggttgcccttcaggataacccaaacccagcaggcgaggagtcaggattcctgtcattcgccaagggagatctgattatacttgaccatgacacaggcgaacaagtgatgaactccggatgggccaatggcatcaacgaacgcactaagcagagaggcgatttcccaaccgactccgtttacgtgatgcccaccgtgactatgcctcctcgtgagatcgtagctctggtaactatgactcctgatcaacggcaagatgtggtgaggctgctgcagctgaggaccgctgaaccagaagtgcgggccaaaccatatactctggaagagttctcatacgactactttagacccccccctaagcatacactgtcccgggtcatggtgtctaaagcccgtggcaaggatcggttatggtctcatacgcgcgagcctctcaagcaagcacttctcaagaagctcctggggtccgaggagttgtcacaggaagcctgtttagctttcatagccgtgctcaagtacatgggagattatccctctaagagaacacggtccgtgaatgaactgaccgaccaaatttttgaaggcccactgaaggctgagcctctgaaggacgaggcctacgtgcagattctgaaacaactcacagacaaccatattagatactccgaagaaagaggatgggaactcctgtggctttgcacaggtctgtttccaccatccaacatcctactgccgcatgtgcagcgcttcctgcagagcagaaagcactgccccctggctattgactgtctgcagcgcttgcagaaagctctgcgtaatggaagccgaaagtacccccctcatcttgtggaagtggaggctattcaacataaaactacccaaatcttccataaggtatattttccagacgacacagacgaagcattcgaggtagagagtagcaccaaggcaaaggacttttgccagaatattgcaactcgccttctattaaagagttcagaaggcttcagtctcttcgtaaagattgccgacaaggtgctctccgtcccagagaatgacttcttcttcgatttcgtccgccacctcactgactggatcaagaaagcccgcccgattaaggacggaattgtgcccagccttacatatcaggtattttttatgaaaaagctctggaccaccacagtccctggaaaggacccaatggcagatagcatttttcattactaccaggaattgccaaaatacctgcgagggtaccataagtgtactcgggaggaggtgttgcagctgggggccctcatctatagagtgaagtttgaggaagataagagctattttccaagtatccctaaactgctacgtgagctggtgccacaagatttgatcagacaagtttcaccggacgattggaagcgttctatcgtagcgtacttcaataaacacgccgggaaatccaaggaagaggccaagttagccttcttgaagcttatcttcaaatggccaacctttggcagcgccttttttgaagtgaaggttcaccatggtcttttacgtgctgaagaagagggtaatagggcgcttattaaacacagggattcatctttggggctctgggaaagggccatggccttggacacatgccctggtgaagggcggagagcagcccccagcgccctctcgcaacttagtgtgttggcaggtgtgtcccctggagatagaggcacacgccggtccagcgcctggcaatggcgccagacatgcaagcaggcgggcgttatggaggacggcctgtgcagcgatacgggcgagccaagcccccgttggcagtcctcaggaggctcagccggttgcgaaaaagcgtcttag

SEQ ID NO: 342141 - DNA, 2532 bp, Artificial Sequence
  derived and/or modified sequence
ggcctgtctgtgcagtggctgctggatggcctggcctgcttctttgccagcctgcacgtgcccctgggccgggtgcagctgcacgccagcgcccggggcatccaggagaaggaggatgacctggccgagctggccagccagcagtactttgtggactatggcagcgagatgatcctggagcggctgctgaacctggtgcccacctacatcccagaccgggagatcacccccctgaagaccctggagaagtgggcccagctggccatcgccgcccacaagaagggcatctatgcccagaggagaacagatgcccagaaggtgaaggaggatgtggtgtcctatgcccgcttcaagtggcccctgctcttcagccgcttctatgaggcctacaagttcagcggccccagcctgcccaagaatgatgtgattgtggccgtgaactggacaggagtgtactttgtggatgagcaggagcaggtgctgctggagctgtccttccctgagatcatggctgtgagcagcagcagaggagccaagaccacagcccccagcttcaccctggccaccatcaagggagatgagtacaccttcaccagcagcaatgctgaggacatccgggacctggtggtgaccttcctggagggcctgaggaagaggagcaaatatgtggtggccctgcaggacaaccccaacccagctggggaggagagcggcttcctgagctttgccaagggggacctgatcatcctggaccatgacaccggggagcaggtgatgaacagcggctgggccaacggcatcaatgaaagaaccaagcagagaggagacttccccacagattctgtgtatgtgatgcccaccgtgaccatgccaccccgggagatcgtggccctggtgaccatgaccccagaccagaggcaggatgtggtgcggctgctgcagctgaggacagctgagcctgaggtgcgggccaagccctacaccctggaggagttctcctatgactacttccggcccccacccaagcacaccctgagccgggtgatggtgtccaaggcccggggcaaggaccggctgtggagccacacccgggagcccctgaagcaggccctgctgaagaagctgctgggcagcgaggagctgagccaggaggcctgcctggccttcatcgctgtgctgaagtacatgggagactaccccagcaagaggaccaggtctgtgaatgagctgacagaccagatctttgagggccccctgaaggccgagcccctgaaggatgaggcctacgtgcagatcctgaagcagctgacagacaaccacatccgctacagcgaggagcggggctgggagctgctgtggctgtgcaccggcctcttcccccccagcaacatcctgctgccccacgtgcagcgcttcctgcagagcaggaagcactgccccctggccatcgactgcctgcagaggctgcagaaggccctgagaaatggcagcaggaagtacccaccccacctggtggaggtggaggccatccagcacaagaccacccagatcttccacaaggtgtacttcccagatgacacagatgaggcctttgaggtggagagcagcaccaaggccaaggacttctgccagaacatcgccacccggctgctgctgaagagcagcgagggcttcagcctgtttgtgaagattgctgacaaggtgctgtctgtgcctgaaaatgacttcttctttgattttgtgcgccacctgacagactggatcaagaaggcccggcccatcaaggatggcatcgtgcccagcctgacctaccaggtgttcttcatgaagaagctgtggaccaccaccgtgcctgggaaggaccccatggctgacagcatcttccactactaccaggagctgcccaagtacctgcggggctaccacaagtgcacccgggaggaggtgctgcagctgggcgccctgatctacagagtgaagtttgaggaggacaagagctacttccccagcatccccaagctgctgcgggagctggtgccccaggacctgatccggcaggtgtccccagatgactggaagaggagcatcgtggcctacttcaacaagcacgccggcaagagcaaggaggaggccaagctggccttcctgaagctgatcttcaagtggcccacctttggaagtgccttctttgaggtgaaggtgcaccacggcctgctgcgggcagaggaggagggcaacagagccctgatcaagcaccgggacagcagcctgggcctgtgggagcgggccatggccctggacacctgccctggagagggccggcgggccgcccccagcgccctgagccagctgtctgtgctggccggcgtgtcccctggggaccggggcacccggcgcagcagcgcctggcagtggaggcagacctgcaagcaggccggcgtgatggaggatggcctgtgcagcgacacaggagagcccagcccccgctggcagagcagcggcggcagcgctggctgtgagaaggccagctag

SEQ ID NO: 342142 - DNA, 2532 bp, Artificial Sequence
  derived and/or modified sequence
gggctgagtgtgcagtggctgctcgatgggctggcttgtttctttgcatcacttcatgtgcccctgggcagagtccagctccatgccagtgccagagggatccaggagaaggaggacgacctggctgagctggcctcccagcagtactttgtagactatggctctgagatgatcctggagcgcctcctgaacctcgtgcccacctacatccccgaccgcgagatcacgcccctgaagacgctggagaagtgggcccagctggccatcgccgcccacaagaaggggatttatgcccagaggagaactgatgcccagaaggtcaaagaggatgtggtcagttatgcccgcttcaagtggcccttgctcttctccaggttttatgaagcctacaaattctcaggccccagtctccccaagaacgacgtcatcgtggccgtcaactggacgggtgtgtactttgtggatgagcaggagcaggtacttctggagctgtccttcccagagatcatggccgtgtccagcagcaggggagcgaaaacgacggcccccagcttcacgctggccaccatcaagggggacgaatacaccttcacctccagcaatgctgaggacattcgtgacctggtggtcaccttcctagaggggctccggaagagatctaagtatgttgtggccctgcaggataaccccaaccccgcaggcgaggagtcaggcttcctcagctttgccaagggagacctcatcatcctggaccatgacacgggcgagcaggtcatgaactcgggctgggccaacggcatcaatgagaggaccaagcagcgtggggacttccccaccgacagtgtgtacgtcatgcccactgtcaccatgccaccgcgggagattgtggccctggtcaccatgactcccgatcagaggcaggacgttgtccggctcttgcagctgcgaacggcggagcccgaggtgcgtgccaagccctacacgctggaggagttttcctatgactacttcaggcccccacccaagcacacgctgagccgtgtcatggtgtccaaggcccgaggcaaggaccggctgtggagccacacgcgggaaccgctcaagcaggcgctgctcaagaagctcctgggcagtgaggagctctcgcaggaggcctgcctggccttcattgctgtgctcaagtacatgggcgactacccgtccaagaggacacgctccgtcaacgagctcaccgaccagatctttgagggtcccctgaaagccgagcccctgaaggacgaggcatatgtgcagatcctgaagcagctgaccgacaaccacatcaggtacagcgaggagcggggttgggagctgctctggctgtgcacgggccttttcccacccagcaacatcctcctgccccacgtgcagcgcttcctgcagtcccgaaagcactgcccactcgccatcgactgcctgcaacggctccagaaagccctgagaaacgggtcccggaagtaccctccgcacctggtggaggtggaggccatccagcacaagaccacccagattttccacaaagtctacttccctgatgacactgacgaggccttcgaagtggagtccagcaccaaggccaaggacttctgccagaacatcgccaccaggctgctcctcaagtcctcagagggattcagcctctttgtcaaaattgcagacaaggtcctcagcgttcctgagaatgacttcttctttgactttgttcgacacttgacagactggataaagaaagctcggcccatcaaggacggaattgtgccctcactcacctaccaggtgttcttcatgaagaagctgtggaccaccacggtgccagggaaggatcccatggccgattccatcttccactattaccaggagttgcccaagtatctccgaggctaccacaagtgcacgcgggaggaggtgctgcagctgggggcgctgatctacagggtcaagttcgaggaggacaagtcctacttccccagcatccccaagctgctgcgggagctggtgccccaggaccttatccggcaggtctcacctgatgactggaagcggtccatcgtcgcctacttcaacaagcacgcagggaagtccaaggaggaggccaagctggccttcctgaagctcatcttcaagtggcccacctttggctcagccttcttcgaggtgaaggtacaccatgggcttctcagagcagaggaggaggggaacagggcattgataaagcacagagactcctccctaggactgtgggaaagagccatggccttggacacctgccctggtgagggaaggagggcagcaccctcagccttgtcccagcttagcgtcttagctggggtaagtcctggggacagagggaccagaagaagctcagcctggcagtggaggcagacatgtaaacaggctggggtaatggaggatggcctgtgttctgacactggggagccctcgcccaggtggcagagctcgggaggctctgccgggtgtgagaaggcctcttag

SEQ ID NO: 342143 - DNA, 2532 bp, Artificial Sequence
  derived and/or modified sequence
ggcctgagcgtgcagtggctgctggacggcctggcctgcttcttcgcaagcctgcacgttcccctcgggcgggtacaactgcacgccagcgcaagagggatccaggagaaggaggatgacttggcggagctcgcatctcagcagtacttcgtggattacgggtccgagatgatccttgagcggctgctaaacctggtgcccacatacatccccgaccgcgagataactcccctgaagacgttagagaagtgggcacaacttgctatcgccgctcataagaagggaatctacgcccagcggcggacagacgcacagaaggtgaaggaagatgtggtttcctatgcccggttcaagtggcctcttttattctcacggttttacgaggcatacaaattctcaggacccagcctcccaaaaaacgacgttatcgtagcagtcaactggaccggagtatactttgtagatgagcaggagcaagtgctgctggagttgtcttttcctgaaatcatggccgtctcatcctctagaggggcgaaaacgacagctcccagttttaccctcgcaacaataaagggtgatgaatatacatttacaagttctaatgcagaggacattcgcgatctggtggtgacgttcttggaaggcttgagaaaacggtccaaatacgttgtagccctgcaggacaatccaaaccccgcgggcgaggagtcaggttttctaagtttcgctaaaggcgatctgattatcctggatcatgataccggcgagcaagtcatgaactctgggtgggcaaatggtattaacgaacgtacaaaacaacggggagactttccaaccgatagcgtgtatgtcatgcctacggttacaatgcccccccgcgagatcgtggctctggtgacaatgacccccgatcagagacaggatgtggtcagacttctccagctgaggacagccgagccagaggttcgtgccaaaccctatacactggaggagtttagttatgattacttcaggcctcccccgaagcacactctgagtagagtgatggtttcaaaggccagagggaaggatcggctttggtcccatacacgagagcctctcaaacaggcattgttgaagaaactcttagggagcgaggaactgtcccaggaggcttgccttgcattcattgcagtgctaaaatacatgggcgactatcccagcaagcgtactagaagtgtcaacgaactgactgatcagatcttcgaggggcccctgaaggcagaaccgctcaaggacgaagcctacgtgcagattctcaagcagcttacagataaccacattagatatagcgaggagcgaggctgggagctcctgtggttatgcacaggactgtttccgccatccaacattctcctcccacatgtccagcgttttcttcagtcgcggaagcattgtcctctggccatcgactgtcttcagagactacagaaggccctccgtaatggtagtcgaaagtatccacctcacctggtggaggtggaggctatccagcataagaccactcaaatcttccacaaggtgtactttcctgacgacacagatgaggctttcgaagtggaaagctcgacgaaagctaaagacttctgtcagaacatagcgacccgcctcctgttaaagagctctgagggcttcagtctgttcgtgaaaattgccgataaggttctgagcgtccctgaaaatgattttttttttgattttgtgaggcacctgaccgattggattaaaaaggcccgtcctattaaggatggcatcgtgcctagcttaacttaccaagtattctttatgaagaagctttggactactaccgtccctggcaaagaccccatggccgactctatcttccactactatcaggagcttccgaagtaccttagaggttatcacaagtgcactcgggaagaagtgttgcaactcggcgccttgatctacagagttaaatttgaggaagacaaatcttacttcccgtctattcccaaactgctgcgggagctggtgccacaggatcttatccgtcaagtcagtccagacgattggaaaagatctattgtggcctacttcaataagcacgccgggaagagtaaggaggaggcaaagctggctttcctgaaactgatcttcaaatggcccacctttggatctgccttttttgaagtgaaagtgcaccacggacttttacgagccgaggaggaaggaaacagagctttgattaagcaccgagactctagcctcggcctttgggagcgtgccatggctctcgatacctgccctggtgaaggcaggagagctgccccctccgccttgtctcagctgtctgtcctggccggcgtcagtccgggagacaggggtactcggcggtcctctgcatggcagtggagacagacatgtaaacaggcgggcgtcatggaggacggcctgtgctcggatacaggggaaccatcccccaggtggcagtcatccggcggatcagcggggtgtgagaaggcatcctag

SEQ ID NO: 342144 - DNA, 2532 bp, Artificial Sequence
  derived and/or modified sequence
ggtctcagcgtgcagtggctgctggatgggctcgcctgtttttttgccagtctgcacgtgcccctcggccgagtgcagcttcatgccagtgccagagggatccaggagaaagaggacgacctggcagaattggcttcccagcaatactttgtggattatggaagtgaaatgattctagagagactgttgaacctcgtgcccacttacatccctgacagggagatcacccctctgaagacgcttgaaaagtgggcccagctagccatagccgctcacaaaaagggaatatacgcgcagcgaaggactgatgcccagaaggtgaaagaggacgtggtgtcctatgcaaggtttaagtggccactcctgtttagtaggttctatgaagcttacaaatttagcgggcctagcctccctaagaacgacgtgattgtggccgtgaattggactggcgtgtactttgtcgatgaacaggagcaggtgctcttagagctatcttttccagaaatcatggccgtcagctcaagtcggggagcaaagaccaccgccccaagtttcactctggccactattaaaggcgatgagtatacatttacgagctccaatgctgaggatatacgcgatctggtcgtgacatttctcgagggcctgcgcaagaggtccaaatatgtggtggcactacaggataaccccaatcccgcaggagaggagtccggatttctctcattcgctaagggagacctgattatcctcgatcacgacaccggggagcaggtgatgaattccggatgggctaacggtattaacgagcgtactaagcaacgcggagacttccctactgacagtgtatacgttatgcccaccgtcacgatgccccctcgtgagattgttgcgctcgtgaccatgacgccagaccagcgacaggatgtcgtccgcctcttgcagctgaggacagccgaaccagaggtcagagctaaaccctatactctggaggagttttcatatgactacttccgccctcctcctaaacatactttgagtcgggtcatggtgtctaaggcacggggaaaagatcggctgtggtcccacacccgtgaacctctaaagcaggctctgttaaaaaaattgttgggctctgaggaactgtcacaggaagcttgcctcgcctttatcgccgttctgaagtacatgggagactacccatccaagcggacccgcagcgtaaacgaactgaccgaccagattttcgaaggacctttaaaggccgaaccgctgaaagatgaggcttacgttcagattctgaagcaactcactgataatcacataagatactcagaggagaggggttgggaacttctgtggctttgtacgggcctgtttcccccttccaatattctgctgcctcacgttcaacgatttctacaatctcggaagcattgcccattggcaattgactgcctccagcgactgcagaaggcccttcggaatggctctcggaaataccctcctcatttggtcgaggtagaagcaatccaacacaagactacccagatctttcataaagtttactttccggatgatacagacgaggcctttgaagttgaatcgtcaaccaaagccaaagatttttgtcagaatattgctacccggctgttgctcaagtcatctgaaggcttcagcctgttcgtgaaaatcgctgacaaggtcttaagtgtgcccgagaacgacttcttcttcgacttcgtgagacatctcacagactggataaagaaagctcgccctattaaggacgggatagtgccttcactaacctaccaagtcttcttcatgaaaaaactgtggactacaaccgttcccggaaaggaccccatggcagacagcatcttccattattaccaggaacttcctaagtacttacggggataccacaaatgcactcgggaagaggttcttcagcttggcgctttgatctatagagtcaagtttgaagaggacaaatcatatttcccctctattcctaaacttttgcgagagttggtgccgcaggacctgattaggcaggtctcccctgacgactggaagcggtcaattgtggcctattttaataaacacgccggaaagtcaaaggaggaagctaagttggctttcctgaaacttatctttaagtggcccacgttcggatcggccttttttgaagtgaaagtgcatcatggactgctaagagcggaagaagagggaaatagagcgctcatcaaacaccgggactcatctttgggactctgggagcgtgccatggctctggacacgtgcccgggagagggcagaagggccgctccctcagccttgtcacaactctctgtgctggctggggtgtctcctggcgacaggggaacgcggagatcaagcgcatggcagtggcggcaaacttgcaagcaggcaggagtgatggaggatgggctgtgttctgataccggcgaaccctcaccaaggtggcaaagcagcgggggaagtgcagggtgcgagaaggcgagctag

SEQ ID NO: 342145 - DNA, 2532 bp, Artificial Sequence
  derived and/or modified sequence
ggcctgagcgtgcagtggctgctggacggcctggcctgcttcttcgccagcctgcacgtgcccctgggcagagtgcagctgcacgccagcgccagaggcatccaggagaaggaggacgacctggccgagctggccagccagcagtacttcgtggactacggcagcgagatgatcctggagagactgctgaacctggtgcccacctacatccccgacagagagatcacccccctgaagaccctggagaagtgggcccagctggccatcgccgcccacaagaagggcatctacgcccagagaagaaccgacgcccagaaggtgaaggaggacgtggtgagctacgccagattcaagtggcccctgctgttcagcagattctacgaggcctacaagttcagcggccccagcctgcccaagaacgacgtgatcgtggccgtgaactggaccggcgtgtacttcgtggacgagcaggagcaggtgctgctggagctgagcttccccgagatcatggccgtgagcagcagcagaggcgccaagaccaccgcccccagcttcaccctggccaccatcaagggcgacgagtacaccttcaccagcagcaacgccgaggacatcagagacctggtggtgaccttcctggagggcctgagaaagagaagcaagtacgtggtggccctgcaggacaaccccaaccccgccggcgaggagagcggcttcctgagcttcgccaagggcgacctgatcatcctggaccacgacaccggcgagcaggtgatgaacagcggctgggccaacggcatcaacgagagaaccaagcagagaggcgacttccccaccgacagcgtgtacgtgatgcccaccgtgaccatgccccccagagagatcgtggccctggtgaccatgacccccgaccagagacaggacgtggtgagactgctgcagctgagaaccgccgagcccgaggtgagagccaagccctacaccctggaggagttcagctacgactacttcagacccccccccaagcacaccctgagcagagtgatggtgagcaaggccagaggcaaggacagactgtggagccacaccagagagcccctgaagcaggccctgctgaagaagctgctgggcagcgaggagctgagccaggaggcctgcctggccttcatcgccgtgctgaagtacatgggcgactaccccagcaagagaaccagaagcgtgaacgagctgaccgaccagatcttcgagggccccctgaaggccgagcccctgaaggacgaggcctacgtgcagatcctgaagcagctgaccgacaaccacatcagatacagcgaggagagaggctgggagctgctgtggctgtgcaccggcctgttcccccccagcaacatcctgctgccccacgtgcagagattcctgcagagcagaaagcactgccccctggccatcgactgcctgcagagactgcagaaggccctgagaaacggcagcagaaagtaccccccccacctggtggaggtggaggccatccagcacaagaccacccagatcttccacaaggtgtacttccccgacgacaccgacgaggccttcgaggtggagagcagcaccaaggccaaggacttctgccagaacatcgccaccagactgctgctgaagagcagcgagggcttcagcctgttcgtgaagatcgccgacaaggtgctgagcgtgcccgagaacgacttcttcttcgacttcgtgagacacctgaccgactggatcaagaaggccagacccatcaaggacggcatcgtgcccagcctgacctaccaggtgttcttcatgaagaagctgtggaccaccaccgtgcccggcaaggaccccatggccgacagcatcttccactactaccaggagctgcccaagtacctgagaggctaccacaagtgcaccagagaggaggtgctgcagctgggcgccctgatctacagagtgaagttcgaggaggacaagagctacttccccagcatccccaagctgctgagagagctggtgccccaggacctgatcagacaggtgagccccgacgactggaagagaagcatcgtggcctacttcaacaagcacgccggcaagagcaaggaggaggccaagctggccttcctgaagctgatcttcaagtggcccaccttcggcagcgccttcttcgaggtgaaggtgcaccacggcctgctgagagccgaggaggagggcaacagagccctgatcaagcacagagacagcagcctgggcctgtgggagagagccatggccctggacacctgccccggcgagggcagaagagccgcccccagcgccctgagccagctgagcgtgctggccggcgtgagccccggcgacagaggcaccagaagaagcagcgcctggcagtggagacagacctgcaagcaggccggcgtgatggaggacggcctgtgcagcgacaccggcgagcccagccccagatggcagagcagcggcggcagcgccggctgcgagaaggccagctag

SEQ ID NO: 342146 - DNA, 210 bp, Artificial Sequence
  derived and/or modified sequence
atgatggtgctgacccccttctggctgggccgggactgccccagccggggccagcccaccctgcgggagggcaagggcctgtctgtgcccttcacctgcaagctgaacaacccccagcgctacctgctgtacctgacccacaccccccggcggcagtacagccctgcctggtacctgcccgggaagctgggcatcaccctgactgtgtag

SEQ ID NO: 342147 - DNA, 228 bp, Artificial Sequence
  derived and/or modified sequence
atgactttacacgctactcggggcgcggcactgctgagctgggtcaattcactgcatgtggccgatcccgtggaggccgtcctgcagctgcaggactgtagtattttcatcaaaattatcgacagaattcatggcacagaagagggccagcagattttaaaacagcccgtctcagagcgcctagacttcgtctgtagtttcctccagaaaaatcgtaagcacccttag

SEQ ID NO: 342148 - DNA, 276 bp, Artificial Sequence
  derived and/or modified sequence
atgaccttgcacgccactagaggggccgctttactatcatgggtcaacagcttacacgtggccgatcctgtggaagcggtgcttcaacttcaagattgctctatctttattaaaatcatcgataggattcacgggaccgaagagggccagcagatcctcaagcagcccgtcagcgagagactggatttcgtgtgtagtttcttgcaaaaaaaccgtaagcaccctagtagcccggagtgcctggtcagtgcacaaaaggttctggaaggaagctag

SEQ ID NO: 342149 - DNA, 330 bp, Artificial Sequence
  derived and/or modified sequence
atgaccctgcacgcaaccagaggagccgccctcctgtcctgggtaaattccctccacgtggctgatccagtagaagccgtcctccagcttcaggattgctctatttttatcaagatcatcgaccgcatccatggaacggaagaggggcagcaaatacttaagcagcccgtgtcagagcggctggattttgtatgcagtttcctgcagaagaaccgaaaacatccttcttccccagaatgtctcgtgtcagcccagaaagttctcgagggaagcgagctggaactggccaagatgacaatgttactgctgtatcatagcaccatgagttag

SEQ ID NO: 342150 - DNA, 186 bp, Artificial Sequence
  derived and/or modified sequence
atgacattacatgccacgcggggtgccgcattactgtcctgggtgaattcccttcacgtggctgatccagtcgaagccgttctgcaattgcaggattgttctatctttataaaaatcattgacaggatccacgggacggaggagggacagcaaatcctgaagcaaccagtgtccgagaggctatag

SEQ ID NO: 342151 - DNA, 180 bp, Artificial Sequence
  derived and/or modified sequence
atgaccctgcacgcaacacggggagcagcactcctatcatgggtcaacagcctgcacgtggctgatccagttgaggcagttctccaactccaggactgctccatatttatcaagattatcgatcgcattcacgggacggaagaagggcagcagattctgaagcagcctgtatccgagtag

SEQ ID NO: 342152 - DNA, 441 bp, Artificial Sequence
  derived and/or modified sequence
atgacactgcacgctacacgtggagccgccctgttatcttgggtgaattcactgcacgtggccgaccccgttgaagccgttctgcagctgcaagactgctccatttttataaagatcatcgatagaattcacgggactgaggagggtcagcagatcctaaagcaacccgtttccgagagactagactttgtgtgcagcttcctccagaagaatcgcaagcaccccagttcccccgaatgtctggtgtctgctcagaaggttcttgagggttcagaactggagctcgcaaaaatgaccatgctcttgctgtaccacagtactatgtcctctaagagtccgcgagattgggagcagtttgagtataaaatccaggctgagttagccgtgatcctcaaattcgtgctggatcacgaggacggactcaatctcaacgaagactag

SEQ ID NO: 342153 - DNA, 480 bp, Artificial Sequence
  derived and/or modified sequence
atgactctgcatgccacccgaggcgcagcactcctgtcatgggtaaactctcttcacgtggcagaccccgtggaggccgttcttcagctgcaggattgcagcatcttcatcaagattattgacaggatacacggcaccgaagagggccaacagattctcaaacagcctgtaagtgagcgcttggatttcgtatgcagttttctccagaagaatcggaagcatcccagctctcccgaatgtcttgtgtcagcccagaaagtgctggaggggagcgagttggagttagctaaaatgaccatgctcctgttgtatcattccacaatgtcgagcaagagtcccagagactgggaacagttcgaatataaaattcaggctgagctcgccgttatactgaaatttgtactcgaccacgaagatggcctgaacttgaacgaggacctcgagaactttctgcaaaaggcccctgttccatcaacatag

SEQ ID NO: 342154 - DNA, 219 bp, Artificial Sequence
  derived and/or modified sequence
atgacactgcacgctaccaggggcgccgccctactatcatgggtaaacagcctgcatgtggctgacccagttgaggcagtgctgcaactgcaggattgttctatcttcataaagatcattgacagaattcatggcaccgaggaagggcaacagattctcaaacagcccgttagcgagagactggactttgtgtgttcatttctgcagaagaatagatag

SEQ ID NO: 342155 - DNA, 252 bp, Artificial Sequence
  derived and/or modified sequence
atgacgctgcatgcgacccggggagcggccctcttgtcatgggtgaacagcctccacgtggccgatcccgtggaggccgtgcttcaactgcaggattgctctatatttattaaaatcatcgaccgtatccacggtacagaggaaggccagcaaattctaaaacagcctgtgtcagagcggctggacttcgtatgtagttttctgcagaagaatcggaaacacccgtcgtcccctgaatgtctggtttcttag

SEQ ID NO: 342156 - DNA, 525 bp, Artificial Sequence
  derived and/or modified sequence
atgaccctacatgctaccagaggcgcggctctgttaagctgggtgaattccctgcacgttgctgacccagtggaagccgtcttgcaactgcaagactgcagcatttttattaagatcatcgaccggattcatgggacggaagaggggcagcaaattctgaagcaacccgtgtccgagaggttagattttgtttgtagcttcctgcagaagaacaggaaacatccttcaagccccgagtgtctggtgagcgcccagaaggtgctggagggctcagagctcgaacttgcaaagatgacaatgctgcttttgtatcatagcaccatgagtagtaagtcccctcgagactgggaacagtttgaatacaagatacaagccgaactggccgtgattttaaagtttgtgctggatcacgaggatggactgaatcttaatgaggaccttgaaaacttcttgcagaaggcgcctgttccctccacctgcagctctacattccctgaagagctgagtccgccctcccaccagtag

SEQ ID NO: 342157 - DNA, 480 bp, Artificial Sequence
  derived and/or modified sequence
atgaccctgcacgccacgagaggggctgccttgctgagctgggttaactctcttcacgtggccgacccagtcgaagccgtgttgcaactccaggattgctccattttcatcaagatcattgataggatccatggaacggaagaggggcaacagatcctgaagcagccagtctctgagcgactggacttcgtgtgttcctttctgcagaagaaccgaaaacacccatcatcccccgaatgtcttgtgagcgcccagaaggtgttggagggaagtgagctcgaactggcaaaaatgaccatgctgctgctctatcactccacgatgtcatcgaagtcgcctcgcgattgggagcaatttgaatataagatccaggccgaactggcagtcatcctgaagtttgttcttgatcacgaggacggcttgaacttaaacgaggacctggaaaattttctgcaaaaggcgccagtgccctcaacctag

SEQ ID NO: 342158 - DNA, 171 bp, Artificial Sequence
  derived and/or modified sequence
atgacactgcatgcaacaagaggggctgcgttactgtcatgggtgaactctttgcatgtcgcagatccagtggaagccgttctgcagttacaggactgttccatcttcattaagatcatcgaccgcatacacgggactgaggaaggacagcagatacttaagcaaccctag

SEQ ID NO: 342159 - DNA, 228 bp, Artificial Sequence
  derived and/or modified sequence
atgaccctgcacgccaccagaggagctgccctgctgtcctgggtgaacagcctgcacgtggccgaccctgtggaggccgtgctgcagctgcaggactgcagcatcttcatcaagatcatcgaccgcatccacggcacagaggagggccagcagatcctgaagcagcctgtgtctgagcggctggactttgtgtgcagcttcctgcagaagaacaggaagcacccctag

SEQ ID NO: 342160 - DNA, 276 bp, Artificial Sequence
  derived and/or modified sequence
atgaccctgcacgccaccagaggagctgccctgctgtcctgggtgaacagcctgcacgtggccgaccctgtggaggccgtgctgcagctgcaggactgcagcatcttcatcaagatcatcgaccgcatccacggcacagaggagggccagcagatcctgaagcagcctgtgtctgagcggctggactttgtgtgcagcttcctgcagaagaacaggaagcaccccagcagcccagaatgtctggtgtctgcccagaaggtgctggagggcagctag

SEQ ID NO: 342161 - DNA, 330 bp, Artificial Sequence
  derived and/or modified sequence
atgaccctgcacgccaccagaggagctgccctgctgtcctgggtgaacagcctgcacgtggccgaccctgtggaggccgtgctgcagctgcaggactgcagcatcttcatcaagatcatcgaccgcatccacggcacagaggagggccagcagatcctgaagcagcctgtgtctgagcggctggactttgtgtgcagcttcctgcagaagaacaggaagcaccccagcagcccagaatgtctggtgtctgcccagaaggtgctggagggcagcgagctggagctggccaagatgaccatgctgctgctgtaccacagcaccatgtcctag

SEQ ID NO: 342162 - DNA, 186 bp, Artificial Sequence
  derived and/or modified sequence
atgaccctgcacgccaccagaggagctgccctgctgtcctgggtgaacagcctgcacgtggccgaccctgtggaggccgtgctgcagctgcaggactgcagcatcttcatcaagatcatcgaccgcatccacggcacagaggagggccagcagatcctgaagcagcctgtgtctgagcggctgtag

SEQ ID NO: 342163 - DNA, 180 bp, Artificial Sequence
  derived and/or modified sequence
atgaccctgcacgccaccagaggagctgccctgctgtcctgggtgaacagcctgcacgtggccgaccctgtggaggccgtgctgcagctgcaggactgcagcatcttcatcaagatcatcgaccgcatccacggcacagaggagggccagcagatcctgaagcagcctgtgtctgagtag

SEQ ID NO: 342164 - DNA, 441 bp, Artificial Sequence
  derived and/or modified sequence
atgaccctgcacgccaccagaggagctgccctgctgtcctgggtgaacagcctgcacgtggccgaccctgtggaggccgtgctgcagctgcaggactgcagcatcttcatcaagatcatcgaccgcatccacggcacagaggagggccagcagatcctgaagcagcctgtgtctgagcggctggactttgtgtgcagcttcctgcagaagaacaggaagcaccccagcagcccagaatgtctggtgtctgcccagaaggtgctggagggcagcgagctggagctggccaagatgaccatgctgctgctgtaccacagcaccatgagcagcaagagcccccgggactgggagcagtttgagtacaagatccaggccgagctggccgtcatcctgaagtttgtgctggaccatgaagatggcctgaacctgaatgaagattag

SEQ ID NO: 342165 - DNA, 480 bp, Artificial Sequence
  derived and/or modified sequence
atgaccctgcacgccaccagaggagctgccctgctgtcctgggtgaacagcctgcacgtggccgaccctgtggaggccgtgctgcagctgcaggactgcagcatcttcatcaagatcatcgaccgcatccacggcacagaggagggccagcagatcctgaagcagcctgtgtctgagcggctggactttgtgtgcagcttcctgcagaagaacaggaagcaccccagcagcccagaatgtctggtgtctgcccagaaggtgctggagggcagcgagctggagctggccaagatgaccatgctgctgctgtaccacagcaccatgagcagcaagagcccccgggactgggagcagtttgagtacaagatccaggccgagctggccgtcatcctgaagtttgtgctggaccatgaagatggcctgaacctgaatgaagacctggagaacttcctgcagaaggcccctgtgcccagcacctag

SEQ ID NO: 342166 - DNA, 219 bp, Artificial Sequence
  derived and/or modified sequence
atgaccctgcacgccaccagaggagctgccctgctgtcctgggtgaacagcctgcacgtggccgaccctgtggaggccgtgctgcagctgcaggactgcagcatcttcatcaagatcatcgaccgcatccacggcacagaggagggccagcagatcctgaagcagcctgtgtctgagcggctggactttgtgtgcagcttcctgcagaagaacagatag

SEQ ID NO: 342167 - DNA, 252 bp, Artificial Sequence
  derived and/or modified sequence
atgaccctgcacgccaccagaggagctgccctgctgtcctgggtgaacagcctgcacgtggccgaccctgtggaggccgtgctgcagctgcaggactgcagcatcttcatcaagatcatcgaccgcatccacggcacagaggagggccagcagatcctgaagcagcctgtgtctgagcggctggactttgtgtgcagcttcctgcagaagaacaggaagcaccccagcagcccagaatgtctggtgtcctag

SEQ ID NO: 342168 - DNA, 525 bp, Artificial Sequence
  derived and/or modified sequence
atgaccctgcacgccaccagaggagctgccctgctgtcctgggtgaacagcctgcacgtggccgaccctgtggaggccgtgctgcagctgcaggactgcagcatcttcatcaagatcatcgaccgcatccacggcacagaggagggccagcagatcctgaagcagcctgtgtctgagcggctggactttgtgtgcagcttcctgcagaagaacaggaagcaccccagcagcccagaatgtctggtgtctgcccagaaggtgctggagggcagcgagctggagctggccaagatgaccatgctgctgctgtaccacagcaccatgagcagcaagagcccccgggactgggagcagtttgagtacaagatccaggccgagctggccgtcatcctgaagtttgtgctggaccatgaagatggcctgaacctgaatgaagacctggagaacttcctgcagaaggcccctgtgcccagcacctgcagcagcaccttccctgaggagctgagcccccccagccaccagtag

SEQ ID NO: 342169 - DNA, 171 bp, Artificial Sequence
  derived and/or modified sequence
atgaccctgcacgccaccagaggagctgccctgctgtcctgggtgaacagcctgcacgtggccgaccctgtggaggccgtgctgcagctgcaggactgcagcatcttcatcaagatcatcgaccgcatccacggcacagaggagggccagcagatcctgaagcagccctag

SEQ ID NO: 342170 - DNA, 228 bp, Artificial Sequence
  derived and/or modified sequence
atgaccctgcacgccacccggggcgccgccctgctgagctgggtgaatagcctccatgtcgctgacccagtcgaggccgtgttacagctgcaggactgtagcatcttcatcaagattattgatcgcattcacggtacagaagagggccagcagatcctgaaacagcccgtgtcggaacgcctggatttcgtctgttcgttcttgcaaaaaaataggaaacacccctag

SEQ ID NO: 342171 - DNA, 276 bp, Artificial Sequence
  derived and/or modified sequence
atgaccctgcacgccacccggggcgccgccctgctgagctgggtgaacagcctacacgtcgccgaccctgtggaggctgtgttgcaattacaggactgtagcattttcattaaaataatcgaccggatccacggcactgaggaggggcagcagattttaaaacagcccgtcagtgagcgcctagacttcgtttgctcctttttacagaagaatcggaaacacccgtcttctcccgagtgtttggtgtccgcacagaaggtgttggagggtagttag

SEQ ID NO: 342172 - DNA, 330 bp, Artificial Sequence
  derived and/or modified sequence
atgaccctgcacgccacccggggcgccgccctgctgagctgggtgaacagcttacacgtcgcggatcccgtcgaagccgtactgcaactccaagattgttcaatcttcattaaaatcatcgataggattcacggtaccgaggaggggcagcagattctgaaacagcctgttagcgagcgccttgacttcgtctgtagctttctgcagaagaatagaaagcaccccagttcacccgagtgtctcgtgtctgctcaaaaggtgctggagggatcggaactggaacttgcgaaaatgaccatgcttctcttatatcactccacaatgagctag

SEQ ID NO: 342173 - DNA, 186 bp, Artificial Sequence
  derived and/or modified sequence
atgaccctgcacgccacccggggcgccgccctgctgagctgggtgaactcactccacgttgccgatcccgtcgaagctgtgctgcagttgcaggattgtagtatcttcataaagattatcgatcgcatccatggcaccgaagagggccagcagattctgaaacagcccgtgagtgagaggctgtag

SEQ ID NO: 342174 - DNA, 180 bp, Artificial Sequence
  derived and/or modified sequence
atgaccctgcacgccacccggggcgccgccctgctgagctgggtgaacagcctccacgtcgcggatcctgtggaggcagtgctgcagctccaggactgctctatcttcattaaaattatcgaccgcatccacgggaccgaggagggacagcagattctgaagcagccggtttctgaatag

SEQ ID NO: 342175 - DNA, 441 bp, Artificial Sequence
  derived and/or modified sequence
atgaccctgcacgccacccggggcgccgccctgctgagctgggtgaatagtttacatgtagcggatccggtggaggctgtactgcagctgcaagattgctctatcttcattaaaattatagatcgcattcatggaactgaagaagggcagcagatactgaaacagcccgtaagcgagcgactggacttcgtgtgctcttttcttcaaaagaacaggaaacacccgtcttcaccagaatgtctagtgtccgctcagaaggtcctcgagggctcagagctggaattggccaagatgactatgctcctgctctaccattccacaatgtccagcaagagtccccgcgattgggagcagtttgaatacaaaatccaagccgaacttgctgtgattctgaaatttgtgctggatcacgaggatggactcaatttgaacgaagattag

SEQ ID NO: 342176 - DNA, 480 bp, Artificial Sequence
  derived and/or modified sequence
atgaccctgcacgccacccggggcgccgccctgctgagctgggtgaattccttacatgtggccgatccagttgaagctgttctgcagcttcaggattgctccattttcataaagattatcgacagaatacacggaacagaggaggggcagcaaatattaaagcagccagtcagcgaacggttagactttgtttgcagttttctccagaaaaaccgcaagcacccgtcatcaccagagtgtcttgtgagtgcacagaaggtgctcgagggatccgagctggagctcgccaagatgacaatgctcctgttgtatcattcgacgatgagtagcaagtctccacgagactgggagcagttcgaatacaaaatacaggctgaactggccgtgatcctcaagttcgttcttgaccacgaggacggtcttaacctcaacgaagacctcgagaactttctgcagaaggcccccgtgcccagcacctag

SEQ ID NO: 342177 - DNA, 219 bp, Artificial Sequence
  derived and/or modified sequence
atgaccctgcacgccacccggggcgccgccctgctgagctgggtgaatagcctacatgtggccgacccagtggaagctgtcctccagctccaggattgctctatcttcataaaaattatagaccgtatccatggtacagaggagggccagcagatcctaaaacaacccgtgtccgaacgactggatttcgtctgcagttttttacagaaaaaccggtag

SEQ ID NO: 342178 - DNA, 252 bp, Artificial Sequence
  derived and/or modified sequence
atgaccctgcacgccacccggggcgccgccctgctgagctgggtgaactccctccacgttgccgatcccgtggaggccgttcttcagctacaggattgtagcatctttatcaaaatcattgaccgcatccatgggacagaagaaggtcaacaaatcctaaagcagccggtgtccgaacggctggattttgtatgtagtttcctacaaaagaacaggaagcaccccagttccccagaatgtcttgtgtcatag

SEQ ID NO: 342179 - DNA, 525 bp, Artificial Sequence
  derived and/or modified sequence
atgaccctgcacgccacccggggcgccgccctgctgagctgggtgaacagtttgcacgttgcagacccagtggaggcggtgctgcaactccaggattgttcaatatttatcaagatcatcgaccgcatccacggcacagaggaaggacagcagatcttgaagcagcccgtgagcgaaagactggactttgtttgtagcttcctacagaaaaatcgcaagcaccccagcagccccgaatgcctggtgtctgctcaaaaagtgctggagggatcagagttggaactcgctaagatgacgatgcttcttctgtaccacagcacaatgtcatcaaaaagcccacgagactgggaacagttcgagtataagattcaagccgagctagctgtgatcttgaaattcgtactggatcatgaagacggcctgaatctcaatgaggatctcgaaaatttcttgcagaaggcacccgtccccagtacatgttcatccaccttccctgaggaactctcacccccgagtcatcagtag

SEQ ID NO: 342180 - DNA, 480 bp, Artificial Sequence
  derived and/or modified sequence
atgaccctgcacgccacccggggcgccgccctgctgagctgggtgaactcccttcatgtggccgacccagtggaagcggtcttgcagctccaggattgctcgattttcattaagatcatcgatcgcatccatggtacggaggaggggcagcagattcttaagcagcccgtctctgagcgcttggatttcgtctgctcattccttcagaagaaccggaagcacccctcctctcctgagtgccttgtgtcagcccagaaggtgcttgaaggttccgagctggaacttgcaaagatgaccatgctcctgttataccacagcaccatgagcagcaagagcccaagggactgggaacaattcgaatataaaatccaagccgagctggctgtcatactaaaatttgtcctggaccatgaagatggcttaaatctgaatgaggacctggagaacttcctccagaaggctccggtgcccagcacctag

SEQ ID NO: 342181 - DNA, 171 bp, Artificial Sequence
  derived and/or modified sequence
atgaccctgcacgccacccggggcgccgccctgctgagctgggtgaactcactgcacgtagcagatccggtggaagcagttctgcaacttcaggattgttcgatattcatcaagattattgaccgaattcatggcaccgaggagggccagcaaatactcaagcaaccctag

SEQ ID NO: 342182 - DNA, 606 bp, Artificial Sequence
  derived and/or modified sequence
tcttcctgctctgccactgactcaccccgttgacctggcctgcatggcttcccttctgcttgctgtctgatccacagaacgctggggttgcccaggataatgtgaggctgagctcactaagagtgggtgggttaggggaatgaataatcattcctgtccctttgccccttccctaggtggaaactaattctaagccagactgctggagatcaccctgttctagtgtgtggaggcttccaccaggaggcgcattggagtgactgtctggcatcaccaagatgacactccacgccacccggggggctgcactcctctcttgggtgaacagtctacacgtggctgaccctgtggaggctgtgctgcagctccaggactgcagcatcttcatcaagatcattgacagaatccatggcactgaagagggacagcaaatcttgaagcagccggtgtcagagagactggactttgtgtgcagttttctgcagaaaaatcgaaaacatccctcttccccagaatgcctggtatctgcacagaaggtgctagagggatcagagctggaactggcgaagatgaccatgctgctcttataccactctaccatgagct

SEQ ID NO: 342183 - DNA, 576 bp, Artificial Sequence
  derived and/or modified sequence
agatgtcagcatgtttttgttcagagaaggaaagcgtgtttgcctgcacgttgagctgtagagacagctcaggagagggcttcaccatttctgcgtgaggccgtgggcgcattggagtgactgtctggcatcaccaagatgacactccacgccacccggggggctgcactcctctcttgggtgaacagtctacacgtggctgaccctgtggaggctgtgctgcagctccaggactgcagcatcttcatcaagatcattgacagaatccatggcactgaagagggacagcaaatcttgaagcagccggtgtcagagagactggactttgtgtgcagttttctgcagaaaaatcgaaaacatccctcttccccagaatgcctggtatctgcacagaaggtgctagagggatcagagctggaactggcgaagatgaccatgctgctcttataccactctaccatgagctccaaaagtcccagggactgggaacagtttgaatataaaattcaggctgagttggctgtcattcttaaatttgtgctggaccatgaggacgggctaaaccttaatgaggac

SEQ ID NO: 342184 - DNA, 582 bp, Artificial Sequence
  derived and/or modified sequence
ggatttagtgggtggccgtgtcccagagcagggcaggcggtgcccatggaaggtggcagggcgctttgtgtgcgcattggagtgactgtctggcatcaccaagatgacactccacgccacccggggggctgcactcctctcttgggtgaacagtctacacgtggctgaccctgtggaggctgtgctgcagctccaggactgcagcatcttcatcaagatcattgacagaatccatggcactgaagagggacagcaaatcttgaagcagccggtgtcagagagactggactttgtgtgcagttttctgcagaaaaatcgaaaacatccctcttccccagaatgcctggtatctgcacagaaggtgctagagggatcagagctggaactggcgaagatgaccatgctgctcttataccactctaccatgagctccaaaagtcccagggactgggaacagtttgaatataaaattcaggctgagttggctgtcattcttaaatttgtgctggaccatgaggacgggctaaaccttaatgaggacctagagaacttcctacagaaagctcctgtgccttctacctg

SEQ ID NO: 342185 - DNA, 874 bp, Artificial Sequence
  derived and/or modified sequence
ttttgttttcagccatgtaggagaagcagagtctacaagtccccgtgcctgcgtctgttaagggctgcagccagtgcctggcgtactcggtctcgtgccttggcccctcagcccctccccataaatgctcagcggaacaggggattaggttctggcagcacagctgggattttggcggccattccacagccgacaatagcacgcagcacaggacagcgcaggcctgtactccagggccagaatctgcctgggcttcttgtttgggtggcggagggggaggagcgggcacagcacggcatcctggccttgccacgcagaaggcgcattggagtgactgtctggcatcaccaagatgacactccacgccacccggggggctgcactcctctcttgggtgaacagtctacacgtggctgaccctgtggaggctgtgctgcagctccaggactgcagcatcttcatcaagatcattgacagaatccatggcactgaagagggacagcaaatcttgaagcagccggtgtcagagagactggactttgtgtgcagttttctgcagaaaaatcgaaaacatccctcttccccagaatgcctggtatctgcacagaaggtgctagagggatcagagctggaactggcgaagatgaccatgctgctcttataccactctaccatgagctccaaaagtcccagggactgggaacagtttgaatataaaattcaggctgagttggctgtcattcttaaatttgtgctggaccatgaggacgggctaaaccttaatgaggacctagagaacttcctacagaaagctcctgtgccttctacctgttctagcacattccctgaagagctctccccacctagccaccag

SEQ ID NO: 342186 - DNA, 600 bp, Artificial Sequence
  derived and/or modified sequence
ggatgtgagtgtctctcagatggggagtatctttctaagaaaggggtacagagcatggaattcttaggctacaggcaggcagcgtctcagggcgcattggagtgactgtctggcatcaccaagatgacactccacgccacccggggggctgcactcctctcttgggtgaacagtctacacgtggctgaccctgtggaggctgtgctgcagctccaggactgcagcatcttcatcaagatcattgacagaatccatggcactgaagagggacagcaaatcttgaagcagccggtgtcagagagactggactttgtgtgcagttttctgcagaaaaatcgaaaacatccctcttccccagaatgcctggtatctgcacagaaggtgctagagggatcagagctggaactggcgaagatgaccatgctgctcttataccactctaccatgagctccaaaagtcccagggactgggaacagtttgaatataaaattcaggctgagttggctgtcattcttaaatttgtgctggaccatgaggacgggctaaaccttaatgaggacctagagaacttcctacagaaagctcctgtgccttctacc

SEQ ID NO: 342187 - DNA, 228 bp, Artificial Sequence
  derived and/or modified sequence
atgactctccacgcgacacgcggagctgcccttctatcttgggtgaactctctccacgtcgcagatcccgtggaggctgtactgcagctccaggactgcagcatctttatcaaaattatcgatcggattcacggcacggaagaaggacaacagatactcaaacagcctgtctcagagcgcctggattttgtgtgcagctttcttcagaaaaacaggaaacacccctag

SEQ ID NO: 342188 - DNA, 276 bp, Artificial Sequence
  derived and/or modified sequence
atgacattgcacgctactagaggagccgctctgctgtcatgggtgaacagcctgcatgtggctgatccagtggaagccgtattacagctacaggactgtagcatctttattaaaattattgataggatacacggtaccgaagaaggccagcagattcttaaacagcctgtgtctgaacgccttgattttgtgtgtagctttctgcagaagaaccggaaacacccgtcctcccctgagtgcctcgtctcagcccagaaggtgctggaagggtcttag

SEQ ID NO: 342189 - DNA, 330 bp, Artificial Sequence
  derived and/or modified sequence
atgaccctccacgcaacccgtggagctgcacttctatcttgggtgaattcactgcacgtagctgacccggtggaggccgtcctgcagctgcaggattgttccatcttcattaagatcatcgatcgaatccacggaaccgaagaggggcagcagatcctaaagcagcccgtaagtgagcgactcgacttcgtgtgcagcttcctgcagaagaatcgcaaacatccctccagccctgaatgccttgtgagtgcccaaaaggtgctggaagggagcgagctcgaactggctaagatgactatgctcctgctttaccattcgaccatgagttag

SEQ ID NO: 342190 - DNA, 186 bp, Artificial Sequence
  derived and/or modified sequence
atgacactgcatgccactcggggtgccgcactgctctcttgggtaaatagtctgcatgtggccgatcctgtcgaagctgtgcttcagctgcaagattgcagtattttcatcaagataattgaccgcattcacggaaccgaagaaggtcagcaaattctgaaacagcctgttagcgagaggctatag

SEQ ID NO: 342191 - DNA, 180 bp, Artificial Sequence
  derived and/or modified sequence
atgactctgcacgcaacacgcggagccgcactcctgagttgggtaaactccctgcacgtagccgatcctgtcgaagccgtcctgcaactgcaagactgcagcatcttcatcaagatcatcgatcgcatccacggaaccgaggaaggacagcagatcttgaaacagccggtaagcgagtag

SEQ ID NO: 342192 - DNA, 441 bp, Artificial Sequence
  derived and/or modified sequence
atgactctgcacgctacccggggtgccgctctgctgtcctgggttaattcgctccacgtggccgatccagtcgaggcagtcctgcaattacaagactgctctatttttattaaaattatcgacaggatccacggtacagaggaaggccaacagatccttaaacagccagtgagcgaacgcctcgacttcgtatgcagtttcctacaaaagaataggaagcacccttccagccccgagtgccttgtgtctgcccagaaggtgctggaaggatccgagctggagctggctaaaatgactatgcttctgttataccatagtaccatgagcagtaaatcacccagagattgggagcagttcgaatacaaaattcaggcagagctggctgtcatcctgaaattcgtgctggatcatgaagacggcttgaatctgaacgaggattag

SEQ ID NO: 342193 - DNA, 480 bp, Artificial Sequence
  derived and/or modified sequence
atgaccctgcacgctactcgcggagcggctctactgagctgggtaaatagcctgcacgtggctgatccggttgaagcagtcctccagcttcaggattgttctatctttatcaagattatcgatcggatccacggcaccgaagagggccagcagatcttgaagcagcctgtttcagagagactggacttcgtatgttccttcctacaaaagaacagaaaacaccctagcagtcctgaatgcttggtgtcagcccagaaagtgttagaggggtctgagctggagctggcaaagatgaccatgttgcttttatatcattctacaatgtcatccaaaagtcctcgggattgggagcagtttgagtacaaaatccaggccgaactggctgtgatcctaaaattcgttctagaccatgaggatggtctgaaccttaacgaagatttagaaaattttctccagaaggctcccgttccaagcacctag

SEQ ID NO: 342194 - DNA, 219 bp, Artificial Sequence
  derived and/or modified sequence
atgaccctccatgcaactcggggtgcggctttgctgagctgggtgaattctcttcatgtggccgatccagtggaggccgtccttcagctacaagactgcagcatcttcataaaaatcatcgatcggatacacggcacagaggagggacagcaaatattgaaacagccagtgtctgagagattagactttgtctgcagttttcttcagaaaaataggtag

SEQ ID NO: 342195 - DNA, 252 bp, Artificial Sequence
  derived and/or modified sequence
atgactctgcatgcgacccgaggagcagctcttctttcctgggtaaacagcttgcacgtggccgatcccgttgaggccgtcctgcagctgcaagattgttccatcttcattaagatcatcgacagaattcatggtactgaggaaggacagcagattctgaaacagcctgtgtctgaacggcttgattttgtgtgctccttcttgcagaagaaccgaaaacacccatcaagcccggaatgccttgtgtcatag

SEQ ID NO: 342196 - DNA, 525 bp, Artificial Sequence
  derived and/or modified sequence
atgactctacacgccactcggggagcagctctgctgagctgggtgaatagcctgcacgtggctgaccccgtcgaagccgtgctgcagttgcaggactgctctattttcataaaaatcattgaccggatacacgggaccgaggagggtcaacagattctgaaacaacctgtcagtgaacgattggacttcgtgtgctccttcctccagaagaacaggaagcatccatccagccccgaatgcctcgtaagtgcgcaaaaggtcctagagggctccgaactggagttggccaagatgactatgttacttctatatcactccaccatgtcctccaaaagcccaagggattgggagcagttcgaatataaaatccaggccgagctggccgtcatactgaagttcgtgctggatcatgaagatggcctgaatctcaatgaggatctcgagaatttcttgcagaaggcccctgtgccttcgacctgttcaagcacattcccagaagaactgtcgcccccttctcaccaatag

SEQ ID NO: 342197 - DNA, 480 bp, Artificial Sequence
  derived and/or modified sequence
atgaccctacacgctacacggggtgcagccctcctgagttgggttaactccctgcacgtagccgaccccgttgaggccgtgctgcagcttcaggactgctcaatttttattaagatcatcgaccggatccatggtaccgaggaggggcagcaaatcctcaagcagccggtgtcggagagactagattttgtgtgctcatttttgcagaaaaatagaaagcaccctagctctccggagtgtctggtgtccgcgcaaaaagtgctcgagggctcagagctcgaactagcaaagatgaccatgttgctgctttatcactctactatgagtagtaagtcccccagagattgggaacagtttgaatataagatccaagctgagctggcagtgatccttaaattcgtgcttgatcatgaggacggattgaacctcaatgaggaccttgaaaacttccttcagaaagcaccagttccctccacatag

SEQ ID NO: 342198 - DNA, 171 bp, Artificial Sequence
  derived and/or modified sequence
atgacacttcacgcgacaagaggagcagctctcctgagctgggtgaactctctgcatgtcgcggatcctgtggaggcagtactacagttgcaggactgctctattttcatcaaaatcatcgaccgtatacatggaacagaagaggggcagcaaatcctgaagcagccttag

SEQ ID NO: 342199 - DNA, 228 bp, Artificial Sequence
  derived and/or modified sequence
atgaccctgcacgccaccagaggcgccgccctgctgagctgggtgaacagcctgcacgtggccgaccccgtggaggccgtgctgcagctgcaggactgcagcatcttcatcaagatcatcgacagaatccacggcaccgaggagggccagcagatcctgaagcagcccgtgagcgagagactggacttcgtgtgcagcttcctgcagaagaacagaaagcacccctag

SEQ ID NO: 342200 - DNA, 276 bp, Artificial Sequence
  derived and/or modified sequence
atgaccctgcacgccaccagaggcgccgccctgctgagctgggtgaacagcctgcacgtggccgaccccgtggaggccgtgctgcagctgcaggactgcagcatcttcatcaagatcatcgacagaatccacggcaccgaggagggccagcagatcctgaagcagcccgtgagcgagagactggacttcgtgtgcagcttcctgcagaagaacagaaagcaccccagcagccccgagtgcctggtgagcgcccagaaggtgctggagggcagctag

SEQ ID NO: 342201 - DNA, 330 bp, Artificial Sequence
  derived and/or modified sequence
atgaccctgcacgccaccagaggcgccgccctgctgagctgggtgaacagcctgcacgtggccgaccccgtggaggccgtgctgcagctgcaggactgcagcatcttcatcaagatcatcgacagaatccacggcaccgaggagggccagcagatcctgaagcagcccgtgagcgagagactggacttcgtgtgcagcttcctgcagaagaacagaaagcaccccagcagccccgagtgcctggtgagcgcccagaaggtgctggagggcagcgagctggagctggccaagatgaccatgctgctgctgtaccacagcaccatgagctag

SEQ ID NO: 342202 - DNA, 186 bp, Artificial Sequence
  derived and/or modified sequence
atgaccctgcacgccaccagaggcgccgccctgctgagctgggtgaacagcctgcacgtggccgaccccgtggaggccgtgctgcagctgcaggactgcagcatcttcatcaagatcatcgacagaatccacggcaccgaggagggccagcagatcctgaagcagcccgtgagcgagagactgtag

SEQ ID NO: 342203 - DNA, 180 bp, Artificial Sequence
  derived and/or modified sequence
atgaccctgcacgccaccagaggcgccgccctgctgagctgggtgaacagcctgcacgtggccgaccccgtggaggccgtgctgcagctgcaggactgcagcatcttcatcaagatcatcgacagaatccacggcaccgaggagggccagcagatcctgaagcagcccgtgagcgagtag

SEQ ID NO: 342204 - DNA, 441 bp, Artificial Sequence
  derived and/or modified sequence
atgaccctgcacgccaccagaggcgccgccctgctgagctgggtgaacagcctgcacgtggccgaccccgtggaggccgtgctgcagctgcaggactgcagcatcttcatcaagatcatcgacagaatccacggcaccgaggagggccagcagatcctgaagcagcccgtgagcgagagactggacttcgtgtgcagcttcctgcagaagaacagaaagcaccccagcagccccgagtgcctggtgagcgcccagaaggtgctggagggcagcgagctggagctggccaagatgaccatgctgctgctgtaccacagcaccatgagcagcaagagccccagagactgggagcagttcgagtacaagatccaggccgagctggccgtgatcctgaagttcgtgctggaccacgaggacggcctgaacctgaacgaggactag

SEQ ID NO: 342205 - DNA, 480 bp, Artificial Sequence
  derived and/or modified sequence
atgaccctgcacgccaccagaggcgccgccctgctgagctgggtgaacagcctgcacgtggccgaccccgtggaggccgtgctgcagctgcaggactgcagcatcttcatcaagatcatcgacagaatccacggcaccgaggagggccagcagatcctgaagcagcccgtgagcgagagactggacttcgtgtgcagcttcctgcagaagaacagaaagcaccccagcagccccgagtgcctggtgagcgcccagaaggtgctggagggcagcgagctggagctggccaagatgaccatgctgctgctgtaccacagcaccatgagcagcaagagccccagagactgggagcagttcgagtacaagatccaggccgagctggccgtgatcctgaagttcgtgctggaccacgaggacggcctgaacctgaacgaggacctggagaacttcctgcagaaggcccccgtgcccagcacctag

SEQ ID NO: 342206 - DNA, 219 bp, Artificial Sequence
  derived and/or modified sequence
atgaccctgcacgccaccagaggcgccgccctgctgagctgggtgaacagcctgcacgtggccgaccccgtggaggccgtgctgcagctgcaggactgcagcatcttcatcaagatcatcgacagaatccacggcaccgaggagggccagcagatcctgaagcagcccgtgagcgagagactggacttcgtgtgcagcttcctgcagaagaacagatag

SEQ ID NO: 342207 - DNA, 252 bp, Artificial Sequence
  derived and/or modified sequence
atgaccctgcacgccaccagaggcgccgccctgctgagctgggtgaacagcctgcacgtggccgaccccgtggaggccgtgctgcagctgcaggactgcagcatcttcatcaagatcatcgacagaatccacggcaccgaggagggccagcagatcctgaagcagcccgtgagcgagagactggacttcgtgtgcagcttcctgcagaagaacagaaagcaccccagcagccccgagtgcctggtgagctag

SEQ ID NO: 342208 - DNA, 525 bp, Artificial Sequence
  derived and/or modified sequence
atgaccctgcacgccaccagaggcgccgccctgctgagctgggtgaacagcctgcacgtggccgaccccgtggaggccgtgctgcagctgcaggactgcagcatcttcatcaagatcatcgacagaatccacggcaccgaggagggccagcagatcctgaagcagcccgtgagcgagagactggacttcgtgtgcagcttcctgcagaagaacagaaagcaccccagcagccccgagtgcctggtgagcgcccagaaggtgctggagggcagcgagctggagctggccaagatgaccatgctgctgctgtaccacagcaccatgagcagcaagagccccagagactgggagcagttcgagtacaagatccaggccgagctggccgtgatcctgaagttcgtgctggaccacgaggacggcctgaacctgaacgaggacctggagaacttcctgcagaaggcccccgtgcccagcacctgcagcagcaccttccccgaggagctgagcccccccagccaccagtag

SEQ ID NO: 342209 - DNA, 171 bp, Artificial Sequence
  derived and/or modified sequence
atgaccctgcacgccaccagaggcgccgccctgctgagctgggtgaacagcctgcacgtggccgaccccgtggaggccgtgctgcagctgcaggactgcagcatcttcatcaagatcatcgacagaatccacggcaccgaggagggccagcagatcctgaagcagccctag

SEQ ID NO: 342210 - protein, 1088 aa, Artificial Sequence
  derived and/or modified sequence
MRLQNALNEQRVEFATLQEALAHALTEKEGKDQELAKLRGLEAAQIKELEELRQTVKQLKEQLAKKEKEHASGSGAQSEAAGRTEPTGPKLEALRAEVSKLEQQCQKQQEQADSLERSLEAERASRAERDSALETLQGQLEEKAQELGHSQSALASAQRELAAFRTKVQDHSKAEDEWKAQVARGRQEAERKNSLISSLEEEVSILNRQVLEKEGESKELKRLVMAESEKSQKLEERLRLLQAETASNSARAAERSSALREEVQSLREEAEKQRVASENLRQELTSQAERAEELGQELKAWQEKFFQKEQALSTLQLEHTSTQALVSELLPAKHLCQQLQAEQAAAEKRHREELEQSKQAAGGLRAELLRAQRELGELIPLRQKVAEQERTAQQLRAEKASYAEQLSMLKKAHGLLAEENRGLGERANLGRQFLEVELDQAREKYVQELAAVRADAETRLAEVQREAQSTARELEVMTAKYEGAKVKVLEERQRFQEERQKLTAQVEELSKKLADSDQASKVQQQKLKAVQAQGGESQQEAQRLQAQLNELQAQLSQKEQAAEHYKLQMEKAKTHYDAKKQQNQELQEQLRSLEQLQKENKELRAEAERLGHELQQAGLKTKEAEQTCRHLTAQVRSLEAQVAHADQQLRDLGKFQVATDALKSREPQAKPQLDLSIDSLDLSCEEGTPLSITRHKALMTIIPDLSPNNPLSKLPRTQPDGTSVPGEPASPISQRLPPKVESLESLYFTPIPARSQAPLESSLDSLGDVFLDSGRKTRSARRRTTQIINITMTKKLDVEEPDSANSSFYSTRSAPASQASLRATSSTQSLARLGSPDYGNSALLSLPGYRPTTRSSARRSQAGVSSGAPPGRNSFYMGTCQDEPEQLDDWNRIAELQQRNRVCPPHLKTCYPLESRPSLSLGTITDEEMKTGDPQETLRRASMQPIQIAEGTGITTRQQRKRVSLEPHQGPGTPESKKATSCFPRPMTPRDRHEGRKQSTTEAQKKAAPASTKQADRRQSMAFSILNTPKKLGNSLLRRGASKKALSKASPNTRSGTRRSPRIATTTASAATAAAIGATPRAKGKAKH

SEQ ID NO: 342211 - DNA, 3267 bp, Artificial Sequence
  derived and/or modified sequence
atgcgactccagaatgcgctgaatgaacaacgcgtggagtttgccactctgcaggaagctctggctcacgcgctcactgagaaggaggggaaggatcaggagctggccaagttgaggggcctcgaggccgctcagatcaaggaactcgaggaattaagacagacagtcaagcagctcaaggagcagctggctaagaaggaaaaggagcacgcctctggctcaggggctcaatcagaagctgccggccggactgagcctacagggcctaagctagaggcattacgcgccgaagtctcaaagctggagcaacagtgccaaaaacagcaggagcaagcggactcactcgagcgcagcctcgaggctgagcgcgccagccgtgctgaacgcgatagcgccctggagaccctgcagggccagctggaggagaaagcccaggaactcggacactcacagtctgccttagcctccgcccaaagagaactagctgcatttaggacgaaggttcaggaccattcgaaagcagaagacgagtggaaagcacaagtagctcgcgggagacaggaagcggagagaaagaacagcctgataagttccctggaggaggaggtttcgatcctgaatagacaggtgttggagaaggagggtgagtctaaagaactcaagcgacttgttatggcggagtctgagaaatcccaaaaactcgaagaacgcctgaggctgctgcaagccgagactgcttctaactctgcgagagccgccgagcgcagcagtgctctcagggaggaagtccagagcctgcgtgaagaagctgagaaacagagagtagcctctgagaacctgcgtcaggaattgactagccaggcagaaagagccgaggaactagggcaagaacttaaggcatggcaagagaaattcttccagaaggaacaagccctgtctactcttcaacttgaacatacatccacccaggcactcgtatcggaattgctgccagccaaacatctgtgccaacagttacaggctgaacaagcagcagccgagaagcggcatagagaagagctcgaacagagcaagcaggccgctggaggcttgcgggccgaactactcagggctcagcgtgagctcggcgaacttatcccactgagacagaaggtggccgagcaggagagaaccgcccagcagctgcgcgcggagaaggcatcttatgccgagcagctcagcatgctcaaaaaagcccacggcctgcttgccgaggagaaccgcgggctgggagagagggccaaccttggaagacaatttctcgaggtggaacttgaccaggccagagagaagtatgtccaagagctggcggcagtgcgggctgatgccgagactagactggcggaggtccaaagagaagcccaatctacggcgagggagctggaagtgatgaccgcaaagtatgagggagccaaagtgaaggtccttgaggagagacagcgctttcaggaggaacgtcagaagctaactgcccaagtggaagaactaagtaagaaattagcagacagcgatcaggccagcaaagtacagcagcagaagctcaaagcagtgcaggctcagggtggggagtcacaacaagaggcccagaggctgcaagcccagctcaatgagctgcaagcacagctgagccagaaggagcaggccgcagagcactacaagcttcaaatggagaaggcgaagacgcattacgacgctaaaaagcagcagaaccaggaactccaggagcagctcagatccctcgagcagctacagaaggagaacaaggagctcagagccgaggccgaacgacttggacatgagctgcagcaggcagggttgaagactaaggaggctgaacagacatgcaggcacctcaccgcccaggtgcggtctctggaggctcaggtggcacacgcagaccagcagttgcgcgacctaggcaaattccaggtcgcaaccgacgccctaaaaagccgggaaccccaggcgaaacctcagttggatctcagtattgatagcctcgatctctcatgcgaggaagggactcctctctctatcacgcggcacaaagccctgatgactattatcccagacctgtcccctaataacccattgagcaagctccctcggacccagccagacggcacaagtgtacccggtgagcccgctagtcccatttcccagcgattgccccccaaagtggagagcctggagagcctgtactttacgcctattcctgcccggagtcaggccccactcgaatctagtttagactcactcggcgacgtctttctggattcaggcaggaagactcgcagcgcacggcgaaggaccactcagattatcaatattaccatgaccaaaaagctagatgtggaggagccggatagcgccaatagcagtttctattcgacccgaagcgcaccagcgagccaagcctccctccgcgcgaccagtagtacacagagccttgccagactcggatctcccgactatgggaactccgcacttctgtcgttgcccgggtaccgcccaactacaaggtctagtgctaggagaagccaggctggcgtctcctccggtgcgcctcccgggaggaattcattttatatgggaacctgtcaggatgagcctgagcagctggatgactggaacagaatcgcggagttgcagcaacggaatcgagtgtgccccccccacctaaagacttgctacccattggaatctcgaccatcactgtcactcgggactatcaccgacgaggagatgaagacaggagatccccaggaaactttacgcagagcaagcatgcagcctatccagatagccgaaggcacaggcattaccactaggcagcaacgcaaaagggtgtcactcgaaccacatcaggggccaggaacgcccgaatctaaaaaagctacgtcatgcttcccccggccgatgacccctagggatagacacgagggtcgaaagcagtctaccacagaagctcagaagaaggccgcaccagcatctactaagcaggccgatcggaggcagtccatggcattcagcatcctaaatacgccaaaaaaacttggaaatagccttctccgccgcggtgcctcaaagaaggctttatcaaaggccagtcctaacaccaggtccgggactagacgaagtccacgaatagcgactaccacagcttccgccgctacggctgccgccattggagctactcccagagctaagggaaaggcaaaacactag

SEQ ID NO: 342212 - DNA, 3267 bp, Artificial Sequence
  derived and/or modified sequence
atgaggctgcagaatgccctgaatgagcagagggtggagtttgccaccctgcaggaggccctggcccacgccctgacagagaaggagggcaaggaccaggagctggccaagctgcggggcctggaggccgcccagatcaaggagctggaggagctgcggcagacagtgaagcagctgaaggagcagctggccaagaaggagaaggagcacgccagcggcagcggggcccagagcgaggccgccggccgcacagagcccaccggccccaagctggaggccctgcgggcagaggtgtccaagctggagcagcagtgccagaagcagcaggagcaggccgacagcctggagaggagcctggaggccgagcgggccagcagagctgagcgggacagcgccctggagaccctgcagggccagctggaggagaaggcccaggagctgggccacagccagagcgccctggccagcgcccagcgggagctggccgccttccgcaccaaggtgcaggaccacagcaaggcagaagatgagtggaaggcccaggtggcccggggccggcaggaggccgagaggaagaacagcctcatcagcagcctggaggaggaggtgtccatcctgaaccggcaggtgctggagaaggagggggagagcaaggagctgaagaggctggtgatggccgagagcgagaagagccagaagctggaggagcggctgcggctgctgcaggccgagacagccagcaacagcgcccgggctgctgagaggagcagcgccctgcgggaggaggtgcagagcctgcgggaggaggccgagaagcagagggtggccagcgagaacctgcggcaggagctgaccagccaggccgagagagctgaggagctgggccaggagctgaaggcctggcaggagaagttcttccagaaggagcaggccctgagcaccctgcagctggagcacaccagcacccaggccctggtgtctgagctgctgcctgccaagcacctgtgccagcagctgcaggccgagcaggccgctgctgagaagaggcaccgggaggagctggagcagagcaagcaggccgccggcggcctgcgggcagagctgctgcgggcccagcgggagctgggggagctgatccccctgcggcagaaggtggccgagcaggagaggacagcccagcagctgcgggcagagaaggccagctatgcagagcagctgtccatgctgaagaaggcccacggcctgctggccgaggagaacagaggcctgggggagcgggccaacctgggccggcagttcctggaggtggagctggaccaggcccgggagaagtatgtgcaggagctggccgctgtgcgggcagatgctgagacccggctggccgaggtgcagcgggaggcccagagcacagcccgggagctggaggtgatgacagccaagtatgaaggagccaaggtgaaggtgctggaggagcggcagcgcttccaggaggagcggcagaagctgacagcccaggtggaggagctgagcaagaagctggccgacagcgaccaggccagcaaggtgcagcagcagaagctgaaggctgtgcaggcccagggcggggagagccagcaggaggcccagaggctgcaggcccagctgaatgagctgcaggcccagctgagccagaaggagcaggccgctgagcactacaagctgcagatggagaaggccaagacccactatgatgccaagaagcagcagaaccaggagctgcaggagcagctgcggagcctggagcagctgcagaaggagaacaaggagctgcgggcagaggccgagcggctgggccacgagctgcagcaggccggcctgaagaccaaggaggccgagcagacctgccgccacctgacagcccaggtgcgcagcctggaggcccaggtggcccatgctgaccagcagctgcgggacctgggcaagttccaggtggccacagatgccctgaagagccgggagccccaggccaagccccagctggacctgagcattgacagcctggacctgagctgtgaggagggcacccccctgagcatcaccaggcacaaggccctgatgaccatcatcccagacctgagccccaacaaccccctgagcaagctgcccaggacccagccagatggcacctctgtgcctggagagcccgccagccccatcagccagaggctgccccccaaggtggagagcctggagagcctgtacttcacccccatcccagcccggagccaggcccccctggagagcagcctggacagcctgggagatgtgttcctggacagcggcaggaagaccaggtctgcccggcggaggaccacccagatcatcaacatcaccatgaccaagaagctggatgtggaggagccagattctgccaacagcagcttctacagcaccaggtctgccccagccagccaggccagcctgcgggccaccagcagcacccagagcctggcccggctgggcagcccagactatggcaacagcgccctgctgagcctgcccggctaccggcccaccaccaggagcagcgcccggcgcagccaggccggcgtgagcagcggggcccctcctggcaggaacagcttctacatgggcacctgccaggatgagcctgagcagctggatgactggaacagaattgctgagctgcagcagaggaacagagtgtgccccccccacctgaagacctgctaccccctggagagccggcccagcctgagcctgggcaccatcacagatgaggagatgaagacaggagacccccaggagaccctgcggcgggcctccatgcagcccatccagattgctgagggcaccggcatcaccacccggcagcagaggaagagggtgtccctggagccccaccagggccctggcaccccagagagcaagaaggccaccagctgcttcccccggcccatgaccccccgggacagacatgagggcaggaagcagagcaccacagaggcccagaagaaggccgccccagccagcaccaagcaggccgaccggcggcagagcatggccttcagcatcctgaacacccccaagaagctgggcaacagcctgctgcggcggggggccagcaagaaggccctgagcaaggccagccccaacaccaggagcggcacccggcgcagccccagaattgccaccaccacagccagcgctgccacagctgctgccatcggggccaccccccgggccaagggcaaggccaagcactag

SEQ ID NO: 342213 - DNA, 3267 bp, Artificial Sequence
  derived and/or modified sequence
atgcggctgcagaacgccctgaacgagcagcgggtggagttcgccacactgcaggaggcccttgcccacgctctaaccgagaaagagggtaaggaccaggagcttgccaagttacggggcctggaagctgcccagatcaaggagctcgaagaactgaggcagacagtgaagcagctcaaggagcaacttgctaaaaaggagaaggaacacgcttccggctcaggcgctcagtctgaggcagccggccgtacagagcctacaggtcctaagctcgaggctctgcgggctgaggtttcgaagctggagcagcagtgccagaagcagcaggaacaggccgatagcctggagcgcagccttgaagccgaacgcgcatcccgggctgagcgcgactctgccctcgaaacactccagggccaactggaagagaaggcccaagagctcggccatagccagtccgccttagcctccgcacagcgcgaactggccgcttttagaacgaaggttcaagatcacagtaaagccgaagacgagtggaaagcacaagtagctcgcggtcgtcaggaggccgagaggaagaacagcctgatttcatctcttgaggaggaggttagtatcttaaacaggcaagtactagagaaagagggtgaaagtaaagaactgaaacgtctcgtgatggccgagtctgagaaatcacagaaactagaagaacgcctgcgcctcctccaagcagaaacggcctcaaatagcgcccgagctgccgagaggtcctcagctttgagggaggaagtacagtcattgagggaagaagctgaaaagcagcgggtggcttcagaaaatctccgtcaggaactcaccagccaggccgaaagggctgaagaactgggacaagaattgaaagcttggcaggagaagtttttccagaaggagcaggcactgtctaccctgcagctggagcatacgtccacccaggccttggtgagcgaattgctgccagcaaaacacctctgccagcagctgcaggcagagcaggcagctgctgagaaacgccaccgagaggagctcgagcagtccaagcaggccgccggaggactccgcgccgagttgttaagggcccagcgagaacttggtgaattgatacctctgagacaaaaagtggcagagcaagaacggactgcacagcagctgagggctgagaaggccagctatgccgaacagctgagcatgctgaagaaggcccacggcctgctggcggaggagaatagaggacttggtgagagggccaacctgggccggcaatttcttgaggtggagttagatcaggccagggaaaaatacgtacaggagctggctgctgtccgggccgacgccgagacccggttggctgaggttcagcgcgaggcccagagcacagcccgcgaactcgaggtaatgaccgccaaatatgaaggcgctaaagtaaaggtgctagaagagaggcaacgattccaagaggagcgccaaaagctgaccgcccaggtggaggagctctccaagaaactagctgactccgaccaggcctccaaggtgcagcagcagaagctgaaggctgtgcaggcccagggcggggaaagtcaacaggaggcacaaaggcttcaggcccagcttaacgaactccaggctcagctctctcagaaggagcaggctgctgagcactataagctgcagatggagaaggccaaaactcattatgacgcaaaaaaacagcagaaccaggagttacaggagcagttacgaagcctagaacagctgcagaaagaaaacaaggagcttagggctgaggccgaacggctcggccatgaactccagcaggccgggctgaaaacaaaggaagccgaacaaacatgtaggcacttgactgcccaggtcaggagccttgaagcccaggtcgctcacgctgaccaacagctgagggatctaggaaagtttcaagtcgccacagacgccctgaagtccagagaacctcaggcaaaaccgcagctggacctatccatcgactcactggacttgtcatgcgaggaaggcacgcccctcagtattacccgacataaggcactcatgactattatccctgacctgtcccctaataacccccttagcaagctccccaggactcagcctgatggtacaagcgtgcccggggaacccgcgtctcccatttcccagaggctgccacccaaagtggagtccttggaatcactgtattttacacccatccccgcccgttcgcaggcgcccctggagtctagccttgattcactgggggatgtttttttggactcgggccggaagacccgcagtgccagaaggagaacaacccaaattatcaatatcaccatgactaagaaactagatgtggaggagcctgattccgccaactccagcttttactccacaaggtcagctcccgcctcacaggcttcccttcgggcgacaagcagcacccagtctctcgccagactgggatcacctgactatggcaattccgccctcctctctctccccgggtaccggcctaccacccggagttctgcacgcaggagccaagccggtgtgagcagtggcgcaccccctgggcgaaacagcttttacatgggcacttgtcaagacgagcccgaacagctggatgattggaaccgaatcgcggagttgcagcagaggaaccgcgtgtgtcctccacacctcaagacttgttacccactcgagtcccggcccagccttagtctgggcactataacagatgaagaaatgaagacaggagaccctcaggagaccctgagacgtgcgtctatgcagccgatccagattgccgaagggacaggtattaccactagacagcaacgaaaaagagtatcacttgaacctcaccaggggccagggactccagagagcaaaaaagctacgtcctgtttcccaagacccatgacgcccagagatcggcacgaaggccgcaagcaatcaactactgaggctcagaaaaaggccgcccctgcctccaccaaacaggcggaccgtcggcagagtatggccttctcaattctgaacacccccaagaaactgggaaatagcctcctccggcggggggccagcaagaaagccctctcgaaggcatcccctaatacgaggagtggaactcggcggtccccacgaatcgccaccacgaccgcgtctgccgcgactgcagccgcaattggcgctaccccgagggcaaaagggaaggcaaagcactag

SEQ ID NO: 342214 - DNA, 7194 bp, Artificial Sequence
  derived and/or modified sequence
gcgctggcgcgagcccacgaagaggtacgattccggagaatcgcgaggcagagcgggagcgcgcagccaggtggaaactaattctaagccagactgctggagatcaccctgttctagtgtgtggaggcttccaccaggaggcgcattggagtgactgtctggcatcaccaagatgacactccacgccacccggggggctgcactcctctcttgggtgaacagtctacacgtggctgaccctgtggaggctgtgctgcagctccaggactgcagcatcttcatcaagatcattgacagaatccatggcactgaagagggacagcaaatcttgaagcagccggtgtcagagagactggactttgtgtgcagttttctgcagaaaaatcgaaaacatccctcttccccagaatgcctggtatctgcacagaaggtgctagagggatcagagctggaactggcgaagatgaccatgctgctcttataccactctaccatgagctccaaaagtcccagggactgggaacagtttgaatataaaattcaggctgagttggctgtcattcttaaatttgtgctggaccatgaggacgggctaaaccttaatgaggacctagagaacttcctacagaaagctcctgtgccttctacctgttctagcacattccctgaagagctctccccacctagccaccaggccaagagggagattcgcttcctagagctacagaaggttgcctcctcttccagtgggaacaactttctctcaggttctccagcttctcccatgggtgatatcctgcagaccccacagttccagatgagacggctgaagaagcagcttgctgatgagagaagtaatagggatgagctggagctggagctagctgagaaccgcaagctcctcaccgagaaggatgcacagatagccatgatgcagcagcgcattgaccgcctagccctgctgaatgagaagcaggcggccagcccactggagcccaaggagcttgaggagctgcgtgacaagaatgagagccttaccatgcggctgcatgaaaccctgaagcagtgccaggacctgaagacagagaagagccagatggatcgcaaaatcaaccagctttcggaggagaatggagacctttcctttaagctgcgggagtttgccagtcatctgcagcagctacaggatgccctcaatgagctgacggaggagcacagcaaggccactcaggagtggctagagaagcaggcccagctggagaaggagctcagcgcagccctgcaggacaagaaatgccttgaagagaagaacgaaatccttcagggaaaactttcacagctggaagaacacttgtcccagctgcaggataacccaccccaggagaagggcgaggtgctgggtgatgtcttgcagctggaaaccttgaagcaagaggcagccactcttgctgcaaacaacacacagctccaagccagggtagagatgctggagactgagcgaggccagcaggaagccaagctgcttgctgagcggggccacttcgaagaagaaaagcagcagctgtctagcctgatcactgacctgcagagctccatctccaacctcagccaggccaaggaagagctggagcaggcctcccaggctcatggggcccggttgactgcccaggtggcctctctgacctctgagctcaccacactcaatgccaccatccagcaacaggatcaagaactggctggcctgaagcagcaggccaaagagaagcaggcccagctagcacagaccctccaacagcaagaacaggcctcccagggcctccgccaccaggtggagcagctaagcagtagcctgaagcagaaggagcagcagttgaaggaggtagcggagaagcaggaggcaactaggcaggaccatgcccagcaactggccactgctgcagaggagcgagaggcctccttaagggagcgggatgcggctctcaagcagctggaggcactggagaaggagaaggctgccaagctggagattctgcagcagcaacttcaggtggctaatgaagcccgggacagtgcccagacctcagtgacacaggcccagcgggagaaggcagagctgagccggaaggtggaggaactccaggcctgtgttgagacagcccgccaggaacagcatgaggcccaggcccaggttgcagagctagagttgcagctgcggtctgagcagcaaaaagcaactgagaaagaaagggtggcccaggagaaggaccagctccaggagcagctccaggccctcaaagagtccttgaaggtcaccaagggcagccttgaagaggagaagcgcagggctgcagatgccctggaagagcagcagcgttgtatctctgagctgaaggcagagacccgaagcctggtggagcagcataagcgggaacgaaaggagctggaagaagagagggctgggcgcaaggggctggaggctcgattacagcagcttggggaggcccatcaggctgagactgaagtcctgcggcgggagctggcagaggccatggctgcccagcacacagctgagagtgagtgtgagcagctcgtcaaagaagtagctgcctggcgtgagcggtatgaggatagccagcaagaggaggcacagtatggcgccatgttccaggaacagctgatgactttgaaggaggaatgtgagaaggcccgccaggagctgcaggaggcaaaggagaaggtggcaggcatagaatcccacagcgagctccagataagccggcagcagaacgaactagctgagctccatgccaacctggccagagcactccagcaggtccaagagaaggaagtcagggcccagaagcttgcagatgacctctccactctgcaggaaaagatggctgccaccagcaaagaggtggcccgcttggagaccttggtgcgcaaggcaggtgagcagcaggaaacagcctcccgggagttagtcaaggagcctgcgagggcaggagacagacagcccgagtggctggaagagcaacagggacgccagttctgcagcacacaggcagcgctgcaggctatggagcgggaggcagagcagatgggcaatgagctggaacggctgcgggccgcgctgatggagagccaggggcagcagcaggaggagcgtgggcagcaggaaagggaggtggcgcggctgacccaggagcggggccgtgcccaggctgaccttgccctggagaaggcggccagagcagagcttgagatgcggctgcagaacgccctcaacgagcagcgtgtggagttcgctaccctgcaagaggcactggctcatgccctgacggaaaaggaaggcaaggaccaggagttggccaagcttcgtggtctggaggcagcccagataaaagagctggaggaacttcggcaaaccgtgaagcaactgaaggaacagctggctaagaaagaaaaggagcacgcatctggctcaggagcccaatctgaggctgctggcaggacagagccaacaggccccaagctggaggcactgcgggcagaggtgagcaagctggaacagcaatgccagaagcagcaggagcaggctgacagcctggaacgcagcctcgaggctgagcgggcctcccgggctgagcgggacagtgctctggagactctgcagggccagttagaggagaaggcccaggagctagggcacagtcagagtgccttagcctcggcccaacgggagttggctgccttccgcaccaaggtacaagaccacagcaaggctgaagatgagtggaaggcccaggtggcccggggccggcaagaggctgagaggaaaaatagcctcatcagcagcttggaggaggaggtgtccatcctgaatcgccaggtcctggagaaggagggggagagcaaggagttgaagcggctggtgatggccgagtcagagaagagccagaagctggaggagaggctgcgcctgctgcaggcagagacagccagcaacagtgccagagctgcagaacgcagctctgctctgcgggaggaggtgcagagcctccgggaggaggctgagaaacagcgggtggcttcagagaacctgcggcaggagctgacctcacaggctgagcgtgcggaggagctgggccaagaattgaaggcgtggcaggagaagttcttccagaaagagcaggccctctccaccctgcagctcgagcacaccagcacacaggccctggtgagtgagctgctgccagctaagcacctctgccagcagctgcaggccgagcaggccgctgccgagaaacgccaccgtgaggagctggagcagagcaagcaggccgctgggggactgcgggcagagctgctgcgggcccagcgggagcttggggagctgattcctctgcggcagaaggtggcagagcaggagcgaacagctcagcagctgcgggcagagaaggccagctatgcagagcagctgagcatgctgaagaaggcgcatggcctgctggcagaggagaaccgggggctgggtgagcgggccaaccttggccggcagtttctggaagtggagttggaccaggcccgggagaagtatgtccaagagttggcagccgtacgtgctgatgctgagacccgtctggctgaggtgcagcgagaagcacagagcactgcccgggagctggaggtgatgactgccaagtatgagggtgccaaggtcaaggtcctggaggagaggcagcggttccaggaagagaggcagaaactcactgcccaggtggaagaactgagtaagaaactggctgactctgaccaagccagcaaggtgcagcagcagaagctgaaggctgtccaggctcagggaggcgagagccagcaggaggcccagcgcctccaggcccagctgaatgaactgcaagcccagttgagccagaaggagcaggcagctgagcactataagctgcagatggagaaagccaaaacacattatgatgccaagaagcagcagaaccaagagctgcaggagcagctgcggagcctggagcagctgcagaaggaaaacaaagagctgcgagctgaagctgaacggctgggccatgagctacagcaggctgggctgaagaccaaggaggctgaacagacctgccgccaccttactgcccaggtgcgcagcctggaggcacaggttgcccatgcagaccagcagcttcgagacctgggcaaattccaggtggcaactgatgctttaaagagccgtgagccccaggctaagccccagctggacttgagtattgacagcctggatctgagctgcgaggaggggaccccactcagtatcaccagacataaagcactcatgacaattatacctgatttgtcccccaacaaccctctgagcaagctgcctcgtacccagccagacggcaccagcgtccctggagaaccagcctcacctatctcccagcgcctgccccccaaggtagaatccctggagagtctctacttcactcccatccctgctcggagtcaggcccccctggagagcagcctggactccctgggagacgtcttcctggactcgggtcgtaagacccgctccgctcgtcggcgcaccacgcagatcatcaacatcaccatgaccaagaagctagatgtggaagagccagacagcgccaactcatcgttctacagcacgcggtctgctcctgcttcccaggctagcctgcgagccacctcctctactcagtctctagctcgcctgggttctcccgattatggcaactcagccctgctcagcttgcctggctaccgccccaccactcgcagttctgctcgtcgttcccaggccggggtgtccagtggggcccctccaggaaggaacagcttctacatgggcacttgccaggatgagcctgagcagctggatgactggaaccgcattgcagagctgcagcagcgcaatcgagtgtgccccccacatctgaagacctgctatcccctggagtccaggccttccctgagcctgggcaccatcacagatgaggagatgaaaactggagacccccaagagaccctgcgccgagccagcatgcagccaatccagatagccgagggcactggcatcaccacccggcagcagcgcaaacgggtctccctagagccccaccagggccctggaactcctgagtctaagaaggccaccagctgtttcccacgccccatgactccccgagaccgacatgaagggcgcaaacagagcactactgaggcccagaagaaagcagctccagcttctactaaacaggctgaccggcgccagtcgatggccttcagcatcctcaacacacccaagaagctagggaacagccttctgcggcggggagcctcaaagaaggccctgtccaaggcttcccccaacactcgcagtggaacccgccgttctccgcgcattgccaccaccacagccagcgccgccactgctgccgccattggtgccacccctcgagccaagggcaaggcaaagcactaaagggccagtaccagtgagtggccccacctgtgtccccgatgctgacctcacctggtcctccgcctactgtccctctcagtgccttctctcagctcccaggccaacagtagccaaacccctagagacagtgatgcctgcccgcaccctggcctggtccctggtccttcactggcgccttctcggagctggcccagggggcctggagcatggacagtgtgggcgctctccctaccttgcctccttttttcttaaagcaaagtcacttctccatcacaaccagatttgaggctggttttgatggctgggtccttgggcctggccagtcttcctcttagcctctggatctagaagggaccataagaggagtaggccctggttcctgctgtcctggtggctgggcccagcaggggccctcactcttgaagtccaggactgggtctgacctggtgggagcacctgccagaggatgctctttcccaggacggatgggccctatgtctcaggagtggggttgggggacagccttcagcagcagctcacaccctaccttccccagacttgcactggggtgggatttggagtgatgggaaggtttttaagggccggggatggatcttttctaaatgttattacttgtaaataaagtctatttttctcccgtg

SEQ ID NO: 342215 - DNA, 3267 bp, Artificial Sequence
  derived and/or modified sequence
atgagactgcagaatgcactgaatgagcagcgagttgagtttgcgactcttcaggaggctctggcccacgcgctgaccgagaaggaaggaaaggaccaggagttggcaaagctgcggggtttggaggctgcacagatcaaggaactcgaggagctacgccagaccgttaagcaactaaaggagcaactggcgaagaaggagaaagagcacgccagtggcagcggggcacagagcgaagcggctggacgtaccgagcctacgggtcccaaactggaagccctcagagcggaagtttccaaactggagcagcaatgccagaaacagcaggagcaggccgacagtctcgagcgttctttggaggctgaaagagccagtcgagctgagcgagatagcgcacttgagactcttcagggccagctcgaggaaaaggctcaagagctcgggcattcgcaaagtgcactggcctccgcccagcgggaacttgctgctttcagaacaaaggtccaggaccacagcaaggccgaggacgagtggaaggcccaggttgccaggggccgacaggaggccgagcggaagaattcattgatctcaagtttagaagaagaagtgtcgattctcaacaggcaggtccttgaaaaggagggtgaatctaaagaattgaagcgcctggtgatggcggagagtgagaaaagccaaaagctggaagagagactcagattactgcaggcagagactgcttcgaacagtgctcgggcagctgaaaggagctccgcactgcgggaagaggtccaaagcttgcgcgaggaggcggagaaacagcgggttgctagcgagaatctgcggcaggaattgacttcacaggccgaacgggcagaggaattggggcaagagcttaaagcatggcaagagaaattttttcaaaaagagcaggctctttccacactacaacttgagcacacatcaacacaggcccttgtctcagaactgctgcccgctaagcatctgtgtcagcagcttcaggcagagcaagccgctgccgagaaacggcatagagaagagcttgagcagtcaaaacaggccgctggcggactgcgagccgagctgctcagggcacagcgtgagctcggagaactgatcccactgaggcagaaggtcgctgaacaggaaagaacagctcagcagctccgtgcagaaaaagcttcttacgctgagcagttaagtatgctgaagaaagcgcacgggctccttgccgaagagaataggggtttgggggaacgggcaaacttgggaagacaatttcttgaggtcgagttggaccaagcacgagagaagtacgttcaggagctggctgccgtgagggccgatgcggagacacgtctcgccgaggtccagagagaagctcaatccacagccagagaactggaagtcatgacggctaagtacgagggcgcaaaggtgaaggtgctggaggagaggcagaggttccaggaggagcgtcaaaaactcactgcccaggttgaagagctgagtaagaagttagctgactcggatcaggccagcaaagtgcagcaacaaaagcttaaagctgtgcaagcccagggcggagaatctcagcaggaggcccagagactccaggcccaactcaatgaactccaagctcagctgtcacagaaagaacaagccgctgagcactataagctgcagatggaaaaagctaaaacccattatgacgccaagaagcaacagaatcaagagctacaggaacaactgagatcattggagcaactgcagaaagagaataaggagttgagggctgaggccgagaggttagggcacgaactccagcaggctgggctcaagaccaaagaagcggagcagacatgtagacacctgacagctcaggtgagatccctggaagcacaagtggcacatgccgaccagcagctcagggacctgggcaaattccaggttgctaccgatgcacttaaatccagggaaccccaggcaaaaccccagctggacctaagtatagacagcctggacctcagttgcgaggagggcacccccctgagtatcacacgccataaagcccttatgaccatcattcctgacctgagtcctaacaacccacttagtaagctgcctaggactcagcccgatggaacatccgttcctggcgaacctgcttctcctatctcccaaaggctgcctcctaaagtcgaaagtctggaaagtctgtatttcacaccgattccagctagaagtcaggcacccctggaatccagcctggactcattgggcgacgtcttcctcgattcggggcgtaagacgcgttctgcgaggcgcagaaccacccagataattaacatcaccatgacaaagaaactagatgtggaggagccagattctgccaattctagtttctactccacacgatctgcccctgcgtcccaggcctctctgagagctacatcctcaacccagagtctggccagactgggctcccccgactacggcaacagcgcgctattgtccttacccggatatagacccactactcgcagcagcgcacggcgaagccaggctggagtatcttcgggggctcctccaggacgcaattccttttatatgggcacatgccaggatgagcccgagcaactagatgactggaatcgtatagcagaactgcagcagcggaaccgtgtctgccctccacacctcaagacctgttaccccctggagtctcggccttctttgtcgctggggaccatcaccgacgaggagatgaagacaggtgatcctcaggagaccctgaggcgagcatcaatgcagccaatacagatcgccgaaggcactggaataactaccagacaacagcggaagcgcgttagcctcgagcctcaccagggtccagggactcctgagtctaaaaaggctacctcttgctttcctcgacccatgaccccccgtgaccggcatgaaggcagaaaacaaagtacgacggaggcccagaaaaaagctgcccctgcatcaaccaagcaggccgatcgcaggcagagcatggcattctccatccttaacacacctaagaaactcggcaatagcttgctgcgaagaggcgcatctaaaaaggccctcagcaaagcctctcccaatactaggtctgggaccagaaggtctcctagaatcgccacgactactgccagtgccgcaaccgcggcagcaataggcgctactcccagagccaagggaaaagccaaacattag

SEQ ID NO: 342216 - DNA, 3267 bp, Artificial Sequence
  derived and/or modified sequence
atgagactgcagaacgccctgaacgagcagagagtggagttcgccaccctgcaggaggccctggcccacgccctgaccgagaaggagggcaaggaccaggagctggccaagctgagaggcctggaggccgcccagatcaaggagctggaggagctgagacagaccgtgaagcagctgaaggagcagctggccaagaaggagaaggagcacgccagcggcagcggcgcccagagcgaggccgccggcagaaccgagcccaccggccccaagctggaggccctgagagccgaggtgagcaagctggagcagcagtgccagaagcagcaggagcaggccgacagcctggagagaagcctggaggccgagagagccagcagagccgagagagacagcgccctggagaccctgcagggccagctggaggagaaggcccaggagctgggccacagccagagcgccctggccagcgcccagagagagctggccgccttcagaaccaaggtgcaggaccacagcaaggccgaggacgagtggaaggcccaggtggccagaggcagacaggaggccgagagaaagaacagcctgatcagcagcctggaggaggaggtgagcatcctgaacagacaggtgctggagaaggagggcgagagcaaggagctgaagagactggtgatggccgagagcgagaagagccagaagctggaggagagactgagactgctgcaggccgagaccgccagcaacagcgccagagccgccgagagaagcagcgccctgagagaggaggtgcagagcctgagagaggaggccgagaagcagagagtggccagcgagaacctgagacaggagctgaccagccaggccgagagagccgaggagctgggccaggagctgaaggcctggcaggagaagttcttccagaaggagcaggccctgagcaccctgcagctggagcacaccagcacccaggccctggtgagcgagctgctgcccgccaagcacctgtgccagcagctgcaggccgagcaggccgccgccgagaagagacacagagaggagctggagcagagcaagcaggccgccggcggcctgagagccgagctgctgagagcccagagagagctgggcgagctgatccccctgagacagaaggtggccgagcaggagagaaccgcccagcagctgagagccgagaaggccagctacgccgagcagctgagcatgctgaagaaggcccacggcctgctggccgaggagaacagaggcctgggcgagagagccaacctgggcagacagttcctggaggtggagctggaccaggccagagagaagtacgtgcaggagctggccgccgtgagagccgacgccgagaccagactggccgaggtgcagagagaggcccagagcaccgccagagagctggaggtgatgaccgccaagtacgagggcgccaaggtgaaggtgctggaggagagacagagattccaggaggagagacagaagctgaccgcccaggtggaggagctgagcaagaagctggccgacagcgaccaggccagcaaggtgcagcagcagaagctgaaggccgtgcaggcccagggcggcgagagccagcaggaggcccagagactgcaggcccagctgaacgagctgcaggcccagctgagccagaaggagcaggccgccgagcactacaagctgcagatggagaaggccaagacccactacgacgccaagaagcagcagaaccaggagctgcaggagcagctgagaagcctggagcagctgcagaaggagaacaaggagctgagagccgaggccgagagactgggccacgagctgcagcaggccggcctgaagaccaaggaggccgagcagacctgcagacacctgaccgcccaggtgagaagcctggaggcccaggtggcccacgccgaccagcagctgagagacctgggcaagttccaggtggccaccgacgccctgaagagcagagagccccaggccaagccccagctggacctgagcatcgacagcctggacctgagctgcgaggagggcacccccctgagcatcaccagacacaaggccctgatgaccatcatccccgacctgagccccaacaaccccctgagcaagctgcccagaacccagcccgacggcaccagcgtgcccggcgagcccgccagccccatcagccagagactgccccccaaggtggagagcctggagagcctgtacttcacccccatccccgccagaagccaggcccccctggagagcagcctggacagcctgggcgacgtgttcctggacagcggcagaaagaccagaagcgccagaagaagaaccacccagatcatcaacatcaccatgaccaagaagctggacgtggaggagcccgacagcgccaacagcagcttctacagcaccagaagcgcccccgccagccaggccagcctgagagccaccagcagcacccagagcctggccagactgggcagccccgactacggcaacagcgccctgctgagcctgcccggctacagacccaccaccagaagcagcgccagaagaagccaggccggcgtgagcagcggcgccccccccggcagaaacagcttctacatgggcacctgccaggacgagcccgagcagctggacgactggaacagaatcgccgagctgcagcagagaaacagagtgtgccccccccacctgaagacctgctaccccctggagagcagacccagcctgagcctgggcaccatcaccgacgaggagatgaagaccggcgacccccaggagaccctgagaagagccagcatgcagcccatccagatcgccgagggcaccggcatcaccaccagacagcagagaaagagagtgagcctggagccccaccagggccccggcacccccgagagcaagaaggccaccagctgcttccccagacccatgacccccagagacagacacgagggcagaaagcagagcaccaccgaggcccagaagaaggccgcccccgccagcaccaagcaggccgacagaagacagagcatggccttcagcatcctgaacacccccaagaagctgggcaacagcctgctgagaagaggcgccagcaagaaggccctgagcaaggccagccccaacaccagaagcggcaccagaagaagccccagaatcgccaccaccaccgccagcgccgccaccgccgccgccatcggcgccacccccagagccaagggcaaggccaagcactag

SEQ ID NO: 342217 - protein, 397 aa, Artificial Sequence
  derived and/or modified sequence
MNCISDFFTYETTKSVVVKSWTIGIINRVVQLLIISYFVGWVFLHEKAYQVRDTAIESSVVTKVKGSGLYANRVMDVSDYVTPPQGTSVFVIITKMIVTENQMQGFCPESEEKYRCVSDSQCGPERLPGGGILTGRCVNYSSVLRTCEIQGWCPTEVDTVETPIMMEAENFTIFIKNSIRFPLFNFEKGNLLPNLTARDMKTCRFHPDKDPFCPILRVGDVVKFAGQDFAKLARTGGVLGIKIGWVCDLDKAWDQCIPKYSFTRLDSVSEKSSVSPGYNFRFAKYYKMENGSEYRTLLKAFGIRFDVLVYGNAGKFNIIPTIISSVAAFTSVGVGTVLCDIILLNFLKGADQYKAKKFEEVNETTLKIAALTNPVYPSDQTTAEKQSTDSGAFSIGH

SEQ ID NO: 342218 - protein, 396 aa, Artificial Sequence [sequence omitted]

SEQ ID NO: 342219 - DNA, 1194 bp, Artificial Sequence
  derived and/or modified sequence
atgaactgtatcagcgacttttttacctacgagactacaaaatccgttgtcgttaagagctggactatcgggatcattaaccgcgtggtgcagttgttaatcatttcctattttgtggggtgggtgttcctgcacgagaaagcataccaggtgcgagataccgctattgagtcatccgtcgtgacaaaagtgaagggttctggtctgtacgccaatcgcgtcatggacgtgtcggattacgtgacaccccctcagggaacatctgtgttcgtgattatcactaaaatgattgtgactgaaaaccagatgcaagggttctgtcccgagtcagaagagaagtatagatgcgtgtccgacagccagtgtggtccagaacgtctgccaggagggggtatcctcaccggcagatgcgtgaactacagctctgtgctgagaacatgcgaaatccagggatggtgccccaccgaggtagatacagtcgagacccctattatgatggaagccgagaactttacgattttcatcaaaaactcaatcagattccctctgttcaatttcgaaaaagggaacctcctcccaaatctcaccgcccgcgacatgaagacgtgccgcttccaccccgataaagatccattttgtcctattttgcgcgtgggagacgttgtgaagttcgccggtcaggattttgcaaaactcgctcgaacagggggggtgctggggattaaaatcggctgggtatgcgacttggataaggcctgggaccagtgtatcccaaagtacagcttcacgcgcctagactcagtatctgaaaagtcatcagtgtctcctgggtataacttcaggttcgcaaaatattataaaatggagaacgggagcgaatacaggactctactgaaggccttcggaattcgtttcgatgttctagtgtacggcaacgccggtaagttcaacattatccctactatcatcagctcagttgccgcctttacttccgtcggggttggtaccgtcttatgtgacattatcctgctgaattttctgaagggagctgatcaatataaagcaaaaaagtttgaagaggtcaacgagacgaccttgaaaatcgccgcactcacgaaccctgtatatccatcagaccagaccaccgccgagaaacagtcaactgattcgggcgccttctctatcggccactag

SEQ ID NO: 342220 - DNA, 1191 bp, Artificial Sequence
  derived and/or modified sequence
atgaattgcatttccgatttttttacatacgaaaccacgaagtccgtggtggtcaagagctggacgatcggcatcatcaatagggtagtccagttgctgattatttcttatttcgtaggatgggtttttctccatgagaaggcatatcaggtccgcgacacggctattgagtcgagcgttgtcactaaggtcaagggctccgggctctacgccaaccgtgttatggacgtatctgactatgtgaccccaccacaggggacatctgtgtttgtcatcattaccaaaatgatcgtaaccgaaaatcagatgcaaggcttctgtccagaatccgaggagaaatacagatgcgtatccgattcccagtgcggtcccgaaaggctaccgggcggcggtatcctcacaggcaggtgcgttaactacagtagtgtccttcgaacgtgcgaaatccagggctggtgtccaacagaagtagacactgtggaaacccccatcatgatggaggcagagaattttacaatattcatcaaaaacagcatcagattcccgcttttcaattttgaaaagggtaacctactacctaatctgactgcccgggacatgaaaacctgtagattccacccggacaaggatcctttctgtccaatactgcgggtgggggacgtcgtcaaatttgctgggcaggattttgctaagttagctaggactggcggtgttttgggcataaagatagggtgggtgtgtgacctggacaaggcatgggaccagtgcataccaaagtactccttcactaggctggatagcgtgtcagaaaaaagttccgtgtccccaggctacaatttcaggtttgcaaagtattacaaaatggagaacggatcagaataccgcactctgctgaaagcctttggaatccgcttcgacgtgctatatacgggcgcagggaagttcaatatcataccaaccataatttcgtccgttgccgcattcactagcgttggcgtgggcaccgttctctgcgacatcattcttttaaacttcctgaagggggcagatcagtacaaggccaaaaaatttgaagaggtgaatgaaacaaccttgaagattgccgcacttactaaccctgtgtacccttccgaccagaccaccgcggagaagcagtcgactgactccggcgctttctctatcggacattag

SEQ ID NO: 342221 - DNA, 1194 bp, Artificial Sequence
  derived and/or modified sequence
atgaactgcatcagtgacttcttcacctatgagaccaccaagtctgtggtggtgaagtcctggaccatcggcatcatcaacagagtggtgcagctgctgatcatctcctactttgtgggctgggtgttcctgcacgagaaggcctaccaggtgcgggacacagccatcgagagctctgtggtgaccaaggtgaagggcagcggcctgtatgccaacagagtgatggatgtgtctgactatgtgaccccaccccagggcacctctgtgtttgtgatcatcaccaagatgattgtgacagagaaccagatgcagggcttctgcccagagagcgaggagaagtaccgctgtgtgtctgacagccagtgtggccctgagcggctgcccggcggcggcatcctgaccggccgctgtgtgaactacagctctgtgctgcggacctgtgagatccagggctggtgccccacagaggtggacacagtggagacccccatcatgatggaggccgagaacttcaccatcttcatcaagaacagcatccgcttccccctcttcaactttgagaagggcaacctgctgcccaacctgacagcccgggacatgaagacctgccgcttccacccagacaaggaccccttctgccccatcctgcgggtgggagatgtggtgaagtttgctggccaggactttgccaagctggccaggactggaggagtgctgggcatcaagattggctgggtgtgtgacctggacaaggcctgggaccagtgcatccccaagtacagcttcacccggctggacagcgtgtctgagaagagctctgtgtccccaggctacaacttccgctttgccaagtactacaagatggagaatggcagcgagtaccgcaccctgctgaaggccttcggcatccgctttgatgtgctggtgtatggaaatgccggcaagttcaacatcatccccaccatcatcagctctgtggccgccttcacctctgtgggcgtgggcaccgtgctgtgtgacatcatcctgctgaacttcctgaagggagctgaccagtacaaggccaagaagtttgaggaggtgaatgagaccaccctgaagattgctgccctgaccaaccctgtgtaccccagcgaccagaccacagctgagaagcagagcacagacagcggggccttcagcatcggccactag

SEQ ID NO: 342222 - DNA, 1191 bp, Artificial Sequence
  derived and/or modified sequence
atgaactgcatcagtgacttcttcacctatgagaccaccaagtctgtggtggtgaagtcctggaccatcggcatcatcaacagagtggtgcagctgctgatcatctcctactttgtgggctgggtgttcctgcacgagaaggcctaccaggtgcgggacacagccatcgagagctctgtggtgaccaaggtgaagggcagcggcctgtatgccaacagagtgatggatgtgtctgactatgtgaccccaccccagggcacctctgtgtttgtgatcatcaccaagatgattgtgacagagaaccagatgcagggcttctgcccagagagcgaggagaagtaccgctgtgtgtctgacagccagtgtggccctgagcggctgcccggcggcggcatcctgaccggccgctgtgtgaactacagctctgtgctgcggacctgtgagatccagggctggtgccccacagaggtggacacagtggagacccccatcatgatggaggccgagaacttcaccatcttcatcaagaacagcatccgcttccccctcttcaactttgagaagggcaacctgctgcccaacctgacagcccgggacatgaagacctgccgcttccacccagacaaggaccccttctgccccatcctgcgggtgggagatgtggtgaagtttgctggccaggactttgccaagctggccaggactggaggagtgctgggcatcaagattggctgggtgtgtgacctggacaaggcctgggaccagtgcatccccaagtacagcttcacccggctggacagcgtgtctgagaagagctctgtgtccccaggctacaacttccgctttgccaagtactacaagatggagaatggcagcgagtaccgcaccctgctgaaggccttcggcatccgctttgatgtgctgtacaccggggccggcaagttcaacatcatccccaccatcatcagctctgtggccgccttcacctctgtgggcgtgggcaccgtgctgtgtgacatcatcctgctgaacttcctgaagggagctgaccagtacaaggccaagaagtttgaggaggtgaatgagaccaccctgaagattgctgccctgaccaaccctgtgtaccccagcgaccagaccacagctgagaagcagagcacagattctggggccttcagcatcggccactag

SEQ ID NO: 342223 - DNA, 1194 bp, Artificial Sequence
  derived and/or modified sequence
atgaactgcatcagcgacttcttcacctacgagaccaccaagagcgttgttgtgaaaagttggactattggaatcattaatagagttgttcaactgctgattatctcttacttcgtcggatgggtgtttttgcacgaaaaggcctaccaggtgagagatactgctattgaatcaagtgtggtaacaaaggtgaagggcagtggactatacgctaatcgagtaatggatgtatctgactatgtcactcctccgcagggtacctcagtgtttgttattataaccaagatgatagtcacagaaaatcagatgcaggggttttgccccgagtcagaagagaagtatagatgcgtgtccgattctcaatgcggccctgaacgcctgccaggtgggggcattctgacgggaagatgcgttaattactcctccgtgttgagaacgtgtgagattcaaggctggtgtccgacagaggttgataccgtagagacccctatcatgatggaagcggaaaactttacgatcttcattaaaaacagtataagattccctttatttaacttcgaaaagggcaacctgctgccaaacctgacagccagagatatgaagacttgcagatttcacccagacaaggaccctttttgccccatcctgcgagtgggcgatgtagtcaaattcgccgggcaggatttcgcgaagttggctagaacgggcggagtgcttggaataaaaatcggttgggtgtgtgaccttgacaaagcctgggaccagtgtatcccaaaatactcatttacacgcctcgacagcgtgtccgagaaatcatccgtctcccctggatataacttcaggttcgccaagtactacaagatggaaaacggttcagaataccggacattactgaaggccttcggcattcgcttcgatgtgttagtgtatggaaacgcaggaaagtttaatatcataccaactataatctcttccgttgcagcttttaccagcgtcggagtgggcacagttctttgtgacatcattctcctgaacttcctcaagggcgcagaccagtacaaagctaagaagttcgaagaggttaatgagaccaccttaaaaatagcagctcttactaaccctgtatacccctccgaccagactacagctgaaaagcagagcactgacagcggcgcttttagcatcgggcattag

SEQ ID NO: 342224 - DNA, 1191 bp, Artificial Sequence
  derived and/or modified sequence
atgaactgcatcagcgacttcttcacctacgagaccaccaagagcgtagtagtcaagtcgtggactatagggatcattaaccgagtcgtacagctgctgattatcagttattttgtgggctgggttttcttgcacgaaaaagcctaccaagtccgggataccgccattgagtcatccgtggtgaccaaggtcaaaggtagtggcctctatgccaaccgcgttatggacgtttcggactacgtgacccctcctcagggaaccagtgtgtttgtgatcattacaaagatgatcgttaccgagaaccagatgcaaggattttgtccggagtccgaggagaagtacagatgcgtaagtgacagccagtgtggcccagaacggttgcccgggggaggtatcctcacaggacggtgtgtcaactatagtagtgtcctgcgcacctgcgaaatccaagggtggtgccccacagaagtggatactgtggagactcctattatgatggaggcagaaaatttcaccatatttattaaaaactcaatcagattccccctgttcaacttcgaaaaaggaaatttgctgcccaatcttaccgcgagagacatgaaaacctgcaggttccatccagacaaggacccattctgtccaatccttcgagtcggggatgtggttaagttcgccgggcaggacttcgctaagctggctcgcacgggcggggtcctcggaataaagatcggctgggtgtgcgatcttgataaagcttgggatcagtgcataccaaagtacagtttcacgcgtttagactctgtgtcagagaagtcttctgtgagtcccggatataactttagattcgcaaaatactacaaaatggagaatggctccgagtatcggactctccttaaagcatttggcattaggtttgatgtgctgtatacaggggcggggaagtttaacatcattccaaccatcatcagtagcgtggctgctttcactagcgtaggagtgggcactgtcctctgtgatattattcttttgaatttcctaaagggggccgaccagtataaagccaagaagttcgaggaggttaacgagacgactctcaaaatcgcggccctcacaaacccagtgtacccctccgaccagactactgcagagaaacagtccaccgatagcggcgcttttagcatcggccactag

SEQ ID NO: 342225 - DNA, 1194 bp, Artificial Sequence
  derived and/or modified sequence
atgaattgcattagtgacttctttacatacgaaacaactaagtccgtcgtggtcaaatcctggacaatcggtatcatcaacagagtggtacagctcctgatcatctcttatttcgtggggtgggtctttcttcacgaaaaagcataccaggttcgcgatacagcgatcgagagttctgtagtgacaaaggtcaaaggttccgggttatatgccaatagagttatggatgtgtctgattacgtgacaccaccacaaggtaccagtgttttcgtgattataaccaagatgattgtgactgaaaaccagatgcaaggtttttgccccgagtcagaagagaagtatagatgcgtctcggactcacagtgtggaccagaaagacttcccggaggaggaattctcaccggcagatgtgtcaattatagctctgttctgcggacttgcgaaattcagggttggtgtccaacagaggtggacactgtcgaaaccccaataatgatggaggccgaaaattttactatcttcatcaaaaactcgattagattccccctattcaattttgagaagggcaacctgctgccaaacttgacagcaagagacatgaaaacgtgtcgatttcaccccgataaagaccctttctgcccgattctgagggtgggcgacgttgtgaagtttgcaggtcaggatttcgcaaaactggcgagaactgggggagtcctgggaatcaaaatcgggtgggtgtgcgatctcgataaggcatgggaccagtgtatacctaagtatagttttacaaggctcgatagcgtttcagagaagtcttctgtcagtccaggctacaatttcaggtttgcgaaatattacaagatggagaatggcagcgagtaccgtacgcttctgaaagcctttgggatcaggtttgacgtgcttgtctacggcaacgcagggaagttcaacatcataccaacgataatttctagtgtcgctgcattcacctctgtcggggttggcacagtgttatgcgatatcatcctcctgaatttccttaaaggagctgaccagtacaaggccaagaagttcgaggaggtgaatgagaccacactgaaaattgcagcccttaccaaccccgtctatccttccgaccaaaccaccgcagagaaacagtctaccgatagcggagccttttcaatcggccattag

SEQ ID NO: 342226 - DNA, 1191 bp, Artificial Sequence
  derived and/or modified sequence
atgaactgtatatcagatttcttcacttatgaaaccaccaaatctgtggtggtcaagtcctggaccattgggataatcaacagagttgtacagctcctgattatttcatacttcgtgggatgggtcttcctccacgaaaaagcctaccaggtgagagacaccgccattgagtctagcgtcgttaccaaagtgaaaggctccggcttgtacgctaatagggtcatggatgtgtcagactatgttacgccaccccagggcacttctgttttcgttattattaccaagatgatcgtcacagagaatcagatgcaaggcttctgccctgaatctgaagagaagtaccggtgcgtctcagacagtcagtgtggacccgaacgcctaccaggaggtggcatcttaaccgggaggtgtgttaactacagcagcgttctgcgtacgtgcgagatacaaggttggtgccctaccgaggtggacacggtagaaacacctattatgatggaggctgaaaacttcaccatttttatcaagaattctatccgctttcccctgtttaactttgagaaaggcaatttactccccaacctgactgcaagagacatgaaaacatgtaggtttcatcctgataaggaccccttctgtcccattctgcgagttggggacgtcgtgaagttcgccggacaggatttcgctaagctggccaggaccggaggggtactgggaatcaagattggttgggtatgtgacctggataaggcctgggaccaatgtattcctaagtactccttcactcgcttggatagcgtgtccgagaaaagctccgtgagccctgggtacaactttaggttcgcgaaatattataaaatggagaatgggagtgaatatagaacgctgttgaaggctttcgggatcaggttcgatgtcctctataccggcgctggcaaattcaatataatccctactatcatctcaagcgtcgcagctttcacttccgtgggcgtcggcacagtgctgtgcgacatcatcctcttgaacttcctcaagggggctgaccagtacaaggcaaagaaattcgaggaggtgaacgagaccactcttaagatcgcagccctgactaaccctgtgtacccctccgaccagacaacagccgagaaacaaagcacagattccggggcattcagcatcgggcattag

SEQ ID NO: 342227 - DNA, 1831 bp, Artificial Sequence
  derived and/or modified sequence
ccccttctgagtgtcccctgagcactctctcagcatgaactgcatatccgacttcttcacctatgagaccaccaagtcggtggttgtgaagagctggaccatcgggatcatcaaccgagtagttcagcttctgatcatctcctactttgtagggtgggttttcttgcacgagaaggcttaccaggtacgggacacagccattgagtcctcggtggtaaccaaggtgaagggctccggactctacgccaacagagtcatggatgtgtctgattacgtgacgccacctcagggcacctcggtctttgtcatcatcaccaagatgattgttactgaaaatcagatgcaaggattctgcccagagagtgaggagaaataccgctgtgtatcagacagccagtgcgggcctgagcgcttgccaggtggggggatcctcactggccgctgcgtgaactacagctctgtgctccggacctgtgagatccagggctggtgccccacggaggtggacacagtggaaacgcccatcatgatggaagctgagaacttcactattttcatcaagaacagcatccgtttccccctcttcaactttgagaagggaaacctccttcccaacctgacagccagggacatgaagacctgccgcttccacccggacaaggaccctttctgccccatcttgcgggtaggggacgtggtcaagtttgcggggcaggattttgccaaactggcgcgcacggggggagttctgggcattaagatcggctgggtgtgcgacttggacaaggcctgggaccagtgcatccccaaatactccttcacccggctcgacagcgtttctgagaaaagcagcgtgtccccaggctacaacttcaggtttgccaagtactacaaaatggaaaatggcagtgagtaccgcaccctcctgaaggcttttggcatccgcttcgacgtgctggtatacgggaatgctggcaagttcaacatcatccccaccatcatcagctctgtggcggcctttacttctgtgggagtgggaactgttctctgtgacatcatcctgctcaacttcctcaagggggccgaccagtacaaagccaagaagtttgaggaggtgaatgagactacgctgaaaatcgcggctttgaccaacccagtgtaccccagcgaccagaccacagcggagaagcagtccaccgattcgggggccttctccataggccactagggcctctttccagggccccacactcacaaaggctccaggcctccccacagaggaccctgcctgagcaaggggcatgggagggaagaggggctctcatttctgctgctcattccatgagcatagctgggacccaagtgtctgggcctccgactgctccagcagacaggcagtgctccctgctgagaccccaatctcaccttcactccttgcctggccccatctgcttcctaggacccctggggcaggagcacctgagccatccccttcccaaagagtagagattataatgtaggacagatggccacaagggcctaccaagtgccaggcactttcacacacgttatctcatttaatccttagaataatcctatgaggtagatattagtttcccttgttttgaagataaaccaaggctcagagagactgagtcatttgccccaggccagatagccaggatgtgagagagctgggatttgaacgtccgtctgactaactccatcgcccacaccccatgagagaagaatgaactcccagggtccatcagccctgctgcttcagccgcctccaccctgacggtgattcggttaataaagagtaagcccc

SEQ ID NO: 342228 - DNA, 1346 bp, Artificial Sequence
  derived and/or modified sequence
cctgtcctgtaggacctccctctcctgaggccaccactgggcccccttctgagtgtcccctgagcactctctcagcatgaactgcatatccgacttcttcacctatgagaccaccaagtcggtggttgtgaagagctggaccatcgggatcatcaaccgagtagttcagcttctgatcatctcctactttgtagggtgggttttcttgcacgagaaggcttaccaggtacgggacacagccattgagtcctcggtggtaaccaaggtgaagggctccggactctacgccaacagagtcatggatgtgtctgattacgtgacgccacctcagggcacctcggtctttgtcatcatcaccaagatgattgttactgaaaatcagatgcaaggattctgcccagagagtgaggagaaataccgctgtgtatcagacagccagtgcgggcctgagcgcttgccaggtggggggatcctcactggccgctgcgtgaactacagctctgtgctccggacctgtgagatccagggctggtgccccacggaggtggacacagtggaaacgcccatcatgatggaagctgagaacttcactattttcatcaagaacagcatccgtttccccctcttcaactttgagaagggaaacctccttcccaacctgacagccagggacatgaagacctgccgcttccacccggacaaggaccctttctgccccatcttgcgggtaggggacgtggtcaagtttgcggggcaggattttgccaaactggcgcgcacggggggagttctgggcattaagatcggctgggtgtgcgacttggacaaggcctgggaccagtgcatccccaaatactccttcacccggctcgacagcgtttctgagaaaagcagcgtgtccccaggctacaacttcaggtttgccaagtactacaaaatggaaaatggcagtgagtaccgcaccctcctgaaggcttttggcatccgcttcgacgtgctgtatacgggagctggcaagttcaacatcatccccaccatcatcagctctgtggcggcctttacttctgtgggagtgggaactgttctctgtgacatcatcctgctcaacttcctcaagggggccgaccagtacaaagccaagaagtttgaggaggtgaatgagactacgctgaaaatcgcggctttgaccaacccagtgtaccccagcgaccagaccacagcggagaagcagtccaccgattcgggggccttctccataggccactagggcctctttccagggccccacactcacaaaggctccaggcctccccacagaggaccctgcctgagcaaggggcatggga

SEQ ID NO: 342229 - DNA, 1194 bp, Artificial Sequence
  derived and/or modified sequence
atgaactgcatcagcgacttcttcacctacgagaccaccaagagcgtggtggtgaagagctggaccatcggcatcatcaacagagtggtgcagctgctgatcatcagctacttcgtgggctgggtgttcctgcacgagaaggcctaccaggtgagagacaccgccatcgagagcagcgtggtgaccaaggtgaagggcagcggcctgtacgccaacagagtgatggacgtgagcgactacgtgacccccccccagggcaccagcgtgttcgtgatcatcaccaagatgatcgtgaccgagaaccagatgcagggcttctgccccgagagcgaggagaagtacagatgcgtgagcgacagccagtgcggccccgagagactgcccggcggcggcatcctgaccggcagatgcgtgaactacagcagcgtgctgagaacctgcgagatccagggctggtgccccaccgaggtggacaccgtggagacccccatcatgatggaggccgagaacttcaccatcttcatcaagaacagcatcagattccccctgttcaacttcgagaagggcaacctgctgcccaacctgaccgccagagacatgaagacctgcagattccaccccgacaaggaccccttctgccccatcctgagagtgggcgacgtggtgaagttcgccggccaggacttcgccaagctggccagaaccggcggcgtgctgggcatcaagatcggctgggtgtgcgacctggacaaggcctgggaccagtgcatccccaagtacagcttcaccagactggacagcgtgagcgagaagagcagcgtgagccccggctacaacttcagattcgccaagtactacaagatggagaacggcagcgagtacagaaccctgctgaaggccttcggcatcagattcgacgtgctggtgtacggcaacgccggcaagttcaacatcatccccaccatcatcagcagcgtggccgccttcaccagcgtgggcgtgggcaccgtgctgtgcgacatcatcctgctgaacttcctgaagggcgccgaccagtacaaggccaagaagttcgaggaggtgaacgagaccaccctgaagatcgccgccctgaccaaccccgtgtaccccagcgaccagaccaccgccgagaagcagagcaccgacagcggcgccttcagcatcggccactag

SEQ ID NO: 342230 - DNA, 1191 bp, Artificial Sequence
  derived and/or modified sequence
atgaactgcatcagcgacttcttcacctacgagaccaccaagagcgtggtggtgaagagctggaccatcggcatcatcaacagagtggtgcagctgctgatcatcagctacttcgtgggctgggtgttcctgcacgagaaggcctaccaggtgagagacaccgccatcgagagcagcgtggtgaccaaggtgaagggcagcggcctgtacgccaacagagtgatggacgtgagcgactacgtgacccccccccagggcaccagcgtgttcgtgatcatcaccaagatgatcgtgaccgagaaccagatgcagggcttctgccccgagagcgaggagaagtacagatgcgtgagcgacagccagtgcggccccgagagactgcccggcggcggcatcctgaccggcagatgcgtgaactacagcagcgtgctgagaacctgcgagatccagggctggtgccccaccgaggtggacaccgtggagacccccatcatgatggaggccgagaacttcaccatcttcatcaagaacagcatcagattccccctgttcaacttcgagaagggcaacctgctgcccaacctgaccgccagagacatgaagacctgcagattccaccccgacaaggaccccttctgccccatcctgagagtgggcgacgtggtgaagttcgccggccaggacttcgccaagctggccagaaccggcggcgtgctgggcatcaagatcggctgggtgtgcgacctggacaaggcctgggaccagtgcatccccaagtacagcttcaccagactggacagcgtgagcgagaagagcagcgtgagccccggctacaacttcagattcgccaagtactacaagatggagaacggcagcgagtacagaaccctgctgaaggccttcggcatcagattcgacgtgctgtacaccggcgccggcaagttcaacatcatccccaccatcatcagcagcgtggccgccttcaccagcgtgggcgtgggcaccgtgctgtgcgacatcatcctgctgaacttcctgaagggcgccgaccagtacaaggccaagaagttcgaggaggtgaacgagaccaccctgaagatcgccgccctgaccaaccccgtgtaccccagcgaccagaccaccgccgagaagcagagcaccgacagcggcgccttcagcatcggccactag

SEQ ID NO: 342231 - protein, 377 aa, Artificial Sequence
  derived and/or modified sequence
MAADLGPWNDTINGTWDGDELGYRCRFNEDFKYVLLPVSYGVVCVPGLCLNAVALYIFLCRLKTWNASTTYMFHLAVSDALYAASLPLLVYYYARGDHWPFSTVLCKLVRFLFYTNLYCSILFLTCISVHRCLGVLRPLRSLRWGRARYARRVAGAVWVLVLACQAPVLYFVTTSARGGRVTCHDTSAPELFSRFVAYSSVMLGLLFAVPFAVILVCYVLMARRLLKPAYGTSGGLPRAKRKSVRTIAVVLAVFALCFLPFHVTRTLYYSFRSLDLSCHTLNAINMAYKVTRPLASANSCLDPVLYFLAGQRLVRFARDAKPPTGPSPATPARRRLGLRRSDRTDMQRIEDVLGSSEDSRRTESTPAGSENTKDIRL

SEQ ID NO: 342232 - DNA, 1134 bp, Artificial Sequence
  derived and/or modified sequence
atggccgcagacctgggcccctggaatgatacaattaacgggacatgggatggggacgaacttgggtatagatgtagatttaatgaggatttcaagtacgtcttgctgccagtatcctatggagtcgtgtgcgttcctgggttatgcttaaatgctgtggccctttacatcttcctttgtagattaaaaacttggaatgcgagcactacatacatgttccatctggcagtatccgacgctctctacgctgcgtctctcccgttacttgtgtactattacgccagaggagatcattggcccttcagcactgttctctgtaaattagttcggttcctcttctacacaaacctttactgctccattttatttttgacgtgtatttccgtgcacagatgcctcggcgtgctgcgccctctacgaagccttcgctggggacgcgcgcgatatgcaagaagggtggctggcgccgtttgggtcctcgtgctggcctgccaggcccccgtgctatattttgttactacgtctgcaaggggggggagggtgacatgtcacgacaccagtgccccagagctgttcagtcgatttgtcgcctattctagcgttatgctcggactcctcttcgcagtaccattcgccgtgattctggtgtgttacgtattgatggcccggaggctgctgaagcctgcttatggaacgtccggagggctccctcgtgcaaaaagaaagagtgtccggactattgccgtggtactggccgtttttgccctttgcttcttaccctttcacgtgacccgcactctgtactactcatttagatctctagacttatcttgccataccctgaatgctatcaacatggcgtataaagtaacaagaccactggcgtccgccaatagttgcctggatccggtgctgtatttcctagccggccagaggcttgtcaggtttgcccgcgacgcaaaaccccccaccggtccatcaccggccacccctgcaagacgacggttagggctgcgcaggtctgataggaccgatatgcagagaattgaagatgtacttggatcatcagaagattccaggcgaacagagagcactcctgcaggatctgagaatacaaaagatatcaggttgtag

SEQ ID NO: 342233 - DNA, 1134 bp, Artificial Sequence
  derived and/or modified sequence
atggcagcggaccttggaccctggaacgatacgatcaatgggacctgggacggcgacgagctcggttaccggtgcagattcaatgaggatttcaaatatgtactcctcccagtatcatacggcgtcgtgtgcgtgcccggcctgtgtctgaacgccgtggcactctatatctttctgtgcagactcaaaacgtggaacgcttcgacgacatacatgttccacctggccgtgtccgatgcactgtacgcggcatctctccctcttctggtgtattactacgcacgtggagaccactggccctttagcactgttctttgtaaactggtgcggtttctgttctatactaacctctactgcagtatcctttttctaacttgcattagcgttcaccgctgtctgggcgttctaagaccgttgcgatccttgcgctggggacgtgctcgttatgcccgccgtgtggcaggcgcagtatgggtcctggtgcttgcttgtcaagcccccgtgctgtactttgtgactacctctgcccgcggggggagagtgacgtgtcatgacacctccgccccagagctctttagcaggttcgtggcttattctagcgtgatgcttggcctactcttcgcagtgcccttcgccgtgatcctggtttgctatgttctgatggctcgccggttgctgaaacctgcatatggcacctccggcggcttgccaagggccaaacgcaaatcagtcaggactatcgccgtggtcctggcagtgtttgctctctgctttctgccctttcacgtcacaaggactctgtactattcttttcgatctctggacctgtcatgccacacccttaacgctatcaacatggcctataaggtgaccagaccgctggcttctgcaaatagctgtctggaccctgtgttgtatttcctcgcagggcaaaggcttgtacgatttgctcgggatgcaaagcccccgaccggtccgtcacctgccaccccagccagaaggagactgggactgcggcggtcggacagaaccgatatgcaacggattgaggacgtcctcggctccagcgaagacagccggcgaacagaatcaactcccgcggggtctgagaatacgaaggacattaggttgtag

SEQ ID NO: 342234 - DNA, 1134 bp, Artificial Sequence
  derived and/or modified sequence
atggctgccgatctaggaccttggaacgatacaattaatggcacatgggatggcgacgagttaggatatcggtgcaggtttaacgaagattttaaatacgtgttactgcccgtgagctacggcgtcgtctgcgttcctggactgtgccttaatgccgtggctttatatatcttcctatgcaggcttaagacttggaacgctagtaccacttatatgtttcatctggcagtcagtgatgccctgtatgcggcatccttaccattgctggtctactactatgctcgtggcgatcattggccattctccactgtcttatgcaagctcgtccgattcctattttataccaacctgtattgttcgatcctcttcctgacttgcatctctgtccaccgttgcctcggggtgctgcggcctctgcgatcacttaggtggggcagggctagatatgcgcgtcgagtagccggagcggtctgggtgctcgtgctggcctgccaggctcccgtcctttattttgttaccacctctgcaaggggggggagggtgacttgccatgacacctccgcccccgagttattctctagatttgtcgcttactcgtccgtgatgctgggacttctctttgctgtcccttttgccgtcatcctggtttgctatgttctaatggcccgcaggcttctgaagcccgcctacggcacatctggaggattgccccgggctaagagaaagagtgtgagaacgatagcagtggtgttagcagtgttcgccctgtgtttcctgcccttccatgttacccggaccctgtactactccttccgctctttggatctgagttgtcacaccctgaacgcaataaacatggcatataaggtgacccgcccactggcctcagcaaattcttgtctcgatcctgtgctctactttcttgccggacagagactagtcagattcgcacgagacgccaaacctcctacaggaccttcaccagcaactccggccaggagaagactgggactgagaagaagtgaccgcactgatatgcagcggatagaagacgtgctagggtcgagtgaagactcaagacgcaccgagtcgacgcccgcaggatctgagaacacgaaggacattcggctgtag

SEQ ID NO: 342235 - DNA, 1134 bp, Artificial Sequence
  derived and/or modified sequence
atggctgctgacctgggcccctggaatgacaccatcaatggcacctgggatggagatgagctgggctaccgctgccgcttcaatgaagacttcaagtatgtgctgctgcctgtgtcctatggagtggtgtgtgtgcccggcctgtgcctgaatgctgtggccctgtacatcttcctgtgccgcctgaagacctggaatgccagcaccacctacatgttccacctggccgtgtctgatgccctgtatgctgccagcctgcccctgctggtgtactactatgcccggggggaccactggcccttcagcacagtgctgtgcaagctggtgcgcttcctgttctacaccaacctgtactgcagcatcctcttcctgacctgcatctctgtgcaccgctgcctgggcgtgctgcggcccctgcggagcctgcgctggggccgggcccgctatgccaggagagtggccggggctgtgtgggtgctggtgctggcctgccaggcccctgtgctgtactttgtgaccaccagcgcccggggcggccgggtgacctgccacgacaccagcgcccctgagctgttcagcagatttgtggcctacagctctgtgatgctgggcctgctgtttgctgtgccctttgctgtgatcctggtgtgctacgtgctgatggcccggcggctgctgaagccagcctacggcaccagcggcggcctgccccgggccaagaggaagtctgtgaggaccatcgctgtggtgctggccgtgtttgccctgtgcttcctgcccttccacgtgaccaggaccctgtactacagcttccgcagcctggacctgagctgccacaccctgaatgccatcaacatggcctacaaggtgacccggcccctggccagcgccaacagctgcctggaccctgtgctgtacttcctggccggccagaggctggtgcgctttgccagagatgccaagccacccaccggccccagccctgccaccccagcccggcggcggctgggcctgcggcggagtgacagaacagacatgcagagaattgaagatgtgctgggcagcagcgaggacagcagaagaacagagagcaccccagctggcagcgagaacaccaaggacatccggctgtag

SEQ ID NO: 342236 - DNA, 1134 bp, Artificial Sequence
  derived and/or modified sequence
atggccgccgacctgggcccctggaacgacaccatcaacggcacctgggatggagatgagctgggatacagatgccggttcaatgaggactttaagtacgtgctccttccggtgtcatacggcgtcgtttgcgtcccagggctgtgtctgaacgccgtcgcactgtacatcttcctctgtcggttgaagacctggaatgcttcgacaacttacatgtttcacctcgcggtgtcggatgccttatacgctgccagcctgcccctgctggtttattactacgccagaggagatcactggcctttttcaactgttctgtgcaaactcgtccggttcttattttacacaaatctgtactgtagtatcctcttcctaacttgtattagcgtccataggtgtctcggggttcttcggcccttgcggagcctcagatgggggagagctcggtatgcacgccgggtagctggtgccgtctgggttctcgtactggcttgtcaagcacccgttctatactttgttaccacctcagcccggggggggagggttacctgtcatgacacgtctgcccccgagctgttctcccgctttgtggcatactctagcgtcatgcttggcctcttgtttgccgttcccttcgcggtcattctagtgtgctacgttctcatggcccgtagactgctcaagcctgcctatggaactagcggtggcctgccacgggctaagcgaaagtctgttcgcactattgctgttgtactggcggtgtttgccctatgcttccttcctttccacgttacaaggacattgtactacagcttccggtccttggacttatcttgccataccttgaatgctataaatatggcctacaaggtgacccgcccgctcgcaagcgcgaactcctgcctagatccagtactctacttcctggccggacagcgcttagtgaggttcgcccgcgacgctaaaccacccaccgggccatccccagctacccctgccaggcgacgactgggactgaggcggtctgaccgcaccgacatgcagagaattgaggacgtcctggggtcgagtgaagattcccgaagaacagaaagtaccccggctggctcagagaataccaaggatatacgtctgtag

SEQ ID NO: 342237 - DNA, 1134 bp, Artificial Sequence
  derived and/or modified sequence
atggccgccgacctgggcccctggaacgacaccatcaacggcacctgggatggagacgagctcgggtaccggtgcaggttcaacgaagatttcaaatacgttctcctgccagtgtcttacggagtagtgtgtgtacctgggctgtgtcttaacgcagtcgcgctgtatatctttctgtgccgccttaaaacctggaacgcctctacaacgtacatgttccacttggccgtttctgacgctctgtacgctgcgagtctgccacttctcgtctactactatgcaagaggcgaccactggccattctcgaccgtactctgcaagttggtgcggttcctgttctacactaatctgtactgctcgattctgtttttaacttgtatatcagtgcatcgctgcctcggcgtgctgcgacccctccgaagcctcaggtggggcagagcccgctacgcaagaagggtggccggcgctgtttgggtgttagtgctggcctgccaagctccagtactgtatttcgtgaccacctcagctaggggcgggcgtgtgacgtgtcacgacacatcagccccggagttgtttagtcggttcgtcgcctatagtagtgtgatgctggggctcctctttgccgtgcctttcgctgtcatcctggtttgttatgtgctcatggcgcggcgattactcaagcctgcttatggtacatccggcggccttccccgcgccaaacggaaaagcgtccgcaccattgccgtagttttagccgtcttcgccctctgcttcctgccatttcatgtcacgaggaccctctactatagttttcgaagcctcgacctctcctgtcatacgctgaatgccattaacatggcctacaaggtcacaaggccgctcgcctcggctaactcctgtctggatcctgtgctttactttctggcgggccagagactggtcaggtttgcacgggatgccaagccccccaccggtccttctcccgccaccccagctcgcaggaggctgggactcaggcgttccgatagaaccgacatgcagcgaatagaggacgtcctggggtcctccgaggatagtcgaagaaccgagagcaccccggcgggtagtgagaacaccaaggacatccgcttgtag

SEQ ID NO: 342238 - DNA, 1134 bp, Artificial Sequence
  derived and/or modified sequence
atggccgccgacctgggcccctggaacgacaccatcaacggcacctgggacggcgatgaactggggtacagatgtcgttttaacgaagatttcaagtatgtgctgctgcccgtttcctacggcgtagtttgcgtgcctgggctgtgcctgaatgccgtagcgctttacattttcctatgcaggcttaagacctggaacgctagcactacttacatgttccacttggccgtctcagatgcattatatgcggcatccttgccgctgcttgtttattactacgcgaggggggatcactggcccttctccaccgttctgtgcaagctcgtgaggttcctcttctacacaaacctgtattgttccattctttttctcacctgtatttccgtgcaccgctgcctgggggtgctgcggccactgcgcagtctgagatggggacgggccaggtatgccagaagggtggccggagccgtgtgggtcctcgtcctggcctgccaggcccccgtgctctattttgtgaccacatcggcccgaggcggccgggttacatgccatgacacgtctgctcctgagctgtttagtcgctttgtagcatattcatctgtcatgcttgggctgctgttcgccgtgccatttgccgtgattttagtgtgctatgtgttgatggcgcgaaggctccttaaacctgcgtatgggacctccggagggcttcctagggccaaacggaaatcggtgcgcacaatagcagtagttctggctgtattcgctttgtgcttcctgcccttccatgttacccgtactctatattactcattccgctctcttgaccttagctgtcatactctgaacgcaattaacatggcttataaggtcacccgtccattggcaagcgccaattcctgcctggaccccgttctgtattttttggccgggcagaggctagtgagattcgcccgtgatgctaagccgcctactggcccctcacctgccactcccgccaggagacggctggggcttagacgatctgacagaactgatatgcagagaatcgaagatgtattgggctctagcgaagattcccgtcgaactgagtcgacgcccgccggcagtgagaataccaaggatattaggctgtag

SEQ ID NO: 342239 - DNA, 1134 bp, Artificial Sequence
  derived and/or modified sequence
atggccgcagacctgggcccatggaatgatacaataaacggaacctgggacggagatgagctggggtatcgctgcagatttaacgaggacttcaaatacgttttattgcccgtgagctatggggtagtttgtgtgcccggtctgtgcctaaacgccgtggcactgtacatttttctgtgccgactcaaaacctggaatgcctctacaacatacatgttccacctggcagtttccgacgctctgtatgctgctagtcttcccctgctggtgtactattatgctcggggtgaccactggcctttcagcaccgtattgtgcaagctggttcgctttctcttctacaccaatttgtactgctccattctgtttctaacatgcatctctgtccatagatgcttaggggttctgcggcctctccggtccctgagatggggcagggctcggtacgcccgtcgggtggcgggagccgtttgggtgctggtgttggcttgtcaagcacctgtgctatattttgttactacgtcggctcggggtggtcgtgtgacatgccatgatacatcagcccctgagttgttctcgcgctttgtagcctatagcagcgtgatgctgggcctgttgttcgccgtgccgtttgctgtcatcttggtgtgttacgtgctgatggccagacgcttattgaagccggcatacggaacaagcggcggactccccagggcaaagagaaagtctgtgaggaccatcgcagtggtgttagccgtgttcgctctgtgttttctgccttttcatgttactcggaccctgtactattcattcaggtcactggacctaagctgccacaccctgaatgctatcaacatggcctacaaggtaacccggcctctggcctctgcaaattcatgtctggatccggtgctctattttctcgccggacagagactggtgcgcttcgccagagatgccaagccacccaccggaccctcacctgcgacccctgcaagaaggcggctgggccttcgcagatccgataggactgacatgcaacgaatagaagacgttttgggttcctctgaagacagtaggcgaaccgaaagtacaccggctgggagtgagaatacaaaagatatcagattgtag

SEQ ID NO: 342240 - DNA, 1134 bp, Artificial Sequence
  derived and/or modified sequence
atggctgctgacctaggaccctggaacgataccatcaatgggacatgggacggagacgaactcggctaccggtgccgattcaatgaagacttcaaatacgtcctgcttccggtgagctacggcgtagtgtgcgttcctggcctgtgtctgaacgctgttgcactgtatatttttctctgccgactgaaaacttggaacgcaagtacaacttatatgtttcacttggccgtcagcgatgctctctacgcagccagcctgccgcttttggtctactactacgctaggggtgaccactggccattctcaaccgttctctgtaaactggtacggttcctcttttataccaatctgtactgctcaatactgtttttgacctgcattagcgtgcaccggtgtttaggggtcttaaggcctttgcggagtctgcgttggggcagggcgaggtacgcgaggcgagtagcgggagccgtgtgggtcctggtcctggcttgtcaggccccagtgctttactttgtcacaaccagcgctagggggggaagagtcacatgtcatgacacctctgctccagagctgttctctagattcgtggcatacagtagcgtgatgttaggcctgctctttgcagtgccgttcgccgtgattttggtctgttacgtccttatggctcggaggctcctgaaacccgcatatggaacatctggtggcctccctcgcgcaaagcgcaaatcggtgcgtaccatagctgtcgtgttagcagtgtttgcactgtgctttctgccatttcacgtgaccagaacactgtactactcctttcgaagcttagacttgagttgccacaccctgaacgccatcaacatggcttacaaggtcacccgcccactggcctctgcaaactcctgtctggaccctgtcctgtattttctcgccggtcagaggctagtgaggtttgccagggacgcaaagccccctaccggcccttcacctgccacccctgctcgccgtcgattaggacttcgcagaagcgatcgcacggacatgcagcgcattgaagacgtcctgggtagctctgaggattcccgacggaccgagagcacacctgccggatctgagaatacgaaagacatccggctgtag

SEQ ID NO: 342241 - DNA, 1134 bp, Artificial Sequence
  derived and/or modified sequence
atggcagcagatctagggccatggaatgacaccattaacggaacatgggatggggacgagctgggctatcggtgccggttcaatgaggattttaagtacgttctcctgcccgtttcctacggcgtagtgtgtgtgccaggcctctgcttgaacgccgttgctctgtacattttcctttgcagactcaagacgtggaatgcttcgacgacgtatatgtttcacttagccgtatccgatgcactttacgcagcttctcttcccctcttagtctactactacgcacgcggagaccattggccgttttcaacagtactgtgtaaactcgtcagattcttattttacaccaacctgtactgttctatcctctttctgacatgcatctccgtgcatcggtgtctcggggttctgagacctttgcgatcgctgagatggggccgtgcacggtatgcccgtagggtcgcaggagccgtgtgggttctggtgctggcctgtcaggcaccagtgttatatttcgtcacgacaagcgcacgaggaggacgtgtgacttgccacgacacatccgcacccgaactgttctcacgcttcgtagcatattcctcagttatgttgggtcttctgtttgcagtgcctttcgccgtgatcttagtttgttacgtcctgatggctcggaggctcttaaagcctgcatacgggacttccggaggactgccaagggctaagagaaaaagtgtccgtacgattgccgttgtacttgccgtgtttgctctgtgctttcttccatttcatgtgacccgcaccctgtactacagttttaggtctctggacctgtcgtgccataccttgaatgcaattaacatggcgtacaaggtgactagaccactcgcttcagccaacagctgtctcgaccccgtgctgtatttccttgccggtcagagattggttcggttcgcaagagatgcgaaacctcctaccgggccttctcctgctacgcccgctcgacgccgtctaggattgaggcggtcagatcgaaccgatatgcagcggatcgaggatgttcttggctcctctgaggatagtagaagaacagaatctacgccagcgggatccgaaaacactaaggatatccgactgtag

SEQ ID NO: 342242 - DNA, 2660 bp, Artificial Sequence
  derived and/or modified sequence
gaacagcgcagggaggtgggtagccgggctcccaggcacgtgggtctctgcggctgcggcgggacccgggcactggcacccgggagcggcggcgacggcaccctgagaggagaagcgcagcgcagtggcgagaggagccccttgtggcagcagcactacctgcccagaaaaatgctggaggctgggcgtggccccaggcctggggacctgtttttcctgtttcccgcagagttccctgcagcccggtccaggtccaggcgtgtgcattcatgagtgaggaacccgtgcaggcgctgagcatcctgacctggagagcaggggctggtcaggttccagagcttggaggttccaggtccagatccaagtcagatggcaatgaaagccctggtcaggtggctgtgtcaggtcccctaggggcgctccggccacaaccctgatggccccacccctcccttccctgcagggcgatggcagcagacctgggcccctggaatgacaccatcaatggcacctgggatggggatgagctgggctacaggtgccgcttcaacgaggacttcaagtacgtgctgctgcctgtgtcctacggcgtggtgtgcgtgcctgggctgtgtctgaacgccgtggcgctctacatcttcttgtgccgcctcaagacctggaatgcgtccaccacatatatgttccacctggctgtgtctgatgcactgtatgcggcctccctgccgctgctggtctattactacgcccgcggcgaccactggcccttcagcacggtgctctgcaagctggtgcgcttcctcttctacaccaacctttactgcagcatcctcttcctcacctgcatcagcgtgcaccggtgtctgggcgtcttacgacctctgcgctccctgcgctggggccgggcccgctacgctcgccgggtggccggggccgtgtgggtgttggtgctggcctgccaggcccccgtgctctactttgtcaccaccagcgcgcgcgggggccgcgtaacctgccacgacacctcggcacccgagctcttcagccgcttcgtggcctacagctcagtcatgctgggcctgctcttcgcggtgccctttgccgtcatccttgtctgttacgtgctcatggctcggcgactgctaaagccagcctacgggacctcgggcggcctgcctagggccaagcgcaagtccgtgcgcaccatcgccgtggtgctggctgtcttcgccctctgcttcctgccattccacgtcacccgcaccctctactactccttccgctcgctggacctcagctgccacaccctcaacgccatcaacatggcctacaaggttacccggccgctggccagtgctaacagttgccttgaccccgtgctctacttcctggctgggcagaggctcgtacgctttgcccgagatgccaagccacccactggccccagccctgccaccccggctcgccgcaggctgggcctgcgcagatccgacagaactgacatgcagaggatagaagatgtgttgggcagcagtgaggactctaggcggacagagtccacgccggctggtagcgagaacactaaggacattcggctgtaggagcagaacacttcagcctgtgcaggtttatattgggaagctgtagaggaccaggacttgtgcagacgccacagtctccccagatatggaccatcagtgactcatgctggatgaccccatgctccgtcatttgacaggggctcaggatattcactctgtggtccagagtcaactgttcccataacccctagtcatcgtttgtgtgtataagttgggggaattaagtttcaagaaaggcaagagctcaaggtcaatgacacccctggcctgactcccatgcaagtagctggctgtactgccaaggtacctaggttggagtccagcctaatcaagtcaaatggagaaacaggcccagagaggaaggtggcttaccaagatcacataccagagtctggagctgagctacctggggtgggggccaagtcacaggttggccagaaaaccctggtaagtaatgagggctgagtttgcacagtggtctggaatggactgggtgccacggtggacttagctctgaggagtacccccagcccaagagatgaacatctggggactaatatcatagacccatctggaggctcccatgggctaggagccagtgtgaggctgtaacttatactaaaggttgtgttgcctgctgagctgtgccctattgtgtggtcgggggatgaggatatggcagggaagctttcaccagccacacaagggtcctttctccaatccgttcccttctgccacctgccttctcactagctgtctcaggagtagtctcatatcagggatcctctctccaggccccaggtcatcccccactgtaaagccagttggcttctgtgcctgactctgtgctgagcacagagaaaagtcaggtgcagtcccagtccttgagatttcccagtttaggtgatggccagtcatgtgctggtaaatgttaagccatttaactggagctccgatttaactgggaaccccttctttgtagaactgcccatttccatggtgcaaaaactcttatggccaaattcaaactataaacatgatgtcaacttccttgtaaaa

SEQ ID NO: 342243 - DNA, 2174 bp, Artificial Sequence
  derived and/or modified sequence
caaggcgctgggagaggcccggggaagcggcgggccagactggcgcaggtgcggactgggcgcggggcaggggagggcgctgtggagcggctgtcgccccggggcacagttgcgagccggcgtgtagcgcataactggacggcttgaacgcgcctgtgggtccgtggttgaactttgtctccacgggagcgtcggtctcggagccccttgtggcagcagcactacctgcccagaaaaatgctggaggctgggcgtggccccaggcctggggacctgtttttcctgtttcccgcagagttccctgcagcccggtccaggtccaggcgtgtgcattcatgagtgaggaacccgtgcaggcgctgagcatcctgacctggagagcaggggctggtcagggcgatggcagcagacctgggcccctggaatgacaccatcaatggcacctgggatggggatgagctgggctacaggtgccgcttcaacgaggacttcaagtacgtgctgctgcctgtgtcctacggcgtggtgtgcgtgcctgggctgtgtctgaacgccgtggcgctctacatcttcttgtgccgcctcaagacctggaatgcgtccaccacatatatgttccacctggctgtgtctgatgcactgtatgcggcctccctgccgctgctggtctattactacgcccgcggcgaccactggcccttcagcacggtgctctgcaagctggtgcgcttcctcttctacaccaacctttactgcagcatcctcttcctcacctgcatcagcgtgcaccggtgtctgggcgtcttacgacctctgcgctccctgcgctggggccgggcccgctacgctcgccgggtggccggggccgtgtgggtgttggtgctggcctgccaggcccccgtgctctactttgtcaccaccagcgcgcgcgggggccgcgtaacctgccacgacacctcggcacccgagctcttcagccgcttcgtggcctacagctcagtcatgctgggcctgctcttcgcggtgccctttgccgtcatccttgtctgttacgtgctcatggctcggcgactgctaaagccagcctacgggacctcgggcggcctgcctagggccaagcgcaagtccgtgcgcaccatcgccgtggtgctggctgtcttcgccctctgcttcctgccattccacgtcacccgcaccctctactactccttccgctcgctggacctcagctgccacaccctcaacgccatcaacatggcctacaaggttacccggccgctggccagtgctaacagttgccttgaccccgtgctctacttcctggctgggcagaggctcgtacgctttgcccgagatgccaagccacccactggccccagccctgccaccccggctcgccgcaggctgggcctgcgcagatccgacagaactgacatgcagaggatagaagatgtgttgggcagcagtgaggactctaggcggacagagtccacgccggctggtagcgagaacactaaggacattcggctgtaggagcagaacacttcagcctgtgcaggtttatattgggaagctgtagaggaccaggacttgtgcagacgccacagtctccccagatatggaccatcagtgactcatgctggatgaccccatgctccgtcatttgacaggggctcaggatattcactctgtggtccagagtcaactgttcccataacccctagtcatcgtttgtgtgtataagttgggggaattaagtttcaagaaaggcaagagctcaaggtcaatgacacccctggcctgactcccatgcaagtagctggctgtactgccaaggtacctaggttggagtccagcctaatcaagtcaaatggagaaacaggcccagagaggaaggtggcttaccaagatcacataccagagtctggagctgagctacctggggtgggggccaagtcacaggttggccagaaaaccctggtaagtaatgagggctgagtttgcacagtggtctggaatggactgggtgccacggtggacttagctctgaggagtacccccagcccaagagatgaacatctggggactaatatcatagacccatctggaggctcccatgggctaggagccagtgtgaggctgtaacttatactaaaggttgtgttgcctgctga

SEQ ID NO: 342244 - DNA, 2107 bp, Artificial Sequence
  derived and/or modified sequence
ggaacagcgcagggaggtgggtagccgggctcccaggcacgtgggtctctgcggctgcggcgggacccgggcactggcacccgggagcggcggcgacggcaccctgagaggagaagcgcagcgcagtggcgagaggagccccttgtggcagcagcactacctgcccagaaaaatgctggaggctgggcgtggccccaggcctggggacctgtttttcctgtttcccgcagagttccctgcagcccggtccaggtccaggcgtgtgcattcatgagtgaggaacccgtgcaggcgctgagcatcctgacctggagagcaggggctggtcagggcgatggcagcagacctgggcccctggaatgacaccatcaatggcacctgggatggggatgagctgggctacaggtgccgcttcaacgaggacttcaagtacgtgctgctgcctgtgtcctacggcgtggtgtgcgtgcctgggctgtgtctgaacgccgtggcgctctacatcttcttgtgccgcctcaagacctggaatgcgtccaccacatatatgttccacctggctgtgtctgatgcactgtatgcggcctccctgccgctgctggtctattactacgcccgcggcgaccactggcccttcagcacggtgctctgcaagctggtgcgcttcctcttctacaccaacctttactgcagcatcctcttcctcacctgcatcagcgtgcaccggtgtctgggcgtcttacgacctctgcgctccctgcgctggggccgggcccgctacgctcgccgggtggccggggccgtgtgggtgttggtgctggcctgccaggcccccgtgctctactttgtcaccaccagcgcgcgcgggggccgcgtaacctgccacgacacctcggcacccgagctcttcagccgcttcgtggcctacagctcagtcatgctgggcctgctcttcgcggtgccctttgccgtcatccttgtctgttacgtgctcatggctcggcgactgctaaagccagcctacgggacctcgggcggcctgcctagggccaagcgcaagtccgtgcgcaccatcgccgtggtgctggctgtcttcgccctctgcttcctgccattccacgtcacccgcaccctctactactccttccgctcgctggacctcagctgccacaccctcaacgccatcaacatggcctacaaggttacccggccgctggccagtgctaacagttgccttgaccccgtgctctacttcctggctgggcagaggctcgtacgctttgcccgagatgccaagccacccactggccccagccctgccaccccggctcgccgcaggctgggcctgcgcagatccgacagaactgacatgcagaggatagaagatgtgttgggcagcagtgaggactctaggcggacagagtccacgccggctggtagcgagaacactaaggacattcggctgtaggagcagaacacttcagcctgtgcaggtttatattgggaagctgtagaggaccaggacttgtgcagacgccacagtctccccagatatggaccatcagtgactcatgctggatgaccccatgctccgtcatttgacaggggctcaggatattcactctgtggtccagagtcaactgttcccataacccctagtcatcgtttgtgtgtataagttgggggaattaagtttcaagaaaggcaagagctcaaggtcaatgacacccctggcctgactcccatgcaagtagctggctgtactgccaaggtacctaggttggagtccagcctaatcaagtcaaatggagaaacaggcccagagaggaaggtggcttaccaagatcacataccagagtctggagctgagctacctggggtgggggccaagtcacaggttggccagaaaaccctggtaagtaatgagggctgagtttgcacagtggtctggaatggactgggtgccacggtggacttagctctgaggagtacccccagcccaagagatgaacatctggggactaatatcatagacccatctggaggctcccatgggctaggagccagtgtgaggctgtaacttatactaaaggttgtgttgcctgct

SEQ ID NO: 342245 - DNA, 1134 bp, Artificial Sequence
  derived and/or modified sequence
atggccgccgacctgggcccctggaacgacaccatcaacggcacctgggacggcgacgagctgggctacagatgcagattcaacgaggacttcaagtacgtgctgctgcccgtgagctacggcgtggtgtgcgtgcccggcctgtgcctgaacgccgtggccctgtacatcttcctgtgcagactgaagacctggaacgccagcaccacctacatgttccacctggccgtgagcgacgccctgtacgccgccagcctgcccctgctggtgtactactacgccagaggcgaccactggcccttcagcaccgtgctgtgcaagctggtgagattcctgttctacaccaacctgtactgcagcatcctgttcctgacctgcatcagcgtgcacagatgcctgggcgtgctgagacccctgagaagcctgagatggggcagagccagatacgccagaagagtggccggcgccgtgtgggtgctggtgctggcctgccaggcccccgtgctgtacttcgtgaccaccagcgccagaggcggcagagtgacctgccacgacaccagcgcccccgagctgttcagcagattcgtggcctacagcagcgtgatgctgggcctgctgttcgccgtgcccttcgccgtgatcctggtgtgctacgtgctgatggccagaagactgctgaagcccgcctacggcaccagcggcggcctgcccagagccaagagaaagagcgtgagaaccatcgccgtggtgctggccgtgttcgccctgtgcttcctgcccttccacgtgaccagaaccctgtactacagcttcagaagcctggacctgagctgccacaccctgaacgccatcaacatggcctacaaggtgaccagacccctggccagcgccaacagctgcctggaccccgtgctgtacttcctggccggccagagactggtgagattcgccagagacgccaagccccccaccggccccagccccgccacccccgccagaagaagactgggcctgagaagaagcgacagaaccgacatgcagagaatcgaggacgtgctgggcagcagcgaggacagcagaagaaccgagagcacccccgccggcagcgagaacaccaaggacatcagactgtag

SEQ ID NO: 342246 - protein, 328 aa, Artificial Sequence
  derived and/or modified sequence
MEWDNGTGQALGLPPTTCVYRENFKQLLLPPVYSAVLAAGLPLNICVITQICTSRRALTRTAVYTLNLALADLLYACSLPLLIYNYAQGDHWPFGDFACRLVRFLFYANLHGSILFLTCISFQRYLGICHPLAPWHKRGGRRAAWLVCVAVWLAVTTQCLPTAIFAATGIQRNRTVCYDLSPPALATHYMPYGMALTVIGFLLPFAALLACYCLLACRLCRQDGPAEPVAQERRGKAARMAVVVAAAFAISFLPFHITKTAYLAVRSTPGVPCTVLEAFAAAYKGTRPFASANSVLDPILFYFTQKKFRRRPHELLQKLTAKWQRQGR

SEQ ID NO: 342247 - protein, 128 aa, Artificial Sequence
  derived and/or modified sequence
MEWDNGTGQALGLPPTTCVYRENFKQLLLPPVYSAVLAAGLPLNICVITQICTSRRALTRTAVYTLNLALADLLYACSLPLLIYNYAQGDHWPFGDFACRLVRFLFYANLHGSILFLTCISFQRYLGI

SEQ ID NO: 342248 - DNA, 1700 bp, Artificial Sequence
  derived and/or modified sequence
tctgggttccagggacgctggggccggagctgctgccgccgtctacacggtcccctcatttgacgggttcgcctcctagcagcgcctgggcgagtgacatctgggccggaccagctggtgctgcgcggcgcaggtctctcggtttcctcatctgctgcctctccagacttctgccagaacattgcacgcgacagtttcaggcacagaactgactggcagcaggggctgctccacgagtgggaatttgctccagcacttcacggactgcaagcgaggcacttgctaactcttggataacaagacctctgccagaagaaccatggctttggaaggcggagttcaggctgaggagatgggtgcggtcctcagtgagcccctgcctccctgaacataggaaacccacctgggcagccatggaatgggacaatggcacaggccaggctctgggcttgccacccaccacctgtgtctaccgcgagaacttcaagcaactgctgctgccacctgtgtattcggcggtgctggcggctggcctgccgctgaacatctgtgtcattacccagatctgcacgtcccgccgggccctgacccgcacggccgtgtacaccctaaaccttgctctggctgacctgctatatgcctgctccctgcccctgctcatctacaactatgcccaaggtgatcactggccctttggcgacttcgcctgccgcctggtccgcttcctcttctatgccaacctgcacggcagcatcctcttcctcacctgcatcagcttccagcgctacctgggcatctgccacccgctggccccctggcacaaacgtgggggccgccgggctgcctggctagtgtgtgtagccgtgtggctggccgtgacaacccagtgcctgcccacagccatcttcgctgccacaggcatccagcgtaaccgcactgtctgctatgacctcagcccgcctgccctggccacccactatatgccctatggcatggctctcactgtcatcggcttcctgctgccctttgctgccctgctggcctgctactgtctcctggcctgccgcctgtgccgccaggatggcccggcagagcctgtggcccaggagcggcgtggcaaggcggcccgcatggccgtggtggtggctgctgcctttgccatcagcttcctgccttttcacatcaccaagacagcctacctggcagtgcgctcgacgccgggcgtcccctgcactgtattggaggcctttgcagcggcctacaaaggcacgcggccgtttgccagtgccaacagcgtgctggaccccatcctcttctacttcacccagaagaagttccgccggcgaccacatgagctcctacagaaactcacagccaaatggcagaggcagggtcgctgagtcctccaggtcctgggcagccttcatatttgccattgtgtccggggcaccaggagccccaccaaccccaaaccatgcggagaattagagttcagctcagctgggcatggagttaagatccctcacaggacccagaagctcaccaaaaactatttcttcagccccttctctggcccagaccctgtgggcatggagatggacagacctgggcctggctcttgagaggtcccagtcagccatggagagctggggaaaccacattaaggtgctcacaaaaatacagtgtgacgtgtactgtca

SEQ ID NO: 342249 - DNA, 1829 bp, Artificial Sequence
  derived and/or modified sequence
aaggacagaggaggggcccttcctgtcagctggctgggagcagaggtggctttgtcttttcggaagaactggttctgtggaatttgtgcttatttcccatcaaggatcaaggacctgctctggggctacctcagggccccacaggatgaggggctggttttcagatgagttttctgcttgcctgtcatctggatagtgtctaaaaatttgcaaactgccttcttgtcagtgtcttgctcattcttcatgacactcctgatatgtctctcggtttcctcatctgctgcctctccagacttctgccagaacattgcacgcgacagtttcaggcacagaactgactggcagcaggggctgctccacgagtgggaatttgctccagcacttcacggactgcaagcgaggcacttgctaactcttggataacaagacctctgccagaagaaccatggctttggaaggcggagttcaggctgaggagatgggtgcggtcctcagtgagcccctgcctccctgaacataggaaacccacctgggcagccatggaatgggacaatggcacaggccaggctctgggcttgccacccaccacctgtgtctaccgcgagaacttcaagcaactgctgctgccacctgtgtattcggcggtgctggcggctggcctgccgctgaacatctgtgtcattacccagatctgcacgtcccgccgggccctgacccgcacggccgtgtacaccctaaaccttgctctggctgacctgctatatgcctgctccctgcccctgctcatctacaactatgcccaaggtgatcactggccctttggcgacttcgcctgccgcctggtccgcttcctcttctatgccaacctgcacggcagcatcctcttcctcacctgcatcagcttccagcgctacctgggcatctgccacccgctggccccctggcacaaacgtgggggccgccgggctgcctggctagtgtgtgtagccgtgtggctggccgtgacaacccagtgcctgcccacagccatcttcgctgccacaggcatccagcgtaaccgcactgtctgctatgacctcagcccgcctgccctggccacccactatatgccctatggcatggctctcactgtcatcggcttcctgctgccctttgctgccctgctggcctgctactgtctcctggcctgccgcctgtgccgccaggatggcccggcagagcctgtggcccaggagcggcgtggcaaggcggcccgcatggccgtggtggtggctgctgcctttgccatcagcttcctgccttttcacatcaccaagacagcctacctggcagtgcgctcgacgccgggcgtcccctgcactgtattggaggcctttgcagcggcctacaaaggcacgcggccgtttgccagtgccaacagcgtgctggaccccatcctcttctacttcacccagaagaagttccgccggcgaccacatgagctcctacagaaactcacagccaaatggcagaggcagggtcgctgagtcctccaggtcctgggcagccttcatatttgccattgtgtccggggcaccaggagccccaccaaccccaaaccatgcggagaattagagttcagctcagctgggcatggagttaagatccctcacaggacccagaagctcaccaaaaactatttcttcagccccttctctggcccagaccctgtgggcatggagatggacagacctgggcctggctcttgagaggtcccagtcagccatggagagctggggaaaccacattaaggtgctcacaaaaatacagtgtgacgtgtactgtca

SEQ ID NO: 342250 - DNA, 1515 bp, Artificial Sequence
  derived and/or modified sequence
gccggagctgctgccgccgtctacacggtcccctcatttgacgggttcgcctcctagcagcgcctgggcgagtgacatctgggccggaccagctggtgctgcgcggcgcagataacaagacctctgccagaagaaccatggctttggaaggcggagttcaggctgaggagatgggtgcggtcctcagtgagcccctgcctccctgaacataggaaacccacctgggcagccatggaatgggacaatggcacaggccaggctctgggcttgccacccaccacctgtgtctaccgcgagaacttcaagcaactgctgctgccacctgtgtattcggcggtgctggcggctggcctgccgctgaacatctgtgtcattacccagatctgcacgtcccgccgggccctgacccgcacggccgtgtacaccctaaaccttgctctggctgacctgctatatgcctgctccctgcccctgctcatctacaactatgcccaaggtgatcactggccctttggcgacttcgcctgccgcctggtccgcttcctcttctatgccaacctgcacggcagcatcctcttcctcacctgcatcagcttccagcgctacctgggcatctgccacccgctggccccctggcacaaacgtgggggccgccgggctgcctggctagtgtgtgtagccgtgtggctggccgtgacaacccagtgcctgcccacagccatcttcgctgccacaggcatccagcgtaaccgcactgtctgctatgacctcagcccgcctgccctggccacccactatatgccctatggcatggctctcactgtcatcggcttcctgctgccctttgctgccctgctggcctgctactgtctcctggcctgccgcctgtgccgccaggatggcccggcagagcctgtggcccaggagcggcgtggcaaggcggcccgcatggccgtggtggtggctgctgcctttgccatcagcttcctgccttttcacatcaccaagacagcctacctggcagtgcgctcgacgccgggcgtcccctgcactgtattggaggcctttgcagcggcctacaaaggcacgcggccgtttgccagtgccaacagcgtgctggaccccatcctcttctacttcacccagaagaagttccgccggcgaccacatgagctcctacagaaactcacagccaaatggcagaggcagggtcgctgagtcctccaggtcctgggcagccttcatatttgccattgtgtccggggcaccaggagccccaccaaccccaaaccatgcggagaattagagttcagctcagctgggcatggagttaagatccctcacaggacccagaagctcaccaaaaactatttcttcagccccttctctggcccagaccctgtgggcatggagatggacagacctgggcctggctcttgagaggtcccagtcagccatggagagctggggaaaccacattaaggtgctcacaaaaatacagtgtgacgtgtactg

SEQ ID NO: 342251 - DNA, 800 bp, Artificial Sequence
  derived and/or modified sequence
ccagtggctcctgtgaccacatcgaccaggcctccctgaacataggaaacccacctgggcagccatggaatgggacaatggcacaggccaggctctgggcttgccacccaccacctgtgtctaccgcgagaacttcaagcaactgctgctgccacctgtgtattcggcggtgctggcggctggcctgccgctgaacatctgtgtcattacccagatctgcacgtcccgccgggccctgacccgcacggccgtgtacaccctaaaccttgctctggctgacctgctatatgcctgctccctgcccctgctcatctacaactatgcccaaggtgatcactggccctttggcgacttcgcctgccgcctggtccgcttcctcttctatgccaacctgcacggcagcatcctcttcctcacctgcatcagcttccagcgctacctgggcatctgccacccgctggccccctggcacaaacgtgggggccgccgggctgcctggctagtgtgtgtagccgtgtggctggccgtgacaacccagtgcctgcccacagccatcttcgctgccacaggcatccagcgtaaccgcactgtctgctatgacctcagcccgcctgccctggccacccactatatgccctatggcatggctctcactgtcatcggcttcctgctgccctttgctgccctgctggcctgctactgtctcctggcctgccgcctgtgccgccaggatggcccggcagagcctgtggcccaggagcggcgtggcaaggcggcccgcatggccgtggtggtggctg

SEQ ID NO: 342252 - DNA, 1425 bp, Artificial Sequence
  derived and/or modified sequence
gaaacagaggaagctgctcactctgtcagagaagttgcagcctagctgagggcaggagagtggggagcctcaggtctggcttccctttgccccaacacacttgggaccaccagcgtgctgcagggacaggaggctgcctcctccctgaacataggaaacccacctgggcagccatggaatgggacaatggcacaggccaggctctgggcttgccacccaccacctgtgtctaccgcgagaacttcaagcaactgctgctgccacctgtgtattcggcggtgctggcggctggcctgccgctgaacatctgtgtcattacccagatctgcacgtcccgccgggccctgacccgcacggccgtgtacaccctaaaccttgctctggctgacctgctatatgcctgctccctgcccctgctcatctacaactatgcccaaggtgatcactggccctttggcgacttcgcctgccgcctggtccgcttcctcttctatgccaacctgcacggcagcatcctcttcctcacctgcatcagcttccagcgctacctgggcatctgccacccgctggccccctggcacaaacgtgggggccgccgggctgcctggctagtgtgtgtagccgtgtggctggccgtgacaacccagtgcctgcccacagccatcttcgctgccacaggcatccagcgtaaccgcactgtctgctatgacctcagcccgcctgccctggccacccactatatgccctatggcatggctctcactgtcatcggcttcctgctgccctttgctgccctgctggcctgctactgtctcctggcctgccgcctgtgccgccaggatggcccggcagagcctgtggcccaggagcggcgtggcaaggcggcccgcatggccgtggtggtggctgctgcctttgccatcagcttcctgccttttcacatcaccaagacagcctacctggcagtgcgctcgacgccgggcgtcccctgcactgtattggaggcctttgcagcggcctacaaaggcacgcggccgtttgccagtgccaacagcgtgctggaccccatcctcttctacttcacccagaagaagttccgccggcgaccacatgagctcctacagaaactcacagccaaatggcagaggcagggtcgctgagtcctccaggtcctgggcagccttcatatttgccattgtgtccggggcaccaggagccccaccaaccccaaaccatgcggagaattagagttcagctcagctgggcatggagttaagatccctcacaggacccagaagctcaccaaaaactatttcttcagccccttctctggcccagaccctgtgggcatggagatggacagacctgggcctggctcttgagaggtcccagtcagccatggagagctggggaaaccacattaag

SEQ ID NO: 342253 - DNA, 1611 bp, Artificial Sequence
  derived and/or modified sequence
tgctctggctcctctgggttccagggacgctggggccggagctgctgccgccgtctacacggtcccctcatttgacgggttcgcctcctagcagcgcctgggcgagtgacatctgggccggaccagctggtgctgcgcggcgcaggtctctcggtttcctcatctgctgcctctccagacttctgccagaacattgcacgcgacagtttcaggcacagaactgactggcagcaggggctgctccacgagtgggaatttgctccagcacttcacggactgcaagcgaggcacttgctaactcttggcctccctgaacataggaaacccacctgggcagccatggaatgggacaatggcacaggccaggctctgggcttgccacccaccacctgtgtctaccgcgagaacttcaagcaactgctgctgccacctgtgtattcggcggtgctggcggctggcctgccgctgaacatctgtgtcattacccagatctgcacgtcccgccgggccctgacccgcacggccgtgtacaccctaaaccttgctctggctgacctgctatatgcctgctccctgcccctgctcatctacaactatgcccaaggtgatcactggccctttggcgacttcgcctgccgcctggtccgcttcctcttctatgccaacctgcacggcagcatcctcttcctcacctgcatcagcttccagcgctacctgggcatctgccacccgctggccccctggcacaaacgtgggggccgccgggctgcctggctagtgtgtgtagccgtgtggctggccgtgacaacccagtgcctgcccacagccatcttcgctgccacaggcatccagcgtaaccgcactgtctgctatgacctcagcccgcctgccctggccacccactatatgccctatggcatggctctcactgtcatcggcttcctgctgccctttgctgccctgctggcctgctactgtctcctggcctgccgcctgtgccgccaggatggcccggcagagcctgtggcccaggagcggcgtggcaaggcggcccgcatggccgtggtggtggctgctgcctttgccatcagcttcctgccttttcacatcaccaagacagcctacctggcagtgcgctcgacgccgggcgtcccctgcactgtattggaggcctttgcagcggcctacaaaggcacgcggccgtttgccagtgccaacagcgtgctggaccccatcctcttctacttcacccagaagaagttccgccggcgaccacatgagctcctacagaaactcacagccaaatggcagaggcagggtcgctgagtcctccaggtcctgggcagccttcatatttgccattgtgtccggggcaccaggagccccaccaaccccaaaccatgcggagaattagagttcagctcagctgggcatggagttaagatccctcacaggacccagaagctcaccaaaaactatttcttcagccccttctctggcccagaccctgtgggcatggagatggacagacctgggcctggctcttgagaggtcccagtcagccatggagagctggggaaaccacattaaggtgctcacaaaaatacagtg

SEQ ID NO: 342254 - DNA, 1674 bp, Artificial Sequence
  derived and/or modified sequence
tggctcctctgggttccagggacgctggggccggagctgctgccgccgtctacacggtcccctcatttgacgggttcgcctcctagcagcgcctgggcgagtgacatctgggccggaccagctggtgctgcgcggcgcagacttctgccagaacattgcacgcgacagtttcaggcacagaactgactggcagcaggggctgctccacgagtgggaatttgctccagcacttcacggactgcaagcgaggcacttgctaactcttggataacaagacctctgccagaagaaccatggctttggaaggcggagttcaggctgaggagatgggtgcggtcctcagtgagcccctgcctccctgaacataggaaacccacctgggcagccatggaatgggacaatggcacaggccaggctctgggcttgccacccaccacctgtgtctaccgcgagaacttcaagcaactgctgctgccacctgtgtattcggcggtgctggcggctggcctgccgctgaacatctgtgtcattacccagatctgcacgtcccgccgggccctgacccgcacggccgtgtacaccctaaaccttgctctggctgacctgctatatgcctgctccctgcccctgctcatctacaactatgcccaaggtgatcactggccctttggcgacttcgcctgccgcctggtccgcttcctcttctatgccaacctgcacggcagcatcctcttcctcacctgcatcagcttccagcgctacctgggcatctgccacccgctggccccctggcacaaacgtgggggccgccgggctgcctggctagtgtgtgtagccgtgtggctggccgtgacaacccagtgcctgcccacagccatcttcgctgccacaggcatccagcgtaaccgcactgtctgctatgacctcagcccgcctgccctggccacccactatatgccctatggcatggctctcactgtcatcggcttcctgctgccctttgctgccctgctggcctgctactgtctcctggcctgccgcctgtgccgccaggatggcccggcagagcctgtggcccaggagcggcgtggcaaggcggcccgcatggccgtggtggtggctgctgcctttgccatcagcttcctgccttttcacatcaccaagacagcctacctggcagtgcgctcgacgccgggcgtcccctgcactgtattggaggcctttgcagcggcctacaaaggcacgcggccgtttgccagtgccaacagcgtgctggaccccatcctcttctacttcacccagaagaagttccgccggcgaccacatgagctcctacagaaactcacagccaaatggcagaggcagggtcgctgagtcctccaggtcctgggcagccttcatatttgccattgtgtccggggcaccaggagccccaccaaccccaaaccatgcggagaattagagttcagctcagctgggcatggagttaagatccctcacaggacccagaagctcaccaaaaactatttcttcagccccttctctggcccagaccctgtgggcatggagatggacagacctgggcctggctcttgagaggtcccagtcagccatggagagctggggaaaccacattaaggtgctcacaaaaatacagtgtgacgtgtactgtca

SEQ ID NO: 342255 - DNA, 741 bp, Artificial Sequence
  derived and/or modified sequence
cgggagggcttgggagagtgaaagctcacccggatctgggtggagaaagtatgacaggtcccaggctcaccctctcacacatacaaacacatgcacatacaagagaagctgctccgaaatctcatttttttatcttccaaaattcctgtggattttgcattcttctataatatttctgcatataaaaacactgttctgataaattaccatccaatgagttggctcaagtcttggagataacaagacctctgccagaagaaccatggctttggaaggcggagttcaggctgaggagatgggtgcggtcctcagtgagcccctgcctccctgaacataggaaacccacctgggcagccatggaatgggacaatggcacaggccaggctctgggcttgccacccaccacctgtgtctaccgcgagaacttcaagcaactgctgctgccacctgtgtattcggcggtgctggcggctggcctgccgctgaacatctgtgtcattacccagatctgcacgtcccgccgggccctgacccgcacggccgtgtacaccctaaaccttgctctggctgacctgctatatgcctgctccctgcccctgctcatctacaactatgcccaaggtgatcactggccctttggcgacttcgcctgccgcctggtccgcttcctcttctatgccaacctgcacggcagcatcctcttcctcacctgcatcagcttccagcgctacctgggcatct

SEQ ID NO: 342256 - protein, 553 aa, Artificial Sequence
  derived and/or modified sequence
MSNNGLDIQDKPPAPPMRNTSTMIGAGSKDAGTLNHGSKPLPPNPEEKKKKDRFYRSILPGDKTNKKKEKERPEISLPSDFEHTIHVGFDAVTGEFTGMPEQWARLLQTSNITKSEQKKNPQAVLDVLEFYNSKKTSNSQKYMSFTDKSAEDYNSSNALNVKAVSETPAVPPVSEDEDDDDDDATPPPVIAPRPEHTKSVYTRSVIEPLPVTPTRDVATSPISPTENNTTPPDALTRNTEKQKKKPKMSDEEILEKLRSIVSVGDPKKKYTRFEKIGQGASGTVYTAMDVATGQEVAIKQMNLQQQPKKELIINEILVMRENKNPNIVNYLDSYLVGDELWVVMEYLAGGSLTDVVTETCMDEGQIAAVCRECLQALEFLHSNQVIHRDIKSDNILLGMDGSVKLTDFGFCAQITPEQSKRSTMVGTPYWMAPEVVTRKAYGPKVDIWSLGIMAIEMIEGEPPYLNENPLRALYLIATNGTPELQNPEKLSAIFRDFLNRCLEMDVEKRGSAKELLQVRKLRFQVFSNFSMIAASIPEDCQAPLQPHSTDCCS

SEQ ID NO: 342257 - protein, 99 aa, Artificial Sequence
  derived and/or modified sequence
MSNNGLDIQDKPPAPPMRNTSTMIGAGSKDAGTLNHGSKPLPPNPEEKKKKDRFYRSILPGDKTNKKKEKERPEISLPSDFEHTIHVGFDAVTGEFTGM

SEQ ID NO: 342258 - protein, 89 aa, Artificial Sequence
  derived and/or modified sequence
MSNNGLDIQDKPPAPPMRNTSTMIGAGSKDAGTLNHGSKPLPPNPEEKKKKDRFYRSILPGDKTNKKKEKERPEISLPSDFEHTIHVGF

SEQ ID NO: 342259 - protein, 63 aa, Artificial Sequence
  derived and/or modified sequence
MSNNGLDIQDKPPAPPMRNTSTMIGAGSKDAGTLNHGSKPLPPNPEEKKKKDRFYRSILPGDK

SEQ ID NO: 342260 - protein, 106 aa, Artificial Sequence
  derived and/or modified sequence
MSNNGLDIQDKPPAPPMRNTSTMIGAGSKDAGTLNHGSKPLPPNPEEKKKKDRFYRSILPGDKTNKKKEKERPEISLPSDFEHTIHVGFDAVTGEFTGMPEQWARL

SEQ ID NO: 342261 - DNA, 1662 bp, Artificial Sequence
  derived and/or modified sequence
atgagcaacaacggcctggacatccaggacaagccccccgccccccccatgagaaacaccagcaccatgatcggcgccggcagcaaggacgccggcaccctgaaccacggcagcaagcccctgccccccaaccccgaggagaagaagaagaaggacagattctacagaagcatcctgcccggcgacaagaccaacaagaagaaggagaaggagagacccgagatcagcctgcccagcgacttcgagcacaccatccacgtgggcttcgacgccgtgaccggcgagttcaccggcatgcccgagcagtgggccagactgctgcagaccagcaacatcaccaagagcgagcagaagaagaacccccaggccgtgctggacgtgctggagttctacaacagcaagaagaccagcaacagccagaagtacatgagcttcaccgacaagagcgccgaggactacaacagcagcaacgccctgaacgtgaaggccgtgagcgagacccccgccgtgccccccgtgagcgaggacgaggacgacgacgacgacgacgccacccccccccccgtgatcgcccccagacccgagcacaccaagagcgtgtacaccagaagcgtgatcgagcccctgcccgtgacccccaccagagacgtggccaccagccccatcagccccaccgagaacaacaccaccccccccgacgccctgaccagaaacaccgagaagcagaagaagaagcccaagatgagcgacgaggagatcctggagaagctgagaagcatcgtgagcgtgggcgaccccaagaagaagtacaccagattcgagaagatcggccagggcgccagcggcaccgtgtacaccgccatggacgtggccaccggccaggaggtggccatcaagcagatgaacctgcagcagcagcccaagaaggagctgatcatcaacgagatcctggtgatgagagagaacaagaaccccaacatcgtgaactacctggacagctacctggtgggcgacgagctgtgggtggtgatggagtacctggccggcggcagcctgaccgacgtggtgaccgagacctgcatggacgagggccagatcgccgccgtgtgcagagagtgcctgcaggccctggagttcctgcacagcaaccaggtgatccacagagacatcaagagcgacaacatcctgctgggcatggacggcagcgtgaagctgaccgacttcggcttctgcgcccagatcacccccgagcagagcaagagaagcaccatggtgggcaccccctactggatggcccccgaggtggtgaccagaaaggcctacggccccaaggtggacatctggagcctgggcatcatggccatcgagatgatcgagggcgagcccccctacctgaacgagaaccccctgagagccctgtacctgatcgccaccaacggcacccccgagctgcagaaccccgagaagctgagcgccatcttcagagacttcctgaacagatgcctggagatggacgtggagaagagaggcagcgccaaggagctgctgcaggtgagaaagctgagattccaggtgttcagcaacttcagcatgatcgccgccagcatccccgaggactgccaggcccccctgcagccccacagcaccgactgctgcagctag

SEQ ID NO: 342262 - DNA, 81 bp, Artificial Sequence
  derived and/or modified sequence
atgagcaacaacggcctggacatccaggacaagccccccgccccccccatgagaaacaccagcaccatgatcggcgcctag

SEQ ID NO: 342263 - DNA, 1662 bp, Artificial Sequence
  derived and/or modified sequence
atgtccaataacggccttgacattcaagataaacctcccgctccacctatgagaaacacttccaccatgatcggagccggttccaaagacgctggaaccctgaatcacggaagcaagcccttaccacctaaccccgaagaaaaaaagaagaaggatagattttataggagcattttgccgggcgataagacaaacaagaaaaaggaaaaagaacgacccgaaattagtctaccttccgactttgaacacacaatccacgtggggttcgatgcggttaccggtgagtttacaggaatgcctgagcagtgggcacggcttctgcagacctcgaatataaccaagtccgaacaaaaaaagaatcctcaggccgttttagatgttctagagttttacaattcgaaaaaaaccagcaactctcagaaatacatgtcttttaccgataaatccgccgaagactacaactccagtaacgcacttaatgtgaaggctgtgagcgagacgccagccgtgcctcccgtgtctgaagacgaagacgatgacgacgacgacgctaccccgcccccagttatagctccaaggccggagcacaccaaaagcgtgtatacccggtccgtcatcgagccattgcccgtgacccctacacgggatgtggcgaccagccctatctcccccacggagaacaacaccactccacctgatgctctgacgaggaataccgaaaaacaaaagaaaaagccaaagatgtcggacgaggaaattctggagaaactcaggagcatcgtcagtgttggtgacccaaagaagaaatatacacgattcgaaaagataggccagggcgcttcagggaccgtgtacacagccatggacgtggccacaggacaggaggtggcaattaaacagatgaatcttcagcagcagccgaaaaaagagcttattattaatgagatccttgtgatgagagaaaataaaaaccccaatatagtgaactacctcgattcttatctggttggcgatgagctgtgggtggtcatggagtatctggctggtggatcactgaccgatgtggtcacagagacttgcatggatgagggacaaatcgcggctgtgtgcagagagtgcctgcaagctcttgaattcctacatagcaaccaggttatccatcgcgacatcaagtccgataatatcttgcttggaatggatggatctgtgaaactaactgatttcggattctgcgcacaaatcaccccggagcagagtaagagatctacaatggtcgggacaccctactggatggccccagaggtggtgacccggaaggcctacggacccaaagttgatatctggagtctgggaattatggcaatcgaaatgattgaaggggaaccgccttacttgaatgagaacccactaagagcactctacttgatcgcaaccaatggcacacctgagctccagaatcccgaaaagctgtcagctatcttccgggacttcctcaatcgctgtcttgaaatggatgttgaaaagcggggctcagctaaagaattgttgcaggttaggaagctacggtttcaggttttctcaaacttcagcatgatagctgcgagcatcccagaggactgccaggcacctctccagccccacagtaccgactgctgcagttag

SEQ ID NO: 342264 - DNA, 81 bp, Artificial Sequence
  derived and/or modified sequence
atgtcaaacaatggtctggacattcaggacaagccaccagctcctccaatgagaaacacctctaccatgattggggcatag

SEQ ID NO: 342265 - DNA, 1662 bp, Artificial Sequence
  derived and/or modified sequence
atgagcaacaacggcctggacatccaggacaagcccccagccccacccatgaggaacaccagcaccatgattggagctggcagcaaggatgctggcaccctgaaccacggcagcaagcccctgccccccaaccctgaggagaagaagaagaaggaccgcttctaccgcagcatcctgcccggggacaagaccaacaagaagaaggagaaggagaggcctgagatcagcctgcccagcgactttgagcacaccatccacgtgggctttgatgctgtgactggagagttcaccggcatgcctgagcagtgggcccggctgctgcagaccagcaacatcaccaagtctgagcagaagaagaacccccaggccgtgctggatgtgctggagttctacaacagcaagaagaccagcaacagccagaagtacatgtccttcacagacaagtctgctgaggactacaacagcagcaatgccctgaatgtgaaggctgtgtctgagaccccagctgtgccccctgtgtctgaagatgaagatgatgatgatgatgatgccaccccacctcctgtgattgcccccaggcctgagcacaccaagtctgtgtacaccaggagcgtcatcgagcccctgcctgtgacccccaccagagatgtggccaccagccccatcagccccacagagaacaacaccaccccaccagatgccctgaccaggaacacagagaagcagaagaagaagcccaagatgtctgatgaggagatcctggagaagctgcggagcatcgtgtctgtgggggaccccaagaagaagtacaccaggtttgagaagattggccagggcgccagcggcaccgtgtacacagccatggatgtggccaccggccaggaggtggccatcaagcagatgaacctgcagcagcagcccaagaaggagctgatcatcaatgagatcctggtgatgagggagaacaagaaccccaacatcgtgaactacctggacagctacctggtgggagatgagctgtgggtggtgatggagtacctggccggcggcagcctgacagatgtggtgacagagacctgcatggatgagggccagattgctgctgtgtgccgggagtgcctgcaggccctggagttcctgcacagcaaccaggtgatccaccgggacatcaagagtgacaacatcctgctgggcatggatggctctgtgaagctgacagactttggcttctgtgcccagatcaccccagagcagagcaagaggagcaccatggtgggcaccccctactggatggcccctgaggtggtgaccaggaaggcctacggccccaaggtggacatctggagcctgggcatcatggccatcgagatgattgaaggagagcccccctacctgaatgaaaaccccctgcgggccctgtacctgattgccaccaacggcaccccagagctgcagaaccctgagaagctgagcgccatcttccgggacttcctgaaccgctgcctggagatggatgtggagaagaggggcagcgccaaggagctgctgcaggtgaggaagctgcgcttccaggtgttcagcaacttctccatgattgctgccagcatccctgaggactgccaggcccccctgcagccccacagcacagactgctgcagctag

SEQ ID NO: 342266 - DNA, 81 bp, Artificial Sequence
  derived and/or modified sequence
atgagcaacaacggcctggacatccaggacaagcccccagccccacccatgaggaacaccagcaccatgattggagcctag

SEQ ID NO: 342267 - DNA, 1662 bp, Artificial Sequence
  derived and/or modified sequence
atgagcaacaacggcctggacatccaggacaagccccccgccccccccatgaggaacacgtctaccatgataggggcagggagtaaggatgccggaactcttaaccacgggtccaagcccctcccaccaaatcccgaggaaaagaagaaaaaggaccgcttctaccggagcattttgcccggtgacaaaacaaacaagaagaaggagaaggagcgtcctgagatcagtctcccatctgatttcgagcatactatacacgtaggcttcgacgctgtcaccggcgagtttacaggcatgccggagcagtgggctcggcttctgcagacaagcaatattacaaagagcgagcaaaagaaaaatccacaggcagtgctcgatgtgctggagttttataattccaaaaaaacgtcgaattctcagaagtacatgtcttttactgacaaaagtgccgaagactacaacagctccaacgctttgaacgtgaaagccgtgtctgagacacctgcggtgccacccgtctctgaggacgaggacgacgatgacgacgatgcgactccacctcccgtcatagccccacggccggaacatactaagtccgtctacacgcgatctgtcatcgaaccattaccagtgacaccaacccgagacgttgctacatctcctataagtcccacggagaacaataccacccctcctgatgcccttacgcgcaacacggagaaacaaaaaaagaaacccaaaatgtcagacgaggagatactggaaaaactgcgatctatagtttcggtaggagatcctaaaaaaaaatacacccgctttgagaagattggccagggggcttccgggaccgtgtatactgctatggatgtagccacgggccaggaggtggctataaaacagatgaatctgcaacaacagcctaagaaagaactgatcattaatgagatcctggtcatgcgagaaaacaagaaccccaacattgttaactacctggactcctatttagtgggcgacgagctgtgggtggtaatggagtacttggcagggggatcgttgacagacgtggtgactgagacatgtatggacgaagggcaaatcgcggcagtgtgtcgggaatgtctacaggccctggagttcctccattcgaatcaggtcatccatcgggatattaaatccgacaacatcctgctgggaatggacggctctgtgaaattgacagacttcggcttctgcgcccagatcacccctgagcagagtaagagatctaccatggtggggacaccatattggatggctcccgaagttgtcacacgcaaggcatacgggccaaaggtagatatctggagcctggggattatggcgatcgaaatgatcgaaggcgaaccaccatatctgaatgaaaatcctcttagagcgctttacttaattgccactaacggtaccccggaactccagaatccagaaaaactctctgcgatcttccgggactttctgaaccggtgtttagagatggacgtggaaaagcgcgggagcgcaaaagagctgctgcaggtgcgcaaactgcggttccaggtgttttcgaatttctctatgattgccgcaagtattcccgaggattgccaggccccactccaaccccattcaaccgactgttgctcctag

SEQ ID NO: 342268 - DNA, 81 bp, Artificial Sequence
  derived and/or modified sequence
atgagcaacaacggcctggacatccaggacaagccccccgccccccctatgagaaatacaagtactatgatcggtgcttag

SEQ ID NO: 342269 - DNA, 2543 bp, Artificial Sequence
  derived and/or modified sequence
cctcccgcggctgcagccggagccgaaggtggtggctgcacagtagacgccccctcacggcttcccccacacgctcccgccccctcgctcgcccatcgcgcttccctcacaggctctgcagtcctcccccacagacgccttcccccttggactctcattcccttttccacggagccccgcgctttcgtgagccccctcgaggaacctggtctccgcatccagttaccacctcctgcctcagaggccatctgagcccttcgcacctcgcccctcagtccccccttccccccccgcccgcgtcgcctcgctccctcccgcccccccatcatcccttccctcgcagttcccctgtcctgaggggagccccgccacgggcagcgcggcggcggcggcaggagggagaaagtgaagcggtagctcgcgcacactcgcgccctcactcccggctaggcggcacccaccgccgggaggaggaggaggagccgagaggagctgagcgagcgcggaagtagctgctgctggtggtgacaatgtcaaataacggcctagacattcaagacaaacccccagcccctccgatgagaaataccagcactatgattggagccggcagcaaagatgctggaaccctaaaccatggttctaaacctctgcctccaaacccagaggagaagaaaaagaaggaccgattttaccgatccattttacctggagataaaacaaataaaaagaaagagaaagagcggccagagatttctctcccttcagattttgaacacacaattcatgtcggttttgatgctgtcacaggggagtttacgggaatgccagagcagtgggcccgcttgcttcagacatcaaatatcactaagtcggagcagaagaaaaacccgcaggctgttctggatgtgttggagttttacaactcgaagaagacatccaacagccagaaatacatgagctttacagataagtcagctgaggattacaattcttctaatgccttgaatgtgaaggctgtgtctgagactcctgcagtgccaccagtttcagaagatgaggatgatgatgatgatgatgctaccccaccaccagtgattgctccacgcccagagcacacaaaatctgtatacacacggtctgtgattgaaccacttcctgtcactccaactcgggacgtggctacatctcccatttcacctactgaaaataacaccactccaccagatgctttgacccggaatactgagaagcagaagaagaagcctaaaatgtctgatgaggagatcttggagaaattacgaagcatagtgagtgtgggcgatcctaagaagaaatatacacggtttgagaagattggacaaggtgcttcaggcaccgtgtacacagcaatggatgtggccacaggacaggaggtggccattaagcagatgaatcttcagcagcagcccaagaaagagctgattattaatgagatcctggtcatgagggaaaacaagaacccaaacattgtgaattacttggacagttacctcgtgggagatgagctgtgggttgttatggaatacttggctggaggctccttgacagatgtggtgacagaaacttgcatggatgaaggccaaattgcagctgtgtgccgtgagtgtctgcaggctctggagttcttgcattcgaaccaggtcattcacagagacatcaagagtgacaatattctgttgggaatggatggctctgtcaagctaactgactttggattctgtgcacagataaccccagagcagagcaaacggagcaccatggtaggaaccccatactggatggcaccagaggttgtgacacgaaaggcctatgggcccaaggttgacatctggtccctgggcatcatggccatcgaaatgattgaaggggagcctccatacctcaatgaaaaccctctgagagccttgtacctcattgccaccaatgggaccccagaacttcagaacccagagaagctgtcagctatcttccgggactttctgaaccgctgtctcgagatggatgtggagaagagaggttcagctaaagagctgctacaggtgagaaaactgaggtttcaagtgtttagtaacttttccatgatagctgcatcaattcctgaagattgccaagcccctctccagcctcactccactgattgctgcagctaaggaggcaacaaagaacaatcactaaaaccacactcaccccagcctcattgtgccaagccttctgtgagataaatgcacatttcagaaattccaactcctgatgccctcttctccttgccttgcttctcccatttcctgatctagcactcctcaagactttgatccttggaaaccgtgtgtccagcattgaagagaactgcaactgaatgactaatcagatgatggccatttctaaataaggaatttcctcccaattcatggatatgagggtggtttatgattaagggtttatataaataaatgtttctagtcttccgtgtgtcaaaatcctcacctccttcataaccatct

SEQ ID NO: 342270 - DNA, 1662 bp, Artificial Sequence
  derived and/or modified sequence
atgtctaataatggactggacattcaagacaagccaccagcgcctcctatgagaaatacttcaacaatgatcggcgctggctccaaggacgcgggaaccctgaatcatggctctaaacctctgcctcccaaccctgaggagaaaaagaagaaagataggttttacagatcgattctgcctggcgataagacaaacaagaagaaggagaaggagcggccagagatctcactgccatcagatttcgagcacacgattcacgtggggttcgacgctgtgacaggcgagtttactggtatgccagaacagtgggcacggctgttacagacatcgaatataactaagtcagagcaaaagaaaaacccacaggcagtgttagacgtccttgaattctacaatagtaaaaagactagtaattctcagaaatatatgtcttttactgacaaatcagccgaggactataatagcagcaacgcactaaacgtcaaggccgtgtctgaaactcccgctgtgccccctgtgtctgaggacgaggacgatgacgacgacgatgctacgccccctcccgtcatcgcccctcgacctgagcacaccaagtcggtgtatactagatctgttatagagcctctacccgtgactccgactcgggatgtggctacttctcccatttctcctaccgagaataacactacaccacccgacgctttaacaagaaacaccgagaaacagaagaaaaagcctaagatgtccgacgaagagattcttgagaagctgcgctccatcgtgtccgtaggcgacccaaaaaaaaaatatacccgctttgagaagattggacagggggctagcgggacggtgtataccgccatggatgtcgcgacagggcaggaagtggcaataaaacagatgaacctacagcagcagcccaagaaggaactgatcattaacgagattctagtgatgcgagaaaacaaaaaccctaatattgttaactatctcgactcctacctggtgggtgatgagttatgggtggttatggagtatctggcgggtgggagcctcacagacgtagtgaccgaaacctgtatggatgagggccagatcgccgctgtctgtagggagtgcctacaggccctggagtttctgcattctaatcaggtgatccacagagacatcaagtccgacaacatcctattaggtatggatggctcggttaagctgacagactttggattttgcgcccagatcacaccagagcagagtaaacggtcaacaatggttggcactccttactggatggctcccgaggtagtgacccgtaaagcctatggcccaaaagtggatatctggtctctgggtattatggcgatagagatgattgagggggaacctccatatctaaatgagaaccccctccgggcactctatctgatcgcgaccaacggaacgccagagttacaaaacccagagaagctgagcgccatctttcgtgacttcctgaacaggtgtttggaaatggatgttgagaaaaggggatcagcgaaagagctactccaggtgagaaagctgcggttccaagtgtttagcaattttagtatgatcgcagcatctattcccgaagattgtcaggctcctctccagcctcattccacagactgctgttcatag

SEQ ID NO: 342271 - DNA, 81 bp, Artificial Sequence
  derived and/or modified sequence
atgtcgaacaacggcctcgacattcaggacaagcctcctgccccaccaatgaggaataccagcaccatgataggtgcttag

SEQ ID NO: 342272 - protein, 529 aa, Artificial Sequence
  derived and/or modified sequence
MLKFRTVHGGLRLLGIRRTSTAPAASPNVRRLEYKPIKKVMVANRGEIAIRVFRACTELGIRTVAIYSEQDTGQMHRQKADEAYLIGRGLAPVQAYLHIPDIIKVAKENNVDAVHPGYGFLSERADFAQACQDAGVRFIGPSPEVVRKMGDKVEARAIAIAAGVPVVPGTDAPITSLHEAHEFSNTYGFPIIFKAAYGGGGRGMRVVHSYEELEENYTRAYSEALAAFGNGALFVEKFIEKPRHIEVQILGDQYGNILHLYERDCSIQRRHQKVVEIAPAAHLDPQLRTRLTSDSVKLAKQVGYENAGTVEFLVDRHGKHYFIEVNSRLQVEHTVTEEITDVDLVHAQIHVAEGRSLPDLGLRQENIRINGCAIQCRVTTEDPARSFQPDTGRIEVFRSGEGMGIRLDNASAFQGAVISPHYDSLLVKVIAHGKDHPTAATKMSRALAEFRVRGVKVRRHQAQPLAAALGRPCGQEARRPQAAVTAPTGPGSPTLVRVPPAARVLSSRLGGPSQTTPETSTEVSPTILL

SEQ ID NO: 342273 - protein, 1178 aa, Artificial Sequence
  derived and/or modified sequence
MLKFRTVHGGLRLLGIRRTSTAPAASPNVRRLEYKPIKKVMVANRGEIAIRVFRACTELGIRTVAIYSEQDTGQMHRQKADEAYLIGRGLAPVQAYLHIPDIIKVAKENNVDAVHPGYGFLSERADFAQACQDAGVRFIGPSPEVVRKMGDKVEARAIAIAAGVPVVPGTDAPITSLHEAHEFSNTYGFPIIFKAAYGGGGRGMRVVHSYEELEENYTRAYSEALAAFGNGALFVEKFIEKPRHIEVQILGDQYGNILHLYERDCSIQRRHQKVVEIAPAAHLDPQLRTRLTSDSVKLAKQVGYENAGTVEFLVDRHGKHYFIEVNSRLQVEHTVTEEITDVDLVHAQIHVAEGRSLPDLGLRQENIRINGCAIQCRVTTEDPARSFQPDTGRIEVFRSGEGMGIRLDNASAFQGAVISPHYDSLLVKVIAHGKDHPTAATKMSRALAEFRVRGVKTNIAFLQNVLNNQQFLAGTVDTQFIDENPELFQLRPAQNRAQKLLHYLGHVMVNGPTTPIPVKASPSPTDPVVPAVPIGPPPAGFRDILLREGPEGFARAVRNHPGLLLMDTTFRDAHQSLLATRVRTHDLKKIAPYVAHNFSKLFSMENWGGATFDVAMRFLYECPWRRLQELRELIPNIPFQMLLRGANAVGYTNYPDNVVFKFCEVAKENGMDVFRVFDSLNYLPNMLLGMEAAGSAGGVVEAAISYTGDVADPSRTKYSLQYYMGLAEELVRAGTHILCIKDMAGLLKPTACTMLVSSLRDRFPDLPLHIHTHDTSGAGVAAMLACAQAGADVVDVAADSMSGMTSQPSMGALVACTRGTPLDTEVPMERVFDYSEYWEGARGLYAAFDCTATMKSGNSDVYENEIPGGQYTNLHFQAHSMGLGSKFKEVKKAYVEANQMLGDLIKVTPSSKIVGDLAQFMVQNGLSRAEAEAQAEELSFPRSVVEFLQGYIGVPHGGFPEPFRSKVLKDLPRVEGRPGASLPPLDLQALEKELVDRHGEEVTPEDVLSAAMYPDVFAHFKDFTATFGPLDSLNTRLFLQGPKIAEEFEVELERGKTLHIKALAVSDLNRAGQRQVFFELNGQLRSILVKDTQAMKEMHFHPKALKDVKGQIGAPMPGKVIDIKVVAGAKVAKGQPLCVLSAMKMETVVTSPMEGTVRKVHVTKDMTLEGDDLILEIE

SEQ ID NO: 342274 - DNA, 1590 bp, Artificial Sequence
  derived and/or modified sequence
atgctgaagttccgaacggtgcatggagggctgcggcttctcggaatcaggcggaccagcacagccccggccgcaagcccaaacgtgaggcgattggagtacaaacccatcaaaaaggtgatggtggcgaatagaggggagatcgcaattcgagtgttcagagcttgcaccgagctgggcattcgaaccgtcgctatctatagcgagcaagacaccggccaaatgcaccgccaaaaagccgacgaggcttatttgatcggccgaggcctggctccggtgcaggcttacctgcacatccctgatataatcaaggttgctaaagagaataatgtagatgcggtgcaccccggttacgggtttctgagcgagagggccgattttgcacaagcttgtcaggacgccggagtcaggtttatcggaccgagccccgaggtcgtgaggaagatgggggacaaagtggaagcacgagccatcgcaattgccgcaggcgtaccggttgtcccggggactgacgccccaatcacctcccttcatgaggcacacgaattctctaacacatacggattccccatcattttcaaagctgcctacggaggcggagggcgaggaatgcgcgtggtacatagctatgaggaacttgaagagaattacacaagggcctactcggaagccctggctgcttttggtaacggggccttgttcgtagagaagtttatcgagaagcccaggcacattgaggtgcagatcttgggcgaccaatatggaaacatcctccacctgtatgagcgcgactgctccattcagagaaggcatcagaaagttgtcgagatcgctcctgccgcccacctagatccccagctaaggaccagactcaccagtgactccgttaagctggcaaagcaggtcggctacgagaatgccggtactgttgaattcctggttgatagacatggcaagcactatttcattgaggtgaactccagattgcaggtggagcacaccgtcactgaagagattaccgacgtggacctcgtccatgcccagatccatgtggcggaggggcgcagtctccctgatctgggtctgcgtcaggagaacattcgtattaacgggtgcgcaatccagtgccgagtcacgactgaggatcccgcacggtccttccaacctgatacgggtaggattgaggtcttccgcagcggtgagggcatgggcatccggctggataatgcctccgctttccagggtgctgttatttctcctcactatgattcccttctggtgaaagtaatcgcccatggcaaggaccaccccacggccgcgactaaaatgtcacgagcactggccgaattcagggtgcgcggtgtgaaggtaagacgtcaccaggcccagccccttgctgctgctttaggcaggccttgtggtcaggaggccagaaggccccaggccgcagtcacagctcctaccggaccaggcagccccacactggtgcgagtcccccccgcagccagagttttgtcaagtcgcctgggagggccctcccagaccacgccagagacatccacagaagtgtctcctaccattttgctttag

SEQ ID NO: 342275 - DNA, 3537 bp, Artificial Sequence
  derived and/or modified sequence
atgttaaagtttagaactgtccatggcgggctgaggctcctaggaatccgcaggaccagcacagcacccgctgctagccctaacgttcggaggttagagtacaaaccaatcaaaaaagtcatggttgccaatcggggggaaatcgcgattagagtatttagagcatgcacggagctgggtataagaactgttgccatatatagcgaacaggacaccggtcagatgcatcgccaaaaagcggacgaggcttacctgattgggaggggtcttgctcctgtccaggcatacctgcatattcctgacattatcaaggtggccaaggaaaataatgtcgacgctgttcatccggggtatggctttttgtctgaaagggccgattttgctcaggcctgccaagatgccggagtcagattcataggccctagtcccgaagtggttaggaagatgggcgataaggttgaggccagggcaattgccatcgcagccggagtcccggtggttcctggaacagatgcacccatcacttccctgcatgaagcccacgaattctctaatacctacggctttccaatcatttttaaagccgcttacggtggtggcggccggggaatgcgcgtcgttcactcctacgaggagctcgaggagaattacaccagagcctactcagaagctttggctgcttttgggaatggagccctgttcgtggaaaaattcatcgaaaagcctaggcacatagaggttcagatcctgggcgatcagtatggaaacatcttacacctctatgagcgcgactgttcaatccagcgcaggcaccagaaggtggtggaaatcgcaccagccgcccatttggatcctcagctgaggacgcgcctcacaagcgattcagtcaagctggcgaagcaagtgggatacgaaaacgccggtactgtggaatttctggtggaccggcatgggaagcattatttcatagaggtgaactctcggttacaagtagagcacaccgtgaccgaagaaatcactgatgtggacctagttcacgcgcagatacacgtggcagagggacgcagtctgcctgatcttggcctcagacaggagaatatcagaatcaatgggtgcgccatccagtgtagggtgacaaccgaagaccctgcaagatcgtttcagcctgatactgggaggatcgaggttttccgaagcggggagggcatgggaattaggcttgataacgccagcgcctttcagggtgctgttatctctcctcactatgattcactcctggtgaaggtcattgcccacggtaaggaccaccccaccgctgctaccaagatgtcaagggccttagcagaattcagagtgagaggcgtcaaaaccaacatagcctttctccagaatgtgctgaacaaccagcaatttctcgcaggaactgtggacacccaatttatcgacgagaatccggagctatttcagctgcgccccgcgcagaatcgggcacagaagcttctccattacctgggtcatgtaatggtcaatggccctaccacccctattcccgtaaaggcctccccctcacctaccgaccccgtggttcctgcagttcccatcggccctccccccgctggtttcagggatatccttttacgcgaaggccccgagggatttgcaagggccgttcggaatcatcctggacttctgttaatggacactacatttagggacgcacaccagtcgctgctggctacccgcgttcgaacccacgatctcaaaaagatcgccccctatgtcgcacataatttttccaaactgttctccatggaaaattggggtggcgctacattcgacgtggcaatgcgatttctttacgagtgtccatggagacgtttgcaagaattgcgagagctcattcctaacataccatttcagatgctgctgagaggtgcaaacgctgtgggatataccaactatccagataacgtggtgtttaaattctgcgaggtggctaaggagaatgggatggacgtattcagggtattcgactcgttaaattatctaccaaatatgctcttaggcatggaggccgccgggtcagctggtggcgtcgtggaggccgccatctcgtacaccggagacgttgctgacccatcaagaaccaagtatagcctgcagtactatatgggcctggctgaagaactcgtgcgggcagggacccatatactgtgcattaaggatatggccggcctgctcaagcctacggcatgcacaatgctcgtatctagtctgcgcgacagatttccagatctgcccttgcacatccacacgcatgacacttctggcgcaggggtggcagccatgctcgcctgtgcccaggctggggcagatgtggttgatgtcgccgcagatagcatgagcggtatgacctcacagccctctatgggtgccctcgtcgcctgtacaagaggtacccctctggacacagaggtccccatggagcgcgtttttgattattctgagtactgggaaggcgccagggggctgtacgccgcattcgattgcactgctactatgaagtcagggaacagcgatgtgtacgaaaacgaaatacccggtggccagtatacaaacctccacttccaagcccactctatgggtctgggatctaagttcaaggaagtcaagaaagcttacgtggaagccaaccagatgcttggggacttaattaaagtcacgccatcatctaagatcgtcggcgatctggcacagtttatggtccaaaatggactctccagggcggaggctgaggcccaggcagaggagttatctttcccgagatcagtggttgaatttttacaggggtacatcggagtcccgcacggaggcttcccagaaccttttagaagtaaagtactcaaggacttacctcgggtggagggacgccctggagctagtctccctccccttgatctgcaggccttggagaaagagttggttgatcgtcatggagaagaagtgaccccagaggacgtgctgtcagccgcaatgtacccggacgtgttcgctcacttcaaagacttcaccgctactttcggcccccttgacagtctaaatacaagactgttcttgcagggcccaaaaattgccgaggagttcgaagtggagctggaaagggggaagaccctgcatattaaggccctagcggtgagcgatttaaacagagccggacagcgacaggtgtttttcgagcttaacgggcagctgcgttctattctcgttaaagacacccaggctatgaaagagatgcatttccacccaaaggcgctgaaagatgttaaggggcagataggagcacccatgcccgggaaggtcattgatatcaaagtcgtggcaggggctaaagtagccaagggccagcccctatgtgtactctccgcaatgaagatggaaacggtggtcacatcccccatggaaggcactgtacgcaaagttcacgtcaccaaagacatgaccctagaaggtgatgatctcatactggagatagagtag

SEQ ID NO: 342276 - DNA, 3537 bp, Artificial Sequence
  derived and/or modified sequence
atgctgaagtttagaacagtgcacggagggctcaggctcctcgggattcgaaggacttctactgcccctgcagcgtctcctaacgtgcgtagactagagtacaagcctattaaaaaggtgatggtggccaaccggggggagattgcgattcgagtatttcgagcttgcactgaactgggaattcggaccgttgcaatttactcagaacaggacactgggcaaatgcacagacagaaggccgatgaggcctacttgattggacgcgggctggctcctgttcaggcttacctccacatccctgacatcatcaaagtggcaaaggaaaataacgttgatgccgtccacccaggttacgggttcctgtccgagcgcgcggattttgctcaggcgtgccaggacgctggtgttaggttcattggtccttctccagaagtcgttcgaaaaatgggagataaggtggaggccagagccatcgcaatcgctgccggagtgcccgtggtacctggaacggatgcaccaattaccagtttgcacgaagcccatgagttctcaaacacatacggtttccccatcattttcaaggcggcttacggaggagggggaaggggcatgcgggtagttcatagctatgaagagcttgaagagaattacactcgggcttactcagaagccctcgctgcatttggcaacggcgcattgtttgtggagaagttcatcgaaaaaccacgacacatagaagttcagatactgggtgatcaatatggaaacatcctgcacctctatgagcgagattgtagcatccagcggcggcaccagaaggtggtggagattgcaccagccgcccaccttgacccccagttgagaaccagacttacttctgatagcgtcaaattggcgaagcaggtgggttatgagaacgccggtacggtggaatttcttgtggaccgtcacggaaagcattatttcatcgaggtgaatagtagactgcaggtagagcatacagtcacagaggagattaccgatgtggacctggttcatgctcagattcacgtagctgagggaagaagtctgccggacctggggctaagacaggagaatattcggataaacggttgcgccatccagtgtagagttactaccgaggacccagctcgctcattccagcccgatacaggacggatcgaagtattccgtagcggagaggggatggggattcgactggataatgctagtgccttccagggagcagttatatccccccactacgatagcttacttgtgaaagtgatagcacacggtaaggaccaccctacagcagccaccaaaatgagccgcgcactggccgagtttagggtccgcggcgtgaagaccaacatcgcctttcttcagaatgttttgaataatcagcagttcctcgccggaacagtcgatacgcagtttattgatgagaaccccgaactgttccagctccggcctgctcagaaccgggcccagaaacttctgcattacctcggccatgtaatggtgaatggcccaacgacacctatccctgtaaaagcctctccttcacctactgacccagtagtgcccgccgtaccaatagggcctcctccagcaggctttcgcgacatcctactgagggagggtcccgaggggtttgctagagctgttcggaaccatcccggactactccttatggatactactttcagggacgctcaccaatccttgctggctacccgcgtgcggacacacgacctgaaaaagatcgccccatatgtagcccacaactttagcaaacttttttccatggagaactggggtggcgctacattcgacgttgcaatgaggtttctgtatgagtgtccctggcgtcgactgcaagagctgcgggagctcatacctaacatcccctttcaaatgttgttaagaggagctaatgctgttgggtatacaaactaccctgataatgtcgtgtttaagttttgcgaggtggccaaggagaatggaatggacgtctttcgtgtattcgactctctcaactacttgccaaacatgctgctcggcatggaggccgcaggaagtgccggcggtgtggtggaggctgctatcagctatactggggatgtagccgatcctagtaggacaaagtacagtctgcagtattatatgggccttgccgaagaactcgtgcgggccggtacccatattttgtgtatcaaagatatggccggcttgctgaaaccaaccgcttgcacaatgctggtatcatctctaagggatcgttttccggacctccccctgcatatccatactcacgatacctccggagctggagtcgcggccatgctggcatgtgctcaagccggcgcagacgtcgtggatgtggccgctgacagcatgtccggcatgacctcccaaccatctatgggggccttggtcgcttgtaccagaggaacgccgctcgatacagaggtacctatggagagagttttcgattatagcgagtattgggagggcgcccgaggactgtacgccgcatttgactgcacggccacgatgaaatcaggcaatagcgatgtgtacgaaaacgaaataccaggcggtcagtacacaaacctgcacttccaggcccactccatgggacttggcagtaagttcaaagaagtgaagaaagcctacgttgaggcaaatcagatgctgggagacctgattaaggtgactccttcctccaagatcgtcggcgacctggcacaattcatggtacaaaacggcctcagtagagctgaggccgaggcccaggccgaggaactgtcgttcccaagatctgtagtagagttcctccagggctatatcggcgtgccccacggtggcttccccgaacccttccgatctaaggtgttaaaagatctgccacgagttgaagggaggcctggagcctcgctgcccccgctggatctgcaagcccttgagaaagagttggttgatagacacggggaagaggtcacccctgaggacgtgctgtcagccgcaatgtaccctgatgtcttcgcccacttcaaagattttacagcaacttttggccccctagacagtctcaatacccgtctcttcttgcaggggcccaaaatcgccgaagagttcgaggtcgaactggaacggggaaaaaccctgcacattaaggcccttgccgtctctgaccttaacagagctgggcagaggcaggtcttctttgagctcaacggacagttgagatcaatcctggtgaaggatactcaggcgatgaaagagatgcacttccaccccaaggccctgaaggacgtgaagggccagattggggcgcccatgccaggcaaagtgattgacatcaaagtcgtcgctggagctaaggtggctaagggccagcccctgtgcgtgcttagcgccatgaagatggaaacagtggtcaccagccctatggaaggaactgtgcgtaaggtacacgtaaccaaggacatgactctggagggagacgacctgatactggaaatagagtag

SEQ ID NO: 342277 - DNA, 3537 bp, Artificial Sequence
  derived and/or modified sequence
atgctgaagttcagaactgtccatggaggactgcgccttcttggcatcaggcggacctctacagcgcctgccgcatcccccaacgtgcggagactggagtataagcccattaagaaagtgatggtggccaaccggggcgagatcgctattagggtctttcgggcctgcacggagctggggatcaggaccgtcgcgatttactcagagcaggacacaggccaaatgcatcgtcaaaaggcggacgaggcctacctcatcgggcgcgggctggcccctgtgcaggcctacctgcacatccccgatattattaaggtggctaaagagaataacgtagacgccgtacatcccggatatggcttcctgtccgaaagggctgatttcgctcaggcttgccaggacgctggcgtccgcttcataggtcccagtcctgaggtggttcgaaagatgggggataaggtggaggcaagagccatcgctattgccgctggcgtgccagtggtgccaggcaccgatgctccaatcacgtcgctgcacgaggcacatgaattttcgaacacctacggttttcccataatattcaaggctgcctacggaggcgggggccgaggcatgcgggtggtccattcatacgaagaactggaggaaaactacactagggcatacagtgaggccctggccgccttcggaaacggtgcactgttcgtggagaaatttattgaaaaacccaggcatatagaggtgcagattcttggcgatcagtacggtaacattcttcacttgtacgagcgcgattgttcaattcagcgtcggcatcagaaggttgtggagattgccccagccgctcatctcgaccctcaattaaggactcgtctgacctccgactccgtcaaattagcaaagcaggttggatatgagaatgccggaaccgttgaattcctcgtggacaggcacggaaagcattatttcattgaggttaattcaagactgcaggtggaacacaccgtcacagaagaaatcacagacgtagacctggtgcacgcccagatccacgtggccgagggtagatcattgccggatctaggactgcgacaggaaaacattagaattaatggttgcgccatacagtgtcgcgtcaccacagaggacccagcccggagtttccagcctgatactggtaggatcgaagttttccggtcaggggagggaatggggatcaggttggacaacgcaagcgcctttcagggcgcagttatcagcccacattatgactcattactcgtcaaggtcatcgcccatggcaaagaccaccctacggctgccactaaaatgtccagggctctggctgagttccgcgttcgcggggtgaaaaccaacatcgcttttttacagaacgtgctgaacaaccaacagtttctggctggaacagtcgatactcagttcattgatgaaaaccctgaactgttccagctccgaccagcacagaatcgggcccagaagctcttacactatctagggcatgtcatggttaatggtcccactacacccatccctgtgaaagctagcccctccccaacagacccagtcgttcctgctgtgcctatcggccctcccccggccggctttcgcgatattttgctgcgggaaggtccagaaggattcgcccgcgctgtgagaaaccacccgggcctgctgctgatggacacaacctttcgcgacgcacatcagtctctcctcgccacacgagtgcggactcacgatcttaaaaaaatcgcaccctacgtggcccacaacttcagtaagttgttctctatggagaactggggcggcgcaaccttcgacgtggcaatgagattcctgtatgaatgtccctggcgtagactgcaggaactgcgggagctgattcccaatatcccgttccagatgctgctgaggggggcgaacgccgtgggctatactaattacccagacaacgtggtgttcaaattctgtgaagtagccaaggaaaacggcatggacgtctttagggtatttgattcactaaattacttaccaaatatgctgctgggtatggaggcagctggaagcgccgggggtgtggttgaggctgcaatcagttatacaggggacgtggcagatccctctagaacgaagtactcacttcaatactatatgggactagctgaagagctcgtgcgagcaggtacacacatcttgtgcataaaggatatggccggactgctcaagcctaccgcctgtacgatgttagtgtcttcgcttcgcgaccgcttcccagacttgcctctacatatccatacacacgatactagcggtgcaggcgttgctgctatgcttgcatgcgcacaagccggagcagatgtagtggatgtggcagccgattcaatgagcgggatgacctcccaaccttccatgggagcacttgtggcatgcactaggggcaccccgctcgacacagaagtgcctatggagcgcgtgtttgactactccgaatattgggaaggagccagagggttatacgccgcctttgactgtaccgctaccatgaagtccggaaactctgatgtctatgaaaacgagatccccggcggacagtacaccaacctccactttcaggcccactcaatgggacttggcagcaaatttaaggaagtgaagaaagcctacgtggaagcaaaccagatgctaggagacctcattaaagtcaccccaagtagcaagatcgtgggcgaccttgcccagttcatggtccagaacgggctttccagagctgaggcggaagcccaggcagaggagctcagtttccctcgttccgtggttgagtttttgcaggggtacattggcgtgccccatggtggattccctgaaccattccgcagcaaagtattgaaggacttgccacgagtcgaggggcggcccggcgccagtttgcctcccctcgatcttcaggcattagagaaggaactggtagaccgacacggcgaagaggtgacgcccgaagatgtactatcagctgcaatgtatcccgatgtttttgcgcacttcaaagactttacggcgaccttcggaccactcgatagccttaacacccgcctctttttgcaagggcccaaaattgcagaggagtttgaagtggaattagaacgcgggaaaaccctgcatatcaaggcactggcagtcagcgatcttaacagagcggggcaacgacaagtgtttttcgagctcaacggtcaactgaggagcatccttgtgaaagatacacaagctatgaaggaaatgcactttcacccaaaggcactcaaagacgtcaaaggtcagataggagctcccatgccgggaaaggtcatagatatcaaggtggtggccggggccaaggtggccaagggacagcctttgtgcgttctgagtgctatgaagatggaaaccgttgtgaccagcccaatggaagggacagtgcggaaagtccacgtcaccaaagatatgaccctggaaggggacgacctgatactggagatcgagtag

SEQ ID NO: 342278 - DNA, 1590 bp, Artificial Sequence
  derived and/or modified sequence
atgctgaagttcagaacagtgcacggcggcctgcggctgctgggcatccggaggaccagcacagccccagctgccagccccaacgtgcggcggctggagtacaagcccatcaagaaggtgatggtggccaacagaggagagatcgccatccgggtcttccgggcctgcacagagctgggcatcagaacagtggccatctacagcgagcaggacaccggccagatgcaccggcagaaggcagatgaggcctacctgattggccggggcctggcccctgtgcaggcctacctgcacatcccagacatcatcaaggtggccaaggagaacaacgtggatgctgtgcaccctggctacggcttcctgtctgaaagagctgactttgcccaggcctgccaggatgctggggtgcgcttcatcggccccagccctgaggtggtgaggaagatgggagacaaggtggaggcccgggccatcgccatcgccgccggcgtgcctgtggtgcccggcacagatgcccccatcaccagcctgcacgaggcccacgagttcagcaacacctacggcttccccatcatcttcaaggccgcctatggaggcggcggccggggcatgagggtggtgcacagctatgaggagctggaggagaactacacccgggcctacagcgaggccctggccgcctttggaaatggagccctgtttgtggagaagttcatcgagaagcccaggcacatcgaggtgcagatcctgggggaccagtatggcaacatcctgcacctgtatgagcgggactgcagcatccagaggaggcaccagaaggtggtggagatcgccccagctgcccacctggacccccagctgcggacccggctgaccagtgacagcgtgaagctggccaagcaggtgggctatgaaaatgccggcaccgtggagttcctggtggacagacatggcaagcactacttcatcgaggtgaacagccggctgcaggtggagcacacagtgacagaggagatcacagatgtggacctggtgcacgcccagatccacgtggccgagggccgcagcctgcctgacctgggcctgcggcaggagaacatccgcatcaatggctgtgccatccagtgccgggtgaccacagaagatcctgcccggagcttccagcctgacaccggccgcatcgaggtgttccgctctggagagggcatgggcatccggctggacaatgccagcgccttccagggcgccgtcatcagcccccactatgacagcctgctggtgaaggtgattgcccacggcaaggaccaccccacagctgccaccaagatgagccgggccctggccgagttccgggtgcggggcgtgaaggtgcggcggcaccaggcccagcccctggccgccgccctgggccggccctgtggccaggaggcccggcggccccaggccgctgtgacagcccccaccggccctggcagccccaccctggtgcgggtgcccccagctgcccgggtgctgagcagccggctgggcggccccagccagaccaccccagagaccagcacagaggtgagccccaccatcctgctgtag

SEQ ID NO: 342279 - DNA, 3537 bp, Artificial Sequence
  derived and/or modified sequence
atgctgaagttcagaacagtgcacggcggcctgcggctgctgggcatccggaggaccagcacagccccagctgccagccccaacgtgcggcggctggagtacaagcccatcaagaaggtgatggtggccaacagaggagagatcgccatccgggtcttccgggcctgcacagagctgggcatcagaacagtggccatctacagcgagcaggacaccggccagatgcaccggcagaaggcagatgaggcctacctgattggccggggcctggcccctgtgcaggcctacctgcacatcccagacatcatcaaggtggccaaggagaacaacgtggatgctgtgcaccctggctacggcttcctgtctgaaagagctgactttgcccaggcctgccaggatgctggggtgcgcttcatcggccccagccctgaggtggtgaggaagatgggagacaaggtggaggcccgggccatcgccatcgccgccggcgtgcctgtggtgcccggcacagatgcccccatcaccagcctgcacgaggcccacgagttcagcaacacctacggcttccccatcatcttcaaggccgcctatggaggcggcggccggggcatgagggtggtgcacagctatgaggagctggaggagaactacacccgggcctacagcgaggccctggccgcctttggaaatggagccctgtttgtggagaagttcatcgagaagcccaggcacatcgaggtgcagatcctgggggaccagtatggcaacatcctgcacctgtatgagcgggactgcagcatccagaggaggcaccagaaggtggtggagatcgccccagctgcccacctggacccccagctgcggacccggctgaccagtgacagcgtgaagctggccaagcaggtgggctatgaaaatgccggcaccgtggagttcctggtggacagacatggcaagcactacttcatcgaggtgaacagccggctgcaggtggagcacacagtgacagaggagatcacagatgtggacctggtgcacgcccagatccacgtggccgagggccgcagcctgcctgacctgggcctgcggcaggagaacatccgcatcaatggctgtgccatccagtgccgggtgaccacagaagatcctgcccggagcttccagcctgacaccggccgcatcgaggtgttccgctctggagagggcatgggcatccggctggacaatgccagcgccttccagggcgccgtcatcagcccccactatgacagcctgctggtgaaggtgattgcccacggcaaggaccaccccacagctgccaccaagatgagccgggccctggccgagttccgggtgcggggcgtgaagaccaacatcgccttcctgcagaatgtgctgaacaaccagcagttcctggccggcaccgtggacacccagttcattgatgaaaatcctgagctgttccagctgcggcctgcccagaacagagcccagaagctgctgcactacctgggccacgtgatggtgaatggccccaccacccccatccctgtgaaggccagccccagccccacagatcctgtggtgcctgctgtgcccatcggccccccacctgctggcttccgggacatcctgctgcgggagggccctgagggctttgcccgggctgtgaggaaccaccctggcctgctgctgatggacaccaccttcagagatgcccaccagagcctgctggccaccagggtgaggacccatgacctgaagaagatcgccccctacgtggcccacaacttcagcaagctgttctccatggagaactggggcggggccacctttgatgtggccatgaggttcctgtatgaatgtccctggaggcggctgcaggagctgcgggagctgatccccaacatccccttccagatgctgctgcggggggccaatgctgtgggctacaccaactacccagacaacgtggtgttcaagttctgtgaggtggccaaggaaaatggcatggatgtgttccgggtgtttgacagcctgaactacctgcccaacatgctgctgggcatggaggccgccggcagcgctgggggcgtggtggaggccgccatctcctacacaggagatgtggccgaccccagcaggaccaagtacagcctgcagtactacatgggcctggccgaggagctggtgcgggccggcacccacatcctgtgcatcaaggacatggccggcctgctgaagcccacagcctgcaccatgctggtgagcagcctgcgggaccgcttcccagacctgcccctgcacatccacacccatgacaccagcggggccggcgtggccgccatgctggcctgtgcccaggccggggctgatgtggtggatgtggccgctgacagcatgagcggcatgaccagccagcccagcatgggcgccctggtggcctgcacccggggcacccccctggacacagaggtgcccatggagcgggtgtttgactacagcgagtactgggagggcgcccggggcctgtatgctgcctttgactgcacagccaccatgaagagcggcaacagtgatgtgtatgaaaatgagatccctgggggccagtacaccaacctgcacttccaggcccacagcatgggcctgggcagcaagttcaaggaggtgaagaaggcctacgtggaggccaaccagatgctgggggacctgatcaaggtgacccccagcagcaagatcgtgggggacctggcccagttcatggtgcagaatggcctgagcagagctgaggccgaggcccaggccgaggagctgtccttccccaggtctgtggtggagttcctgcagggctacatcggcgtgccccacggcggcttccctgagcccttccgcagcaaggtgctgaaggacctgccccgggtggagggccggcctggggccagcctgccccccctggacctgcaggccctggagaaggagctggtggacagacatggagaggaggtgaccccagaagatgtgctgtctgctgccatgtacccagatgtgtttgcccacttcaaggacttcaccgccaccttcggccccctggacagcctgaacaccaggctcttcctgcagggccccaagattgctgaggagtttgaggtggagctggagcggggcaagaccctgcacatcaaggccctggccgtgtctgacctgaacagagctggccagaggcaggtgttctttgagctgaatggccagctgcggagcatcctggtgaaggacacccaggccatgaaggagatgcacttccaccccaaggccctgaaggatgtgaagggccagatcggggcccccatgcctgggaaggtgattgacatcaaggtggtggccggggccaaggtggccaagggccagcccctgtgtgtgctgagcgccatgaagatggagaccgtggtgaccagccccatggagggcaccgtgaggaaggtgcacgtgaccaaggacatgaccctggagggagatgacctgatcctggagattgaatag

SEQ ID NO: 342280 - DNA, 1590 bp, Artificial Sequence
  derived and/or modified sequence
atgctgaagttccggaccgtgcacggcggcctgcggctgctgggcattaggcgtacttctacagcccctgctgcatctcctaatgtgcgcagactggagtacaaacccatcaaaaaagtaatggtggctaataggggagagatagccattagggtattcagagcttgcactgagctcggaatccgaactgttgcgatttactcggaacaggacacaggacagatgcaccgtcagaaggcggatgaggcctacttgataggacggggacttgcaccagtccaagcctatctacatatcccagatatcattaaggtcgccaaggagaacaatgttgacgctgtacaccctggctatggcttcctttctgagagagcagattttgcccaggcctgccaggatgcaggcgtcagattcataggaccaagcccagaagttgtgagaaaaatgggcgacaaggtcgaggctcgcgccatagccatcgccgcgggggtccctgtagttcctggcactgacgcgccgattactagcttgcacgaggcgcacgagttttcaaatacgtacggcttccctatcatatttaaagctgcatatggagggggtggacgcgggatgagggtcgtccatagttacgaggagctggaagagaactacaccagagcatacagtgaggcactggcagcattcggaaatggagccctgttcgtggagaaatttattgaaaagcccaggcacatcgaggtgcagattctcggcgaccagtatggcaatattctgcacctctacgagcgggattgcagcattcagagacgccatcagaaggtggtcgagatagctccagcagcacacctagatcctcagcttcggacacgtttgacatccgatagcgtgaagctggccaagcaagtgggctacgaaaatgcagggacagttgaattccttgttgatcgccacggaaagcattacttcattgaagtgaatagcaggctgcaagtggaacacacagttaccgaagagatcaccgatgtcgatcttgtgcacgcccagatacatgtggcagaaggacggagtctgcctgacctgggactgcgacaggagaatataaggattaacggatgtgcaatccagtgcagggtcaccaccgaagatccagctcggtctttccagcctgacacaggacgcatagaggtcttccgcagcggcgagggcatgggcatacgccttgacaacgcatccgccttccagggcgccgtcatctctccccactacgactcactgctcgtgaaagtgatcgcccatgggaaagatcatccaactgccgccactaagatgagcagggccctcgctgaattcagggttcgaggggtcaaggtgcggcgtcaccaggcccagcctctcgccgctgctctgggcagaccttgtgggcaggaggctcgtcggccccaggcagcagtgaccgcaccaaccggtccaggaagcccaaccctagtcagagtgcctcctgctgctagagtgctgagctcaagattaggggggccgtctcagacaactccggaaacttctaccgaggtctccccaactattctgttgtag

SEQ ID NO: 342281 - DNA, 3537 bp, Artificial Sequence
  derived and/or modified sequence
atgctgaagttccggaccgtgcacggcggcctgcggctgctgggcataaggcgaacctccacggctcccgccgcgtcgccaaatgtgcgtagactagaatacaaacccatcaagaaggtgatggtagccaacagaggagaaatagccattcgagtgtttcgagcctgcaccgagcttgggatacggacagttgccatttactcggaacaagacaccggccaaatgcataggcagaaggcagacgaggcctacctgatagggcgggggctggctcccgtccaggcttacctccacattccagatatcataaaggtggccaaagaaaataatgtggatgctgtccacccagggtacggttttttatccgagcgcgcagattttgcgcaagcatgtcaggatgcgggagttcgcttcattgggccctcaccagaggtggtccgcaaaatgggggataaggtggaagctagagccattgcaattgccgccggagtcccagtggtgcctggcacagatgctcccattacaagtctgcatgaagctcatgaatttagtaatacttacggcttcccgataatcttcaaagccgcttacggagggggtggccggggcatgcgcgtggtgcacagctacgaagaattagaagaaaactatacccgcgcatatagtgaagccctagcagctttcggcaatggagctctctttgtagaaaagttcatagaaaaaccaagacatattgaagttcagatcctgggcgatcagtatggtaacatcctccacctctacgaaagagactgttcgatccagcggcgtcatcagaaagtggtggaaatcgcacccgccgctcatctggatccacagctgcgtactcgtctcaccagcgatagcgttaagctggcaaagcaggtcggttatgagaacgctggaactgtggagtttctcgtggaccgtcacgggaaacactacttcatcgaggttaattcccggctccaggtggaacatacagtgaccgaggagattaccgatgtggacttggtgcatgctcagattcatgtggcagagggtcgctccctgcctgacctgggcctccggcaggagaatatcaggatcaacggatgcgcaatccagtgcagggtgacaacagaagatcccgctagatcatttcagcccgacaccggacgcatagaagtgttccgctcaggggagggaatgggcatacgcctggacaacgccagtgcctttcaaggggccgtcatctctccacattacgattctctcctggtgaaggttatcgctcacgggaaggaccatccaactgcagctacaaaaatgtccagagcgcttgcggagttccgggttaggggcgtcaagaccaatatagctttcctgcagaacgtattaaataaccagcagtttcttgcagggacagttgacacgcagtttatagatgagaatcccgaactgttccaattgaggcccgcgcagaaccgagcccaaaaattgcttcattacttggggcacgttatggttaacggaccaactactccaataccagttaaggcgagtccatcacctacagatcctgttgtccccgccgtccctattggcccacctcctgccggttttcgggatatcctgttaagggaaggccctgaaggcttcgcaagggccgtccggaaccaccccggactgttgctcatggatactacattcagagacgcccaccaaagcctgctggcaacccgggtgcgcacacacgacctaaagaagatcgctccttatgttgctcacaacttctcaaagttgttctcaatggagaattggggcggggccacctttgacgtggccatgcggttcctatacgagtgcccatggaggcgtctccaggagctgcgggagttgatccctaatattcccttccagatgctgctgaggggagccaatgctgtgggatataccaactatcccgacaatgtagtgtttaagttttgcgaggttgctaaagaaaatggcatggacgtctttcgggttttcgatagtctcaattacctccctaacatgctactgggaatggaggctgctggttccgccgggggggttgtcgaggccgccatttcctacactggggatgtcgccgacccaagccgtacgaaatactcactacagtattacatgggactggccgaggagctggttcgggcagggacgcatatcctctgcatcaaagatatggccggacttctcaagccgacagcatgtactatgctagtgtcttctcttcgggaccggttcccagatctacccctgcacatacatactcacgacacttccggcgctggagtcgccgccatgttagcttgcgcccaggcaggcgccgacgtggtggatgtcgcggcagatagtatgtcaggaatgacctcccagcctagcatgggcgctttggtggcatgcactcgcggcactcctctggacaccgaagttccgatggaaagagtgttcgattacagtgagtattgggagggtgcacgcggactttacgccgcatttgactgcactgcaaccatgaagagcggcaattcagacgtgtatgaaaatgaaattcccggcgggcaatatacgaatctgcattttcaggctcacagtatgggtcttgggtcaaaattcaaagaggtgaagaaggcctacgtggaggctaatcagatgctcggagatctcatcaaggtgacaccttccagcaagatcgtcggcgacctggcacagtttatggtgcaaaatggcctgtcacgcgcagaggccgaagcccaagctgaggaactgagcttcccacggtcagtggttgagttcctccagggatatatcggagtgcctcatggaggcttccctgaaccatttcgcagcaaagtcctcaaagacctaccacgcgttgaagggcgcccaggcgcctcccttcccccactggatcttcaggctctcgaaaaagaactggtcgaccgccacggcgaggaggtgacacctgaagacgtgcttagtgctgcaatgtatccagacgtttttgcccacttcaaggattttacagcaactttcggacctttggactctctgaatacccgactattcctccagggacccaaaatcgctgaggaattcgaagttgagctagaaaggggcaaaacactgcatataaaggctctggccgtgagcgatctgaatcgcgctggacagagacaggtcttctttgaactgaacggacagctgcggagcatactggtgaaagacactcaggcaatgaaagagatgcactttcaccccaaagccttgaaagacgtgaaagggcagattggggccccaatgcccggcaaagtgattgatatcaaggtcgtggcaggggccaaggttgccaaaggacagcctctttgcgtgctcagcgctatgaagatggagaccgtcgtgacctccccgatggagggcaccgtccggaaggttcatgtcactaaagacatgaccctcgagggggacgacttgattttagaaatagagtag

SEQ ID NO: 342282 - DNA, 3537 bp, Artificial Sequence
  derived and/or modified sequence
atgctgaagttccggaccgtgcacggcggcctgcggctgctgggcattagaagaacatcgaccgccccagcagccagccccaacgtcagacggctggaatataagcccataaagaaagtgatggtggccaacaggggcgaaatcgctattcgcgtcttcagagcctgtactgagcttggtatccgcacggttgctatttacagcgagcaagacaccggacagatgcacagacagaaagccgacgaagcatatttgattggaaggggcctcgcccccgtacaggcttacttgcacatcccagacataattaaggtcgctaaagaaaataatgtcgatgctgtccaccctggatacggctttctgtctgagcgcgctgactttgcccaggcatgccaagatgccggtgtcaggtttatcggcccgtcgcctgaggtcgttaggaagatgggcgacaaggtggaggctagagcgatcgcaatcgccgcaggggttccagtggtcccgggaactgacgccccaatcacctctctgcatgaggcccacgagttctctaatacttatggctttccaattatctttaaggcagcctatggaggcggaggtcggggcatgcgcgttgtgcacagttacgaagagctggaggagaattatactcgcgcgtactccgaagccctggccgccttcgggaacggagcactgtttgtcgaaaagtttatcgaaaagccgagacacattgaagttcagatcctgggggaccaatacgggaacatactgcatttatatgagcgagattgcagcatccagcgccgtcaccaaaaagtggtagaaatcgccccggcagcacaccttgacccccaattacggacaaggctgacctccgattcggttaaactggccaagcaggtgggttacgagaacgcgggtacagttgaattcttggttgacaggcacgggaagcactactttatcgaggtgaacagcagactgcaggttgaacacaccgttaccgaggaaataacagacgttgatctggttcacgcccagatccacgttgcagagggccggtccctgcctgatctggggcttcggcaagaaaacatcagaataaatggctgcgccatacagtgtcgtgtcaccacagaggatccagcacgttctttccaacccgataccgggaggatcgaggtttttaggtccggtgaaggaatgggaattcggttagacaatgcttcagccttccagggcgcagttatctccccgcactacgacagcctccttgtcaaagtaattgcccatggaaaggaccacccaaccgccgctactaagatgtctagggccttggctgaatttcgggtgaggggagtgaagaccaatatcgccttcctgcagaatgtactcaataaccagcagtttctcgccgggaccgttgacacccagttcattgatgaaaacccagaactgttccagttgcgcccggctcagaatcgagcacagaagctgctacattacctgggccacgtcatggtaaacggccctaccactcccattccagttaaggcatccccctccccaacagaccctgtggtccccgctgtacccattggacctccaccagccggcttcagagacattctcctcagagagggacccgaaggatttgctagggcagtgcgcaaccacccgggccttctcctgatggacaccacttttcgagacgcgcaccagagcctgctcgccactagagtccgaactcacgacctgaaaaaaatagctccatatgttgctcacaatttctctaagttgttcagcatggagaactgggggggtgccaccttcgacgttgccatgcggtttttgtatgagtgtccatggagacgactccaggaactacgcgagctgattcctaacatccctttccaaatgttattgagaggggccaatgccgttggttatacaaactatcccgacaatgtggttttcaagttctgcgaggttgctaaggaaaacggcatggatgtgttcagagtctttgattctctgaactatctgcctaacatgttgttaggaatggaggctgcgggtagcgctggtggcgtcgtcgaggccgcaatctcctacaccggggacgtcgccgatcctagtcggaccaaatattcattacagtactacatgggcctcgctgaggaactggtgcgcgcaggcactcacatcttgtgtattaaggatatggcaggactgctgaaaccaactgcgtgcacaatgctcgtatccagccttcgagaccggtttccagatctccccttacacattcacacccacgacacatctggagctggggtggccgctatgctggcctgcgctcaggctggagccgatgtcgtcgacgtggccgcagattctatgagtgggatgaccagtcagccctccatgggagctctggtggcatgtacacgcggcacacccctggacaccgaggttccaatggaaagggtgtttgattatagtgagtactgggaaggagccagggggctgtacgcggccttcgattgcaccgctaccatgaagtccggcaattccgatgtatacgaaaacgaaattccaggcggacagtacactaatctgcatttccaggcccactctatggggttgggttcaaagtttaaagaagtgaagaaagcgtatgttgaggcaaaccagatgctgggtgacctgataaaggtgacacctagctctaaaatcgtgggcgacctcgcccaatttatggtgcaaaacgggctcagccgcgctgaggccgaagctcaggccgaggaactgagctttcctagatctgtggtggagtttctccagggatatattggcgtaccccatgggggctttcccgagccctttcggtctaaggtcctgaaagacctgcctcgcgtggagggacggcctggggcaagtttgccgcctttggaccttcaggccctcgaaaaagaactcgtggacagacacggagaagaggtgaccccagaagatgtgctcagcgccgcaatgtatcctgatgtctttgcccactttaaggactttacagcaacattcggccctctggacagcctgaatacacgtctgttcttacaggggcctaaaattgcagaagagtttgaagtcgaactggaaaggggtaagactctgcatataaaggcgctcgccgtttctgacttgaatagagcagggcagcgacaggtctttttcgagctgaacggacagctcagaagtattctcgttaaggatacacaggcaatgaaagagatgcacttccaccccaaggccctgaaggatgtgaagggccagatcggggctcccatgcccgggaaagtgattgacatcaaagtagtggccggggccaaggtcgccaaagggcaacccctctgcgtactctccgccatgaaaatggaaacagttgtgactagtccaatggaaggaacagtgagaaaggtgcatgtgactaaagacatgacactggaaggcgatgacctgattctggagatcgagtag

SEQ ID NO: 342283 - DNA, 3537 bp, Artificial Sequence
  derived and/or modified sequence
atgctgaagttccggaccgtgcacggcggcctgcggctgctgggcataagacggacctcaaccgctcccgccgcaagtcccaacgtcaggcggttggaatacaagcccattaaaaaggttatggtggctaatcgtggtgagatcgccatacgcgtgttcagagcctgcactgagctcggcatccggactgtggcaatctactctgagcaggatactgggcaaatgcatcgccaaaaggccgacgaagcctaccttattgggcgtggactggcacccgtgcaggcctacctgcacattcccgacatcatcaaagttgctaaagaaaataacgttgatgcagtacaccccgggtatggcttcctgagtgagcgggccgacttcgctcaggcttgccaggatgctggggtgcgatttataggaccttcaccagaggtggtaagaaagatgggcgacaaagtggaagccagggctatcgcaatcgccgccggtgtgccagtggtgcccggaaccgacgcccccataacctctctgcacgaagctcatgaattctcaaacacatatggattccctattatatttaaggcagcttatggaggtggggggagagggatgcgagttgtgcacagctatgaggagttagaggaaaattacacccgtgcctactccgaggcccttgctgcctttggtaacggagcgctgtttgtggagaagtttattgagaagcccaggcatatcgaggtccagatactcggagaccagtatggtaacatcctacacctgtacgagcgtgattgcagcatccagcgccgtcatcagaaggtggtggagattgcccccgccgctcatctcgacccccagctcaggacgagactcacatccgattctgtgaaattggctaagcaggtcggctacgagaatgccggtaccgtagagttcctcgtggaccgccacggcaagcactattttatagaagtcaattctcgcctccaagttgaacacacagtgacggaggagatcaccgacgttgacctggtgcatgcccagatacatgtcgctgagggcagaagcctgccagacttggggctgcgccaggagaacattcggataaacggatgcgcaatacagtgcagagtgaccactgaggatcctgcccgttctttccagccagacaccgggcgcattgaggtctttagaagcggagaagggatggggatccgccttgataacgcaagcgcctttcagggcgctgtgatttccccacactacgacagtctgctggtgaaagttatcgcccacggaaaggatcatcccactgcagcaaccaagatgagtcgcgctttagccgagtttcgagtccgcggtgtcaagacaaacatcgccttcctgcagaacgtgttgaataaccaacagtttttggccggcacagtggacacccagtttattgatgaaaacccagagctctttcagcttaggcctgcccagaatcgcgcacagaaactgctgcattacctgggacacgtcatggtcaacggtcctactaccccaatccccgtaaaggctagcccttcaccaactgaccccgtggtaccagcagtgccaatcggccctcctccagcaggatttcgggatatcttattgcgggagggcccagagggctttgcgcgcgccgtcagaaaccacccagggctgctgctgatggataccacattcagagacgcccaccagagcttgctggccacccgcgtgcggacacacgacctcaagaagattgcgccgtacgtagctcacaacttctccaagctgttcagcatggaaaattggggtggcgccacctttgatgtggcgatgaggttcctctatgagtgcccctggcggaggctgcaagagctgagagaactgataccgaatattccctttcagatgctcctgagaggagcgaatgccgtcggatacactaactatcctgacaatgtcgttttcaaattttgcgaagtagcaaaagaaaacgggatggacgtattccgtgtgttcgacagtctgaactatctacctaacatgcttcttggaatggaggcagccggttccgcaggcggtgtcgtcgaggctgccatctcctataccggagatgtagctgatcctagcaggacaaaatattccttgcagtactacatggggctggctgaagaattagtgcgcgccggaactcatatactctgtattaaggacatggccggactcctgaagcctacagcttgtacaatgctcgtgagcagccttcgggatcgttttcccgatctccccctccacatccacacacatgacacatctggggcaggtgtagccgccatgctcgcttgcgcccaagctggagctgatgtggtggatgtggccgcggattctatgtccggaatgacatcccagccgagtatgggcgcactcgtcgcatgtacacggggaaccccgctggacaccgaggtgccaatggaaagggtgtttgactatagtgaatactgggagggagctcgaggcctgtacgccgccttcgattgcacggctactatgaaatcaggcaatagcgacgtttatgagaacgagatacccggtggtcaatatactaacctacatttccaggcccacagcatgggcctgggctccaagtttaaggaggtcaagaaagcttacgtcgaagctaatcagatgttgggggatcttataaaggtgacaccatcttcaaaaatagtgggagatcttgcacagttcatggtccagaacgggctctcacgggccgaggcggaggcgcaggctgaagagttgagcttccccaggtccgtggtggagtttttgcagggttacatcggcgtcccccatggggggttcccggagccctttcgtagcaaagtcttaaaagatctgccgagagtggagggccgcccgggggcgagcctacctccactggaccttcaggctctagaaaaagagttggttgacaggcatggggaagaggtaacccctgaagatgttctgagtgcagctatgtacccagacgttttcgcccatttcaaagacttcactgctacatttggacctctcgacagtctcaacacgaggttgttcctccagggacccaaaatcgccgaagagtttgaggtcgagttggagcgcgggaaaacactgcatattaaagctttggccgtttcagatttgaatcgggctggccagcgacaagtgttctttgagctgaatggacagctgcgttccatattagttaaggacacccaggccatgaaagaaatgcactttcaccccaaggcccttaaagacgtcaaaggccagataggagctcctatgcccgggaaggttatcgatatcaaagtagttgcaggcgctaaggtagccaagggacagcctctgtgtgtcctaagcgccatgaaaatggagactgtcgttaccagcccgatggagggcactgtccgcaaagtacacgtcaccaaggatatgacgctagagggtgacgacctgattctggaaatcgagtag

SEQ ID NO: 342284 - DNA, 1590 bp, Artificial Sequence
  derived and/or modified sequence
atgctgaaattcaggaccgttcatggaggtctgagacttttagggatccgacgaaccagcacagcccctgcggcaagtcccaacgtgcgtagactcgagtacaagcccatcaagaaagtaatggtcgcaaacaggggcgagatcgcgatccgtgttttccgggcttgtaccgagctggggattcggacggtggcgatatacagcgagcaggatactggacagatgcaccgacaaaaagcagacgaggcctatctgatcggtcgtggcctggcacccgtgcaggcttacctacatatccctgatattatcaaggtcgctaaggaaaacaacgttgacgcggtccaccccggttatggattcctgagcgagcgggctgacttcgcacaggcatgtcaagatgctggcgtccgcttcattggaccctctccggaggttgtccgaaaaatgggtgacaaagttgaggcaagggccatagcaatcgctgcaggtgtaccagtggtccccggtaccgacgccccaatcacgtcacttcacgaggcccacgaattcagcaacacttatgggttccccattatctttaaggccgcatacggcggagggggtcggggaatgagggtggttcacagctacgaggagttggaggaaaattatactcgcgcatactctgaggctctagcggcatttggaaacggagcactctttgtcgagaaattcatagaaaaaccaagacatatagaggttcagatcttgggggaccagtatggaaacatcctccatttgtacgaacgagactgcagtattcagcgcaggcatcagaaggttgtagaaattgctcctgccgctcatttggatccccagctgcgcactcggctaacttctgattccgtcaagcttgcgaagcaggtgggctacgaaaacgccggaacagttgagtttctggtcgacaggcacgggaaacactacttcatagaggtaaacagtcgcttacaggtcgagcataccgtgaccgaggagatcactgacgtggacctggttcacgcacagatccacgtcgctgagggaaggagcctgccagatctgggtcttcggcaagagaatatacgtattaatgggtgtgctatccagtgccgggtcacaaccgaggaccctgctcggagtttccagcctgataccggtagaatcgaagtctttagatccggcgaagggatggggatcaggctggataacgccagcgccttccagggcgctgttatctctcctcactatgattccctgctggtgaaggtgatcgcacacgggaaggaccatccgactgctgcaaccaagatgagccgggcactcgccgagtttcgtgtgagaggagtgaaggtgcgcaggcaccaggctcagcccctggccgctgctttaggtcgcccttgtggccaggaagcccgtcgccctcaggccgcagtaaccgctcctaccggacccggatcccccaccttggttcgcgtccctcccgctgccagggtactgagctctcgcctcggaggaccttctcaaaccacacccgagaccagtacagaagtgtcgcctacaatccttctctag

SEQ ID NO: 342285 - DNA, 3537 bp, Artificial Sequence
  derived and/or modified sequence
atgcttaagtttaggacagtccacggcggactacggcttctcgggatacgtaggacctccaccgcacccgctgcctcacccaacgtaaggaggttagaatataaaccgatcaaaaaagtcatggtggctaaccggggagaaatcgcaattcgcgttttcagagcctgtacagagctggggatcagaacagttgccatctacagcgaacaggatacaggccagatgcacaggcaaaaagcagatgaagcttacctgataggtcggggtctcgctccagtccaggcctacctccacatccccgatatcattaaagtggccaaggagaataacgtggatgcagttcatcccggatacggattcctgtctgaacgcgcagactttgctcaggcgtgtcaggacgcaggtgtccgcttcatcgggccatcccctgaagtagtgcggaagatgggcgataaagtggaggcaagggcaatcgcaatagcagccggagtccccgtcgtccccggaacagatgccccaatcacttccctacatgaagctcacgagtttagtaacacttacggctttccaatcatatttaaggctgcctacggaggtgggggtagaggtatgcgggtggtgcacagttacgaggaattggaggagaactataccagggcttactccgaggctctagccgctttcgggaacggggcactgtttgttgagaaattcattgaaaaaccaaggcatattgaggttcagatccttggggaccaatatggtaatatcctgcacctgtatgagagggactgctcgattcaaagacgacaccaaaaggtggtggaaatcgctcccgcagcacatctcgatccccaacttcgtacacggctaacaagcgactccgtaaaactggctaaacaagtaggatacgaaaatgccggaacagtggaattcctcgtcgaccgtcatgggaaacactactttattgaggtgaactctagactccaggtcgagcacacagtgaccgaggaaattacagacgttgatttagttcatgcccaaatccatgttgccgaaggacgttcccttcccgatttgggtctccgacaggaaaacattagaataaacgggtgtgctatccaatgccgggtgacgaccgaagacccggcacgatcattccagccagacaccgggagaatcgaggtgtttcgatcaggcgagggtatgggaatccggcttgataacgcctccgcatttcagggagcggttatctcaccccactacgattcattgctggtgaaggtgattgcccatgggaaggatcaccccaccgctgcaaccaagatgtctagagcgctcgcagagttccgtgtcaggggagtgaaaacgaatatcgcttttctccagaacgttctcaataaccagcagtttctcgctggaaccgtggacacacagtttatcgatgagaatccagaactcttccagctccggccagcacagaacagggctcagaaactacttcattatcttggccacgtgatggtgaatggacctacaacccccatacctgtaaaggcaagtccttcacctactgatccagtagtgccagccgtgcctatcggcccaccgccagccggttttagagacattctactccgtgagggccctgaggggttcgctagggccgtgcgtaaccatcctgggctgctcttgatggataccaccttcagagatgcccaccaaagcttgcttgcgacacgagtgagaacacacgacctgaaaaaaattgctccctacgtggctcacaatttctcaaagcttttttcaatggagaattggggtggggctacttttgacgtggcaatgcggtttctgtacgaatgcccatggagaaggctgcaggagctgcgagagttaattccaaatattccgtttcaaatgctactgaggggagccaacgcggtgggctacaccaattaccccgataacgtcgtgttcaagttttgcgaggtcgccaaggaaaatggtatggacgtcttcagagtatttgactctttgaattaccttccaaacatgctgttgggcatggaagctgctggttctgcaggcggtgtggtggaggcggcaatttcttataccggagacgtagccgatccaagccgcacaaagtatagtttgcagtattatatgggtcttgctgaggaactggtgcgcgctgggactcacattctgtgtatcaaagatatggccggactcctgaagcctactgcatgcacaatgctggtgagcagcctcagagaccggttccctgatttaccattgcacatacacacacatgacactagtggtgccggtgtggcagctatgttggcttgtgcccaggccggagctgatgttgtggacgtggcggctgacagcatgtccgggatgacttctcagccctcaatgggggcactcgtggcttgtacccgagggactcctctggataccgaggtacccatggaacgggtgtttgactattccgagtattgggagggagctcgtgggctgtatgctgccttcgattgtacagccaccatgaagtccggaaactccgacgtgtacgaaaacgagattccgggaggccagtataccaacctccatttccaggctcattctatgggcctgggctccaaatttaaagaggttaaaaaagcctacgttgaagctaatcagatgctgggggacctgataaaggtgacaccgagtagcaaaatcgtcggcgatcttgctcagttcatggtgcaaaatggcctgagtcgagccgaagcagaggctcaagcagaggagcttagttttccaaggagtgttgtggagttccttcaggggtatatcggagtacctcatggtggctttccagaacctttccggagcaaagtactgaaggatctgccacgcgttgagggcagaccaggggcaagtctcccgccattggatctgcaggccttggagaaagagctcgtggataggcatggagaggaagttacgcctgaggatgtcttatcagccgctatgtacccagacgtatttgcccactttaaggatttcacagcaacatttgggcctctggactctcttaacacccgcctgtttcttcagggcccaaaaatcgctgaggaattcgaagtggagctggagcggggaaaaaccctacatatcaaagctttggccgtgtccgacctgaatcgagccggacaacggcaggtcttcttcgagttaaacgggcagcttcgcagtattttggtgaaagacacccaggctatgaaagagatgcattttcatccaaaagctttgaaagacgtgaaaggccagattggggcacctatgcccggaaaggttattgacatcaaggtggtggccggtgccaaagtagctaaaggccaaccattgtgtgtactgtcagcgatgaaaatggagactgtggtgacctcccccatggaggggaccgtacgaaaagtgcacgtgaccaaggatatgaccctcgagggtgacgatttaatcctggaaatcgagtag

SEQ ID NO: 342286 - DNA, 3537 bp, Artificial Sequence
  derived and/or modified sequence
atgctgaaatttcggacagttcacggaggcctccgcctccttgggattcgcagaaccagcactgcccctgccgctagtccgaatgtgagacgcctcgagtacaagccaattaagaaggtgatggtggcaaaccgcggagaaattgccattagggtgtttagagcctgcactgaacttggtattagaaccgtggctatctactcagagcaggacaccggacagatgcatagacagaaggcagacgaagcctatctgatagggcgaggcctggcccctgtacaagcttacttacacattcccgacatcattaaggtggccaaggagaacaacgtggatgcagtccaccctggctacggtttcctatcagagcgagcggattttgcgcaggcttgccaggacgctggtgtgcgatttatcggccctagccccgaagtggttcgaaaaatgggcgacaaggtcgaagccagagccatagccattgcagcgggagtgccagtcgtgcccggaaccgatgcgcctattacatccctgcacgaggcgcatgagttctccaacacctacggattccccatcatcttcaaagccgcttatggaggcggtggcaggggcatgagagtagtacatagctacgaagaactggaagagaactacactcgggcatactccgaggccctggccgcattcggtaacggcgctttgtttgtcgaaaaattcatcgaaaagcctcggcacatcgaggtgcagatcctgggagatcagtacggaaatattcttcatttatatgagagagactgctcgattcagagacgccaccaaaaggtcgttgagatagcccctgcagctcatctcgacccacagctgcgcactaggctgacaagtgacagtgtaaagctcgccaagcaggtcggctatgaaaatgccggaactgttgagttcctggtggaccggcacggcaagcattatttcatcgaggtaaattcccgcttgcaggtggagcacacggtgactgaagaaatcacagatgtggatctggtgcatgcacaaatccacgtggccgaaggaaggtctctgccagacttaggattacggcaggaaaacatccgcataaacggatgcgctattcagtgtagggtaaccacggaggacccagctcggtcatttcagcctgatacaggacgcatagaggttttccggagtggcgagggaatggggatccgccttgataatgcaagcgcctttcagggtgctgttatatctccgcactacgactcattgctcgtgaaagtgatcgcccacggcaaagaccaccctacagcagccacgaagatgtcccgcgcactcgcagagttcagggtgcgaggcgttaaaacaaacatcgccttcctccagaacgttctcaacaatcagcagtttttagcaggcaccgtggacacacagtttatcgacgaaaatccggagttgtttcaacttcggccagctcagaacagagctcagaaactactgcactaccttggccacgtaatggtgaatggccctactacaccgattccagtgaaggcctcccctagccctaccgacccagtggtacctgcagttcccattggccctcccccagccggttttcgcgacattctcctgagagagggccctgagggctttgccagggccgtccgcaaccacccgggactgctcctcatggataccacctttagagatgcccaccaaagcctgctggcaactagagtacggactcatgatcttaagaagattgcgccttacgtggctcacaacttctccaaactttttagtatggagaattgggggggagcaacctttgacgtcgcgatgcgatttttatacgagtgcccgtggagaagactgcaagagctgcgggagctgattccgaatatacctttccagatgctgctccggggtgctaacgctgtcggctacactaactatcccgataatgtcgtgtttaagttctgcgaggtcgccaaggaaaacggaatggatgtgttccgcgttttcgactctctgaactacttgcctaacatgcttctgggcatggaggctgccggaagcgccggaggagttgtagaggccgctatatcgtatacgggcgatgttgcagatcctagtcggaccaagtattccctgcaatattatatgggtctcgctgaagagctggttcgggcaggtacgcatatcttgtgtattaaggacatggcgggtttgcttaagcctactgcatgcaccatgctcgttagctcactgagggacaggttccccgaccttccattacatattcacactcacgacaccagcggggcaggggtggcagcgatgctggcttgtgcacaagcgggagctgatgtcgtggacgtggcagccgacagcatgtctgggatgaccagccagccctccatgggcgctctggtcgcttgcactagaggtacgccactagatactgaggtgccaatggaaagagtgttcgactattctgaatattgggagggtgctcgcggactgtatgctgccttcgactgcaccgctacaatgaagagcgggaattcagacgtctatgagaatgaaattccaggaggccagtatacaaatttgcacttccaggcccattctatggggctcgggagcaagttcaaagaggtcaagaaggcctatgtggaggccaatcagatgctcggggacctcatcaaagtgacgccatctagcaagatcgtcggggacttagcacagtttatggtgcaaaacgggttgtcacgagccgaggccgaggcccaggccgaagagctctctttcccacgaagcgttgttgagtttctgcaggggtacattggcgtacctcacggcggatttcccgaaccattccggtccaaggtgctgaaggatttgcccagggtcgaggggcgacctggcgcttcactgccgcctttggacctgcaggcgctggagaaggaactcgtggataggcacggcgaagaggttactcccgaggacgtcctgtctgctgctatgtacccagatgttttcgcccattttaaagatttcactgccactttcggcccacttgattccctgaacacacgactgtttcttcagggacccaaaatcgcagaagaatttgaagttgagttggagagggggaagactctgcacatcaaagcgctagctgtatctgatctgaaccgggcaggacagaggcaagtcttcttcgaactcaacggccagctgcggtctatcctcgtaaaagacacccaagccatgaaggaaatgcacttccacccaaaagccctgaaggacgtcaaaggccagatcggagcccctatgccaggaaaagtaattgatataaaagtagtcgctggggctaaggtggccaaaggccagccgctatgcgtgctctccgcgatgaaaatggaaactgtcgtgacgtcaccaatggaaggtactgtgagaaaggtgcatgtgactaaagatatgaccttggaaggggacgatttgattttggagattgaatag

SEQ ID NO: 342287 - DNA, 3537 bp, Artificial Sequence
  derived and/or modified sequence
atgctgaaattcaggacggtacacggcggactgagactactgggaatccgcaggacctcaactgctcctgctgcttccccgaacgtccgcagactcgagtacaaacccataaagaaggtgatggtggccaataggggtgagatcgcaattagagtatttcgtgcttgcaccgagctgggaatcaggactgtcgccatttactccgaacaggacacgggccagatgcatcgtcagaaagcagatgaggcctatctgatcggccgtggtcttgctccggtgcaggcatacctgcacattccagatatcatcaaggtagcaaaagagaacaatgtagatgctgtgcacccaggatacggctttctgtccgaaagggccgacttcgcgcaggcctgccaggatgccggtgtgaggtttatcggaccaagcccagaggttgtaagaaaaatgggtgataaagtcgaagccagagcaatcgccatcgctgctggcgtgccagtggtgcctgggacagacgccccaattacaagcttgcacgaagcccatgagttctccaatacctatggtttccccatcatatttaaggccgcatatggtgggggaggtcgaggtatgagagtcgtgcacagctacgaggaactagaggagaattatacgagggcatactccgaagcgttggccgcattcggaaacggagctctgttcgtggaaaaattcatagagaagcccagacacatcgaggtgcagatcctcggggaccagtatggaaatattctgcacctgtatgagcgggattgctcgattcaacggcgtcatcagaaggtcgtcgagattgccccagcagcccacctcgatcctcagttaaggaccaggctcactagcgacagcgtcaagctcgccaagcaggtcggatacgagaacgccggaaccgtggagttcctggtcgatcggcatggaaagcattactttatcgaggtgaatagccgcctgcaagtcgagcacaccgtcaccgaagagatcacggacgtcgacttagtccatgcacagatccacgtggcagagggaaggagtctgcctgatctgggactgagacaggaaaacatcagaataaacgggtgtgccattcaatgccgggtgaccacggaggatcctgcaagatccttccagccagacactggacgcatcgaagtatttaggagtggcgaggggatgggtatccggcttgataacgcatccgccttccagggggcagtgatcagtcctcactatgactctctcctcgtcaaggtcatcgcacatggcaaagatcatcctacggccgctacgaagatgagtcgcgcacttgctgagttccgagtgaggggcgttaagactaacattgcattcttacaaaatgtcctgaataaccaacagttcctagctggtacagtggatacccagttcatcgatgaaaacccagagttatttcagctgcggcctgctcaaaaccgcgctcagaaactcctccactatcttggccatgtaatggtgaacggaccaaccacccccatccccgttaaagcatccccaagtcccaccgaccctgtagtgcccgctgttccgattggcccacctcctgccggtttccgagacattctactgcgagaaggacctgagggattcgctcgagcggtgcgaaaccatcccggactgttgctgatggacacaacattccgggacgcccaccagtctctgttggcgaccagggtgagaactcatgacttaaagaagatcgctccttatgtggctcacaattttagcaaattgttttccatggagaattggggtggtgcaacctttgacgtcgccatgaggtttctgtatgagtgtccatggcggaggctgcaagagctgcgggaactgattccaaatattcctttccaaatgctgttacgcggtgctaacgccgtggggtacaccaactacccagacaacgttgtattcaagttttgtgaagtcgccaaggaaaacggcatggatgtgtttagagtgtttgatagtctgaactatctcccaaacatgcttttggggatggaagccgctggatccgcaggtggcgtggtcgaggctgccatctcctatacaggcgatgttgctgatccatctcgcaccaaatacagccttcagtattacatggggctcgcagaggagcttgtgagagcaggcacacatattctttgcatcaaggacatggccggattgcttaaacctactgcctgtaccatgctggtgagctcactaagagatagattcccggatctgcctttgcatattcatactcacgataccagcggagctggggtggcagcaatgttggcgtgtgctcaggcaggcgcagatgtggttgacgtggcggctgactctatgtccggaatgaccagtcagccttcaatgggcgcactggtggcttgcacgcgtggaactccacttgacacagaagtgccgatggagcgggtctttgattactctgaatactgggagggggctagagggttgtatgcggcatttgactgcaccgcaacaatgaagagcggcaatagtgatgtgtatgaaaacgagatccctggaggacaatacactaatctgcacttccaagcgcacagcatgggactaggaagtaaattcaaggaggtgaagaaggcatatgtggaagcgaaccagatgctgggagatctcatcaaagtgacaccttctagtaagatcgtcggcgatctggcccagtttatggtccaaaacgggttgtccagagctgaagctgaggcccaggccgaggagctgtctttcccgcgatctgtggtggaatttctccaagggtacatcggcgtgccacatggagggtttccagaacccttcagaagcaaggtcctcaaagacctcccacgagtcgaaggaaggcccggtgcatcactacctcccttggacctacaggcccttgagaaagagttggtggacagacatggagaggaggtgactcccgaggatgtattgagtgcagctatgtaccctgacgtgttcgcccattttaaggattttactgctacgttcgggccactggactcactgaatacccgcctgtttcttcaaggccctaagatcgccgaggaattcgaagtggagcttgagcggggaaagacactccacattaaggccttggccgttagtgacttgaaccgggctgggcagcgccaggttttcttcgaacttaacggacagcttaggagtattctggtgaaagatacacaggccatgaaggaaatgcactttcaccctaaggctctgaaagatgtcaaaggccagattggcgctcccatgcccggtaaagtgattgacattaaggtggtagccggtgctaaagtagctaaagggcaaccactctgcgtgctcagtgcgatgaagatggagaccgtagtcacatcccccatggagggcacggtccgcaaagtgcacgtaaccaaggatatgacactggagggtgacgacttaattcttgagatagagtag

SEQ ID NO: 342288 - DNA, 1714 bp, Artificial Sequence
  derived and/or modified sequence
gtcagtggaggcagcagcggtagaggcggcggcgaggactggcgacggcgaggagatagtgtctgccttctggagagctgaccaaacactaaggatgctgaagttccgaacagtccatgggggcctgaggctcctgggaatccgccgaacctccaccgcccccgctgcctccccaaatgtccggcgcctggagtataagcccatcaagaaagtcatggtggccaacagaggtgagattgccatccgtgtgttccgggcctgcacggagctgggcatccgcaccgtagccatctactctgagcaggacacgggccagatgcaccggcagaaagcagatgaagcctatctcatcggccgcggcctggcccccgtgcaggcctacctgcacatcccagacatcatcaaggtggccaaggagaacaacgtagatgcagtgcaccctggctacgggttcctctctgagcgagcggacttcgcccaggcctgccaggatgcaggggtccggtttattgggccaagcccagaagtggtccgcaagatgggagacaaggtggaggcccgggccatcgccattgctgcgggtgttcccgttgtccctggcacagatgcccccatcacgtccctgcatgaggcccacgagttctccaacacctacggcttccccatcatcttcaaggcggcctatgggggtggagggcgtggcatgagggtggtgcacagctacgaggagctggaggagaattacacccgggcctactcagaggctctggccgcctttgggaatggggcgctgtttgtggagaagttcatcgagaagccacggcacatcgaggtgcagatcttgggggaccagtatgggaacatcctgcacctgtacgagcgagactgctccatccagcggcggcaccagaaggtggtcgagattgcccccgccgcccacctggacccgcagcttcggactcggctcaccagcgactctgtgaaactcgctaaacaggtgggctacgagaacgcaggcaccgtggagttcctggtggacaggcacggcaagcactacttcatcgaggtcaactcccgcctgcaggtggagcacacggtcacagaggagatcaccgacgtagacctggtccatgctcagatccacgtggctgagggcaggagcctacccgacctgggcctgcggcaggagaacatccgcatcaacgggtgtgccatccagtgccgggtcaccaccgaggaccccgcgcgcagcttccagccggacaccggccgcattgaggtgttccggagcggagagggcatgggcatccgcctggataatgcttccgccttccaaggagccgtcatctcgccccactacgactccctgctggtcaaagtcattgcccacggcaaagaccaccccacggccgccaccaagatgagcagggcccttgcggagttccgcgtccgaggtgtgaaggtcagaagacaccaggcacagcccttggccgcagccctgggccgcccctgtggacaggaagccaggaggccccaggctgctgtgactgcccccaccggccctggtagccccacccttgtccgtgtgccaccagcggcccgtgtcctgtcctcccgtctcgggggacctagccagacaacaccagagactagcactgaggtgtccccaacaattttattataaataaaaacaagactcccagtgggtggctgc

SEQ ID NO: 342289 - DNA, 4004 bp, Artificial Sequence
  derived and/or modified sequence
caggcagcaggcctcaggcccagacttgggtgttacaggaacagtgtggcctctctggaactctgcagaccaactgccgtgatgctgaagttccgaacagtccatgggggcctgaggctcctgggaatccgccgaacctccaccgcccccgctgcctccccaaatgtccggcgcctggagtataagcccatcaagaaagtcatggtggccaacagaggtgagattgccatccgtgtgttccgggcctgcacggagctgggcatccgcaccgtagccatctactctgagcaggacacgggccagatgcaccggcagaaagcagatgaagcctatctcatcggccgcggcctggcccccgtgcaggcctacctgcacatcccagacatcatcaaggtggccaaggagaacaacgtagatgcagtgcaccctggctacgggttcctctctgagcgagcggacttcgcccaggcctgccaggatgcaggggtccggtttattgggccaagcccagaagtggtccgcaagatgggagacaaggtggaggcccgggccatcgccattgctgcgggtgttcccgttgtccctggcacagatgcccccatcacgtccctgcatgaggcccacgagttctccaacacctacggcttccccatcatcttcaaggcggcctatgggggtggagggcgtggcatgagggtggtgcacagctacgaggagctggaggagaattacacccgggcctactcagaggctctggccgcctttgggaatggggcgctgtttgtggagaagttcatcgagaagccacggcacatcgaggtgcagatcttgggggaccagtatgggaacatcctgcacctgtacgagcgagactgctccatccagcggcggcaccagaaggtggtcgagattgcccccgccgcccacctggacccgcagcttcggactcggctcaccagcgactctgtgaaactcgctaaacaggtgggctacgagaacgcaggcaccgtggagttcctggtggacaggcacggcaagcactacttcatcgaggtcaactcccgcctgcaggtggagcacacggtcacagaggagatcaccgacgtagacctggtccatgctcagatccacgtggctgagggcaggagcctacccgacctgggcctgcggcaggagaacatccgcatcaacgggtgtgccatccagtgccgggtcaccaccgaggaccccgcgcgcagcttccagccggacaccggccgcattgaggtgttccggagcggagagggcatgggcatccgcctggataatgcttccgccttccaaggagccgtcatctcgccccactacgactccctgctggtcaaagtcattgcccacggcaaagaccaccccacggccgccaccaagatgagcagggcccttgcggagttccgcgtccgaggtgtgaagaccaacatcgccttcctgcagaatgtgctcaacaaccagcagttcctggcaggcactgtggacacccagttcatcgacgagaacccagagctgttccagctgcggcctgcacagaaccgggcccaaaagctgttgcactacctcggccatgtcatggtaaacggtccaaccaccccgattcccgtcaaggccagccccagccccacggaccccgttgtccctgcagtgcccataggcccgcccccggctggtttcagagacatcctgctgcgagaggggcctgagggctttgctcgagctgtgcggaaccacccggggctgctgctgatggacacgaccttcagggacgcccaccagtcactgctggccactcgtgtgcgcacccacgatctcaaaaagatcgccccctatgttgcccacaacttcagcaagctcttcagcatggagaactggggaggagccacgtttgacgtcgccatgcgcttcctgtatgagtgcccctggcggcggctgcaggagctccgggagctcatccccaacatccctttccagatgctgctgcggggggccaatgctgtgggctacaccaactacccagacaacgtggtcttcaagttctgtgaagtggccaaagagaatggcatggatgtcttccgtgtgtttgactccctcaactacttgcccaacatgctgctgggcatggaggcggcaggaagtgccggaggcgtggtggaggctgccatctcatacacgggcgacgtggccgaccccagccgcaccaagtactcactgcagtactacatgggcttggccgaagagctggtgcgagctggcacccacatcctgtgcatcaaggacatggccgggctgctgaagcccacggcctgcaccatgctggtcagctccctccgggaccgcttccccgacctcccactgcacatccacacccacgacacgtcaggggcaggcgtggcagccatgctggcctgtgcccaggctggagctgatgtggtggatgtggcagctgattccatgtctgggatgacttcacagcccagcatgggggccctggtggcctgtaccagagggactcccctggacacagaggtgcccatggagcgcgtgtttgactacagtgagtactgggagggggctcggggactgtacgcggccttcgactgcacggccaccatgaagtctggcaactcggacgtgtatgaaaatgagatcccagggggccagtacaccaacctgcacttccaggcccacagcatggggcttggctccaagttcaaggaggtcaagaaggcctatgtggaggccaaccagatgctgggcgatctcatcaaggtgacgccctcctccaagatcgtgggggacctggcccagtttatggtgcagaatggattgagccgggcagaggccgaagctcaggcggaagagctgtcctttccccgctccgtggtggagttcctgcagggctacatcggtgtcccccatggggggttccccgaaccctttcgctctaaggtactgaaggacctgccaagggtggaggggcggcctggagcctccctccctcccctggatctgcaggcactggagaaggagctggtagaccggcatggggaggaggtgacgccggaagatgtgctctcagcagctatgtaccccgatgtgtttgcccacttcaaggacttcactgccacctttggccccctggatagcctgaatactcgcctcttcctgcagggacccaagatcgcagaggagtttgaggtggagctggagcggggcaagacgctgcacatcaaagccctggccgtgagcgacctgaaccgggccggccagaggcaggtcttctttgagctcaatgggcagctgcggtccatcttggtcaaggacacccaggccatgaaggagatgcacttccaccccaaggccctaaaggacgtgaagggccagatcggggcgcccatgcctgggaaggtgatagacatcaaagtggtggcaggggccaaggtggccaagggccagcccctgtgtgtgctcagtgccatgaagatggagactgtggtgacctcacccatggagggtactgtccgcaaggttcatgtgaccaaggacatgacactggaaggtgacgacctcatcctggagatcgagtgatcttgccccagaccggcagcctggccatccccaagccttcaacagaagctgtgctgccacggcaggcccaggccagccagtgcccgaggccaggaaggccgggccgtggaggtcctgtccacagctggacaggagagacaccgcctgcggtggttcattcctttcagccatcgtcctttcctccggcggacagctgcttacatgttcatctcttgccaaataagggtcccctcctcactggagactacaagtggtgggtcaggtggtcctaggacccaggggaggtttaggggtcctatctcctgggggaaggggagatctaagatgtcccaggtcctgggaagtttactcaataaagctggctttcccctgccctccatgctgga

SEQ ID NO: 342290 - DNA, 4005 bp, Artificial Sequence
  derived and/or modified sequence
gtcagtggaggcagcagcggtagaggcggcggcgaggactggcgacggcgaggagatagtgtctgccttctggagagctgaccaaacactaaggatgctgaagttccgaacagtccatgggggcctgaggctcctgggaatccgccgaacctccaccgcccccgctgcctccccaaatgtccggcgcctggagtataagcccatcaagaaagtcatggtggccaacagaggtgagattgccatccgtgtgttccgggcctgcacggagctgggcatccgcaccgtagccatctactctgagcaggacacgggccagatgcaccggcagaaagcagatgaagcctatctcatcggccgcggcctggcccccgtgcaggcctacctgcacatcccagacatcatcaaggtggccaaggagaacaacgtagatgcagtgcaccctggctacgggttcctctctgagcgagcggacttcgcccaggcctgccaggatgcaggggtccggtttattgggccaagcccagaagtggtccgcaagatgggagacaaggtggaggcccgggccatcgccattgctgcgggtgttcccgttgtccctggcacagatgcccccatcacgtccctgcatgaggcccacgagttctccaacacctacggcttccccatcatcttcaaggcggcctatgggggtggagggcgtggcatgagggtggtgcacagctacgaggagctggaggagaattacacccgggcctactcagaggctctggccgcctttgggaatggggcgctgtttgtggagaagttcatcgagaagccacggcacatcgaggtgcagatcttgggggaccagtatgggaacatcctgcacctgtacgagcgagactgctccatccagcggcggcaccagaaggtggtcgagattgcccccgccgcccacctggacccgcagcttcggactcggctcaccagcgactctgtgaaactcgctaaacaggtgggctacgagaacgcaggcaccgtggagttcctggtggacaggcacggcaagcactacttcatcgaggtcaactcccgcctgcaggtggagcacacggtcacagaggagatcaccgacgtagacctggtccatgctcagatccacgtggctgagggcaggagcctacccgacctgggcctgcggcaggagaacatccgcatcaacgggtgtgccatccagtgccgggtcaccaccgaggaccccgcgcgcagcttccagccggacaccggccgcattgaggtgttccggagcggagagggcatgggcatccgcctggataatgcttccgccttccaaggagccgtcatctcgccccactacgactccctgctggtcaaagtcattgcccacggcaaagaccaccccacggccgccaccaagatgagcagggcccttgcggagttccgcgtccgaggtgtgaagaccaacatcgccttcctgcagaatgtgctcaacaaccagcagttcctggcaggcactgtggacacccagttcatcgacgagaacccagagctgttccagctgcggcctgcacagaaccgggcccaaaagctgttgcactacctcggccatgtcatggtaaacggtccaaccaccccgattcccgtcaaggccagccccagccccacggaccccgttgtccctgcagtgcccataggcccgcccccggctggtttcagagacatcctgctgcgagaggggcctgagggctttgctcgagctgtgcggaaccacccggggctgctgctgatggacacgaccttcagggacgcccaccagtcactgctggccactcgtgtgcgcacccacgatctcaaaaagatcgccccctatgttgcccacaacttcagcaagctcttcagcatggagaactggggaggagccacgtttgacgtcgccatgcgcttcctgtatgagtgcccctggcggcggctgcaggagctccgggagctcatccccaacatccctttccagatgctgctgcggggggccaatgctgtgggctacaccaactacccagacaacgtggtcttcaagttctgtgaagtggccaaagagaatggcatggatgtcttccgtgtgtttgactccctcaactacttgcccaacatgctgctgggcatggaggcggcaggaagtgccggaggcgtggtggaggctgccatctcatacacgggcgacgtggccgaccccagccgcaccaagtactcactgcagtactacatgggcttggccgaagagctggtgcgagctggcacccacatcctgtgcatcaaggacatggccgggctgctgaagcccacggcctgcaccatgctggtcagctccctccgggaccgcttccccgacctcccactgcacatccacacccacgacacgtcaggggcaggcgtggcagccatgctggcctgtgcccaggctggagctgatgtggtggatgtggcagctgattccatgtctgggatgacttcacagcccagcatgggggccctggtggcctgtaccagagggactcccctggacacagaggtgcccatggagcgcgtgtttgactacagtgagtactgggagggggctcggggactgtacgcggccttcgactgcacggccaccatgaagtctggcaactcggacgtgtatgaaaatgagatcccagggggccagtacaccaacctgcacttccaggcccacagcatggggcttggctccaagttcaaggaggtcaagaaggcctatgtggaggccaaccagatgctgggcgatctcatcaaggtgacgccctcctccaagatcgtgggggacctggcccagtttatggtgcagaatggattgagccgggcagaggccgaagctcaggcggaagagctgtcctttccccgctccgtggtggagttcctgcagggctacatcggtgtcccccatggggggttccccgaaccctttcgctctaaggtactgaaggacctgccaagggtggaggggcggcctggagcctccctccctcccctggatctgcaggcactggagaaggagctggtagaccggcatggggaggaggtgacgccggaagatgtgctctcagcagctatgtaccccgatgtgtttgcccacttcaaggacttcactgccacctttggccccctggatagcctgaatactcgcctcttcctgcagggacccaagatcgcagaggagtttgaggtggagctggagcggggcaagacgctgcacatcaaagccctggccgtgagcgacctgaaccgggccggccagaggcaggtcttctttgagctcaatgggcagctgcggtccatcttggtcaaggacacccaggccatgaaggagatgcacttccaccccaaggccctaaaggacgtgaagggccagatcggggcgcccatgcctgggaaggtgatagacatcaaagtggtggcaggggccaaggtggccaagggccagcccctgtgtgtgctcagtgccatgaagatggagactgtggtgacctcacccatggagggtactgtccgcaaggttcatgtgaccaaggacatgacactggaaggtgacgacctcatcctggagatcgagtgatcttgccccagaccggcagcctggccatccccaagccttcaacagaagctgtgctgccacggcaggcccaggccagccagtgcccgaggccaggaaggccgggccgtggaggtcctgtccacagctggacaggagagacaccgcctgcggtggttcattcctttcagccatcgtcctttcctccggcggacagctgcttacatgttcatctcttgccaaataagggtcccctcctcactggagactacaagtggtgggtcaggtggtcctaggacccaggggaggtttaggggtcctatctcctgggggaaggggagatctaagatgtcccaggtcctgggaagtttactcaataaagctggctttcccctgcc

SEQ ID NO: 342291 - DNA, 4192 bp, Artificial Sequence
  derived and/or modified sequence
gtcagtggaggcagcagcggtagaggcggcggcgaggactggcgacggcgaggagctgccttctagtctcacctgtggacactttgccaaaggagtcgggcctgacggtggaagatgggaaatggccaaaagaataaaccatttcctcttacttaccgaatgaaaagcttgcttcatcttggcgttcaagactctctaatatgattccacctgttgggctctttcttccatttgcctccgcagatagtgtctgccttctggagagctgaccaaacactaaggatgctgaagttccgaacagtccatgggggcctgaggctcctgggaatccgccgaacctccaccgcccccgctgcctccccaaatgtccggcgcctggagtataagcccatcaagaaagtcatggtggccaacagaggtgagattgccatccgtgtgttccgggcctgcacggagctgggcatccgcaccgtagccatctactctgagcaggacacgggccagatgcaccggcagaaagcagatgaagcctatctcatcggccgcggcctggcccccgtgcaggcctacctgcacatcccagacatcatcaaggtggccaaggagaacaacgtagatgcagtgcaccctggctacgggttcctctctgagcgagcggacttcgcccaggcctgccaggatgcaggggtccggtttattgggccaagcccagaagtggtccgcaagatgggagacaaggtggaggcccgggccatcgccattgctgcgggtgttcccgttgtccctggcacagatgcccccatcacgtccctgcatgaggcccacgagttctccaacacctacggcttccccatcatcttcaaggcggcctatgggggtggagggcgtggcatgagggtggtgcacagctacgaggagctggaggagaattacacccgggcctactcagaggctctggccgcctttgggaatggggcgctgtttgtggagaagttcatcgagaagccacggcacatcgaggtgcagatcttgggggaccagtatgggaacatcctgcacctgtacgagcgagactgctccatccagcggcggcaccagaaggtggtcgagattgcccccgccgcccacctggacccgcagcttcggactcggctcaccagcgactctgtgaaactcgctaaacaggtgggctacgagaacgcaggcaccgtggagttcctggtggacaggcacggcaagcactacttcatcgaggtcaactcccgcctgcaggtggagcacacggtcacagaggagatcaccgacgtagacctggtccatgctcagatccacgtggctgagggcaggagcctacccgacctgggcctgcggcaggagaacatccgcatcaacgggtgtgccatccagtgccgggtcaccaccgaggaccccgcgcgcagcttccagccggacaccggccgcattgaggtgttccggagcggagagggcatgggcatccgcctggataatgcttccgccttccaaggagccgtcatctcgccccactacgactccctgctggtcaaagtcattgcccacggcaaagaccaccccacggccgccaccaagatgagcagggcccttgcggagttccgcgtccgaggtgtgaagaccaacatcgccttcctgcagaatgtgctcaacaaccagcagttcctggcaggcactgtggacacccagttcatcgacgagaacccagagctgttccagctgcggcctgcacagaaccgggcccaaaagctgttgcactacctcggccatgtcatggtaaacggtccaaccaccccgattcccgtcaaggccagccccagccccacggaccccgttgtccctgcagtgcccataggcccgcccccggctggtttcagagacatcctgctgcgagaggggcctgagggctttgctcgagctgtgcggaaccacccggggctgctgctgatggacacgaccttcagggacgcccaccagtcactgctggccactcgtgtgcgcacccacgatctcaaaaagatcgccccctatgttgcccacaacttcagcaagctcttcagcatggagaactggggaggagccacgtttgacgtcgccatgcgcttcctgtatgagtgcccctggcggcggctgcaggagctccgggagctcatccccaacatccctttccagatgctgctgcggggggccaatgctgtgggctacaccaactacccagacaacgtggtcttcaagttctgtgaagtggccaaagagaatggcatggatgtcttccgtgtgtttgactccctcaactacttgcccaacatgctgctgggcatggaggcggcaggaagtgccggaggcgtggtggaggctgccatctcatacacgggcgacgtggccgaccccagccgcaccaagtactcactgcagtactacatgggcttggccgaagagctggtgcgagctggcacccacatcctgtgcatcaaggacatggccgggctgctgaagcccacggcctgcaccatgctggtcagctccctccgggaccgcttccccgacctcccactgcacatccacacccacgacacgtcaggggcaggcgtggcagccatgctggcctgtgcccaggctggagctgatgtggtggatgtggcagctgattccatgtctgggatgacttcacagcccagcatgggggccctggtggcctgtaccagagggactcccctggacacagaggtgcccatggagcgcgtgtttgactacagtgagtactgggagggggctcggggactgtacgcggccttcgactgcacggccaccatgaagtctggcaactcggacgtgtatgaaaatgagatcccagggggccagtacaccaacctgcacttccaggcccacagcatggggcttggctccaagttcaaggaggtcaagaaggcctatgtggaggccaaccagatgctgggcgatctcatcaaggtgacgccctcctccaagatcgtgggggacctggcccagtttatggtgcagaatggattgagccgggcagaggccgaagctcaggcggaagagctgtcctttccccgctccgtggtggagttcctgcagggctacatcggtgtcccccatggggggttccccgaaccctttcgctctaaggtactgaaggacctgccaagggtggaggggcggcctggagcctccctccctcccctggatctgcaggcactggagaaggagctggtagaccggcatggggaggaggtgacgccggaagatgtgctctcagcagctatgtaccccgatgtgtttgcccacttcaaggacttcactgccacctttggccccctggatagcctgaatactcgcctcttcctgcagggacccaagatcgcagaggagtttgaggtggagctggagcggggcaagacgctgcacatcaaagccctggccgtgagcgacctgaaccgggccggccagaggcaggtcttctttgagctcaatgggcagctgcggtccatcttggtcaaggacacccaggccatgaaggagatgcacttccaccccaaggccctaaaggacgtgaagggccagatcggggcgcccatgcctgggaaggtgatagacatcaaagtggtggcaggggccaaggtggccaagggccagcccctgtgtgtgctcagtgccatgaagatggagactgtggtgacctcacccatggagggtactgtccgcaaggttcatgtgaccaaggacatgacactggaaggtgacgacctcatcctggagatcgagtgatcttgccccagaccggcagcctggccatccccaagccttcaacagaagctgtgctgccacggcaggcccaggccagccagtgcccgaggccaggaaggccgggccgtggaggtcctgtccacagctggacaggagagacaccgcctgcggtggttcattcctttcagccatcgtcctttcctccggcggacagctgcttacatgttcatctcttgccaaataagggtcccctcctcactggagactacaagtggtgggtcaggtggtcctaggacccaggggaggtttaggggtcctatctcctgggggaaggggagatctaagatgtcccaggtcctgggaagtttactcaataaagctggctttcccctgc

SEQ ID NO: 342292 - DNA, 1590 bp, Artificial Sequence
  derived and/or modified sequence
atgctgaagttcagaaccgtgcacggcggcctgagactgctgggcatcagaagaaccagcaccgcccccgccgccagccccaacgtgagaagactggagtacaagcccatcaagaaggtgatggtggccaacagaggcgagatcgccatcagagtgttcagagcctgcaccgagctgggcatcagaaccgtggccatctacagcgagcaggacaccggccagatgcacagacagaaggccgacgaggcctacctgatcggcagaggcctggcccccgtgcaggcctacctgcacatccccgacatcatcaaggtggccaaggagaacaacgtggacgccgtgcaccccggctacggcttcctgagcgagagagccgacttcgcccaggcctgccaggacgccggcgtgagattcatcggccccagccccgaggtggtgagaaagatgggcgacaaggtggaggccagagccatcgccatcgccgccggcgtgcccgtggtgcccggcaccgacgcccccatcaccagcctgcacgaggcccacgagttcagcaacacctacggcttccccatcatcttcaaggccgcctacggcggcggcggcagaggcatgagagtggtgcacagctacgaggagctggaggagaactacaccagagcctacagcgaggccctggccgccttcggcaacggcgccctgttcgtggagaagttcatcgagaagcccagacacatcgaggtgcagatcctgggcgaccagtacggcaacatcctgcacctgtacgagagagactgcagcatccagagaagacaccagaaggtggtggagatcgcccccgccgcccacctggacccccagctgagaaccagactgaccagcgacagcgtgaagctggccaagcaggtgggctacgagaacgccggcaccgtggagttcctggtggacagacacggcaagcactacttcatcgaggtgaacagcagactgcaggtggagcacaccgtgaccgaggagatcaccgacgtggacctggtgcacgcccagatccacgtggccgagggcagaagcctgcccgacctgggcctgagacaggagaacatcagaatcaacggctgcgccatccagtgcagagtgaccaccgaggaccccgccagaagcttccagcccgacaccggcagaatcgaggtgttcagaagcggcgagggcatgggcatcagactggacaacgccagcgccttccagggcgccgtgatcagcccccactacgacagcctgctggtgaaggtgatcgcccacggcaaggaccaccccaccgccgccaccaagatgagcagagccctggccgagttcagagtgagaggcgtgaaggtgagaagacaccaggcccagcccctggccgccgccctgggcagaccctgcggccaggaggccagaagaccccaggccgccgtgaccgcccccaccggccccggcagccccaccctggtgagagtgccccccgccgccagagtgctgagcagcagactgggcggccccagccagaccacccccgagaccagcaccgaggtgagccccaccatcctgctgtag

SEQ ID NO: 342293 - DNA, 3537 bp, Artificial Sequence
  derived and/or modified sequence
atgctgaagttcagaaccgtgcacggcggcctgagactgctgggcatcagaagaaccagcaccgcccccgccgccagccccaacgtgagaagactggagtacaagcccatcaagaaggtgatggtggccaacagaggcgagatcgccatcagagtgttcagagcctgcaccgagctgggcatcagaaccgtggccatctacagcgagcaggacaccggccagatgcacagacagaaggccgacgaggcctacctgatcggcagaggcctggcccccgtgcaggcctacctgcacatccccgacatcatcaaggtggccaaggagaacaacgtggacgccgtgcaccccggctacggcttcctgagcgagagagccgacttcgcccaggcctgccaggacgccggcgtgagattcatcggccccagccccgaggtggtgagaaagatgggcgacaaggtggaggccagagccatcgccatcgccgccggcgtgcccgtggtgcccggcaccgacgcccccatcaccagcctgcacgaggcccacgagttcagcaacacctacggcttccccatcatcttcaaggccgcctacggcggcggcggcagaggcatgagagtggtgcacagctacgaggagctggaggagaactacaccagagcctacagcgaggccctggccgccttcggcaacggcgccctgttcgtggagaagttcatcgagaagcccagacacatcgaggtgcagatcctgggcgaccagtacggcaacatcctgcacctgtacgagagagactgcagcatccagagaagacaccagaaggtggtggagatcgcccccgccgcccacctggacccccagctgagaaccagactgaccagcgacagcgtgaagctggccaagcaggtgggctacgagaacgccggcaccgtggagttcctggtggacagacacggcaagcactacttcatcgaggtgaacagcagactgcaggtggagcacaccgtgaccgaggagatcaccgacgtggacctggtgcacgcccagatccacgtggccgagggcagaagcctgcccgacctgggcctgagacaggagaacatcagaatcaacggctgcgccatccagtgcagagtgaccaccgaggaccccgccagaagcttccagcccgacaccggcagaatcgaggtgttcagaagcggcgagggcatgggcatcagactggacaacgccagcgccttccagggcgccgtgatcagcccccactacgacagcctgctggtgaaggtgatcgcccacggcaaggaccaccccaccgccgccaccaagatgagcagagccctggccgagttcagagtgagaggcgtgaagaccaacatcgccttcctgcagaacgtgctgaacaaccagcagttcctggccggcaccgtggacacccagttcatcgacgagaaccccgagctgttccagctgagacccgcccagaacagagcccagaagctgctgcactacctgggccacgtgatggtgaacggccccaccacccccatccccgtgaaggccagccccagccccaccgaccccgtggtgcccgccgtgcccatcggccccccccccgccggcttcagagacatcctgctgagagagggccccgagggcttcgccagagccgtgagaaaccaccccggcctgctgctgatggacaccaccttcagagacgcccaccagagcctgctggccaccagagtgagaacccacgacctgaagaagatcgccccctacgtggcccacaacttcagcaagctgttcagcatggagaactggggcggcgccaccttcgacgtggccatgagattcctgtacgagtgcccctggagaagactgcaggagctgagagagctgatccccaacatccccttccagatgctgctgagaggcgccaacgccgtgggctacaccaactaccccgacaacgtggtgttcaagttctgcgaggtggccaaggagaacggcatggacgtgttcagagtgttcgacagcctgaactacctgcccaacatgctgctgggcatggaggccgccggcagcgccggcggcgtggtggaggccgccatcagctacaccggcgacgtggccgaccccagcagaaccaagtacagcctgcagtactacatgggcctggccgaggagctggtgagagccggcacccacatcctgtgcatcaaggacatggccggcctgctgaagcccaccgcctgcaccatgctggtgagcagcctgagagacagattccccgacctgcccctgcacatccacacccacgacaccagcggcgccggcgtggccgccatgctggcctgcgcccaggccggcgccgacgtggtggacgtggccgccgacagcatgagcggcatgaccagccagcccagcatgggcgccctggtggcctgcaccagaggcacccccctggacaccgaggtgcccatggagagagtgttcgactacagcgagtactgggagggcgccagaggcctgtacgccgccttcgactgcaccgccaccatgaagagcggcaacagcgacgtgtacgagaacgagatccccggcggccagtacaccaacctgcacttccaggcccacagcatgggcctgggcagcaagttcaaggaggtgaagaaggcctacgtggaggccaaccagatgctgggcgacctgatcaaggtgacccccagcagcaagatcgtgggcgacctggcccagttcatggtgcagaacggcctgagcagagccgaggccgaggcccaggccgaggagctgagcttccccagaagcgtggtggagttcctgcagggctacatcggcgtgccccacggcggcttccccgagcccttcagaagcaaggtgctgaaggacctgcccagagtggagggcagacccggcgccagcctgccccccctggacctgcaggccctggagaaggagctggtggacagacacggcgaggaggtgacccccgaggacgtgctgagcgccgccatgtaccccgacgtgttcgcccacttcaaggacttcaccgccaccttcggccccctggacagcctgaacaccagactgttcctgcagggccccaagatcgccgaggagttcgaggtggagctggagagaggcaagaccctgcacatcaaggccctggccgtgagcgacctgaacagagccggccagagacaggtgttcttcgagctgaacggccagctgagaagcatcctggtgaaggacacccaggccatgaaggagatgcacttccaccccaaggccctgaaggacgtgaagggccagatcggcgcccccatgcccggcaaggtgatcgacatcaaggtggtggccggcgccaaggtggccaagggccagcccctgtgcgtgctgagcgccatgaagatggagaccgtggtgaccagccccatggagggcaccgtgagaaaggtgcacgtgaccaaggacatgaccctggagggcgacgacctgatcctggagatcgagtag

SEQ ID NO: 342294 - DNA, 318 bp, Artificial Sequence
  derived and/or modified sequence
atgctgcagaccagcaactacagcctggtgctgagcctgcagttcctgctgctgagctacgacctgttcgtgaacagcttcagcgagctgctgcagaagacccccgtgatccagctggtgctgttcatcatccaggacatcgccgtgctgttcaacatcatcatcatcttcctgatgttcttcaacaccttcgtgttccaggccggcctggtgaacctgctgttccacaagttcaagggcaccatcatcctgaccgccgtgtacttcgccctgagcatcagcctgcacgtgtgggtgatggtgagagtggccgtgtag

SEQ ID NO: 342295 - DNA, 318 bp, Artificial Sequence
  derived and/or modified sequence
atgctgcaaacgtctaactactctctcgtcctgagcctccagtttttgttactgagttatgatctgtttgtgaattcctttagcgagttactccaaaaaactccagtgattcagctggtgctcttcatcatacaagacatcgctgtgttgttcaatatcattatcatcttcttgatgttctttaatacctttgtgtttcaagccggtctggttaatctgctgtttcacaagttcaaaggtacaattattctcacagcagtttattttgctctttcaatttcactgcatgtatgggtgatggtgagagtagctgtatag

SEQ ID NO: 342296 - DNA, 318 bp, Artificial Sequence
  derived and/or modified sequence
atgctgcagaccagcaactacagcctggtgctgagcctgcagttcctgctgctgtcctatgacctgtttgtgaacagcttcagcgagctgctgcagaagacccctgtgatccagctggtgctcttcatcatccaggacattgctgtgctcttcaacatcatcatcatcttcctgatgttcttcaacacctttgtgttccaggccggcctggtgaacctgctcttccacaagttcaagggcaccatcatcctgacagctgtgtactttgccctgagcatcagcctgcacgtgtgggtgatggtgcgggtggccgtgtag

SEQ ID NO: 342297 - DNA, 318 bp, Artificial Sequence
  derived and/or modified sequence
atgctgcagaccagcaactacagcctggtgctgagcctgcagttcctgttgctgtcttatgatctgttcgtcaattcattctctgagcttttgcagaaaacaccagtaatacaactggtcttattcatcatccaagatattgccgtgttgtttaatatcattatcatattcctaatgttcttcaatactttcgtgtttcaagccggactggtgaacctcctatttcacaaatttaagggaacgataattctgactgctgtttatttcgcactgagcatcagtctgcacgtatgggtcatggtgagggtggccgtgtag

SEQ ID NO: 342298 - DNA, 318 bp, Artificial Sequence
  derived and/or modified sequence
atgctgcagacttccaactatagcctcgttctcagtctgcagtttctgctattaagctacgatttgttcgtgaactcttttagtgaacttctgcaaaagactcccgtgatccagcttgtgctatttatcatacaagatattgctgtgctttttaacatcatcatcatcttccttatgttctttaacacctttgtgtttcaggcagggctggtaaatctgctgttccacaagttcaagggtaccatcattttgaccgccgtgtacttcgcgttgagtattagtctgcacgtttgggttatggtcagggttgctgtatag

SEQ ID NO: 342299 - DNA, 96 bp, Artificial Sequence
  derived and/or modified sequence
atgagcgagaagaccggcgagcccgccgccgagaacagagacaaggaggccagcgtggccggcgcccagatcaccctgcagacccagaccccctag

SEQ ID NO: 342300 - DNA, 96 bp, Artificial Sequence
  derived and/or modified sequence
atgagcgagaagaccggcgagcccgccgccgagaaccgggacaaggaagcttccgtagccggtgctcagataacgttacaaacacaaacaccctag

SEQ ID NO: 342301 - protein, 1272 aa, Artificial Sequence
  derived and/or modified sequence
MDEPNAEQVYNPSQFENLRKFWDLEANSNSKDNDKNITTTSQKNSAPFNRQKHKEFSDIKLSGKNTHEAEVLLSPKKVMAREEMEKLNSKGILQVLPDEITFPLSPLRKYTYQLPGNESSKENVEKNTEGIVTPVFKEEKDYSEQEIQESIIKTNVLSKDCKDTFNDSLQKLLSETSTPAIQPSGGKVHGKQVLEPSVSENRTWPQKTDFADTEEEVKGPEKIINEHVDKTVVHPKVKRNSLTASLDKLLKEATGTSPSPLQAKLAPVITGTNSKLEEGRFFGKGIEQSHNTSADKREILAPFPVRDETFGNTALLKKAESGECQLSTQNLIQMAAEDSHPLDPTSQLSRKGSFGDVASPPQDMLFPQDAHLVPQARVHPSQTEISETVEKVILPPRPVLNDVSAALQKLCGEVWLSYPAGREVGPGEVNPEFPEAVQPVCSPLNPPGVISPWATMDTIVPDRKDFYSSNVVPDKTHEVGSYLAAQMSPSDQTLSSFASIVAQYGKGLPQEVEEIVRETIVQPKSEFLEFSAGLEKLLKEETETFPSKYESDTGNLSPSKLIGSTEEPRRATSECHPEELKETVEKAEAPLITESAFDAGFEKLLKEITEAPPYQPQVSVREETHEKESSQSEQTRFLGTVPHFYRAASQTSEMKDKSNGLESQVNQCDKMLGGDALVTDLLVDFCGSRSGVEIPRTPQLYVAHEIGTIKTVTPPEDRDSESGVAGGQGTLQEPGFGEASEAISVSRNRQPIPLLMNKENSTKTSKVELTLASPYMKQEKEEEKEGFSESDFSDGNTSSNAESWRNPSSSEEEPSPVLKTLERSAARKMPSKSLEDISSDSSNQAKVDNQPEELVRSAEDDEKPDQKPVTNECVPRISTVPTQPDNPFSHPDKLKRMSKSVPAFLQDESDDRETDTASESSYQLSRHKKSPSSLTNLSSSSGMTSLSSVSGSVMSVYSGDFGNLEVKGNIQFAIEYVESLKELHVFVAQCKDLAAADVKKQRSDPYVKAYLLPDKGKMGKKKTLVVKKTLNPVYNEILRYKIEKQILKTQKLNLSIWHRDTFKRNSFLGEVELDLETWDWDNKQNKQLRWYPLKRKTAPVALEAENRGEMKLALQYVPEPVPGKKLPTTGEVHIWVKECLDLPLLRGSHLNSFVKCTILPDTSRKSRQKTRAVGKTTNPIFNHTMVYDGFRPEDLMEACVELTVWDHYKLTNQFLGGLRIGFGTGKSYGTEVDWMDSTSEEVALWEKMVNSPNTWIEATLPLRMLLIAKISK

SEQ ID NO: 342302 - protein, 376 aa, Artificial Sequence
  derived and/or modified sequence
MSKSVPAFLQDESDDRETDTASESSYQLSRHKKSPSSLTNLSSSSGMTSLSSVSGSVMSVYSGDFGNLEVKGNIQFAIEYVESLKELHVFVAQCKDLAAADVKKQRSDPYVKAYLLPDKGKMGKKKTLVVKKTLNPVYNEILRYKIEKQILKTQKLNLSIWHRDTFKRNSFLGEVELDLETWDWDNKQNKQLRWYPLKRKTAPVALEAENRGEMKLALQYVPEPVPGKKLPTTGEVHIWVKECLDLPLLRGSHLNSFVKCTILPDTSRKSRQKTRAVGKTTNPIFNHTMVYDGFRPEDLMEACVELTVWDHYKLTNQFLGGLRIGFGTGKSYGTEVDWMDSTSEEVALWEKMVNSPNTWIEATLPLRMLLIAKISK

SEQ ID NO: 342303 - protein, 160 aa, Artificial Sequence
  derived and/or modified sequence
MSKSVPAFLQDEVSGSVMSVYSGDFGNLEVKGNIQFAIEYVESLKELHVFVAQCKDLAAADVKKQRSDPYVKAYLLPDKGKMGKKKTLVVKKTLNPVYNEILRYKIEKQILKTQKLNLSIWHRDTFKRNSFLGEVELDLETWDWDNKQNKQLRWYPLKRK

SEQ ID NO: 342304 - protein, 651 aa, Artificial Sequence
  derived and/or modified sequence
ETVEKAEAPLITESAFDAGFEKLLKEITEAPPYQPQVSVREETHEKESSQSEQTRFLGTVPHFYRAASQTSEMKDKSNGLESQVNQCDKMLGGDALVTDLLVDFCGSRSGVEIPRTPQLYVAHEIGTIKTVTPPEDRDSESGVAGGQGTLQEPGFGEASEAISVSRNRQPIPLLMNKENSTKTSKVELTLASPYMKQEKEEEKEGFSESDFSDGNTSSNAESWRNPSSSEEEPSPVLKTLERSAARKMPSKSLEDISSDSSNQAKVDNQPEELVRSAEDDEKPDQKPVTNECVPRISTVPTQPDNPFSHPDKLKRMSKSVPAFLQDEVSGSVMSVYSGDFGNLEVKGNIQFAIEYVESLKELHVFVAQCKDLAAADVKKQRSDPYVKAYLLPDKGKMGKKKTLVVKKTLNPVYNEILRYKIEKQILKTQKLNLSIWHRDTFKRNSFLGEVELDLETWDWDNKQNKQLRWYPLKRKTAPVALEAENRGEMKLALQYVPEPVPGKKLPTTGEVHIWVKECLDLPLLRGSHLNSFVKCTILPDTSRKSRQKTRAVGKTTNPIFNHTMVYDGFRPEDLMEACVELTVWDHYKLTNQFLGGLRIGFGTGKSYGTEVDWMDSTSEEVALWEKMVNSPNTWIEATLPLRMLLIAKISK

SEQ ID NO: 342305 - protein, 336 aa, Artificial Sequence
  derived and/or modified sequence
MSKSVPAFLQDEVSGSVMSVYSGDFGNLEVKGNIQFAIEYVESLKELHVFVAQCKDLAAADVKKQRSDPYVKAYLLPDKGKMGKKKTLVVKKTLNPVYNEILRYKIEKQILKTQKLNLSIWHRDTFKRNSFLGEVELDLETWDWDNKQNKQLRWYPLKRKTAPVALEAENRGEMKLALQYVPEPVPGKKLPTTGEVHIWVKECLDLPLLRGSHLNSFVKCTILPDTSRKSRQKTRAVGKTTNPIFNHTMVYDGFRPEDLMEACVELTVWDHYKLTNQFLGGLRIGFGTGKSYGTEVDWMDSTSEEVALWEKMVNSPNTWIEATLPLRMLLIAKISK

SEQ ID NO: 342306 - DNA, 1956 bp, Artificial Sequence
  derived and/or modified sequence
gagaccgtggagaaggccgaggcccccctgatcaccgagagcgccttcgacgccggcttcgagaagctgctgaaggagatcaccgaggcccccccctaccagccccaggtgagcgtgagagaggagacccacgagaaggagagcagccagagcgagcagaccagattcctgggcaccgtgccccacttctacagagccgccagccagaccagcgagatgaaggacaagagcaacggcctggagagccaggtgaaccagtgcgacaagatgctgggcggcgacgccctggtgaccgacctgctggtggacttctgcggcagcagaagcggcgtggagatccccagaaccccccagctgtacgtggcccacgagatcggcaccatcaagaccgtgaccccccccgaggacagagacagcgagagcggcgtggccggcggccagggcaccctgcaggagcccggcttcggcgaggccagcgaggccatcagcgtgagcagaaacagacagcccatccccctgctgatgaacaaggagaacagcaccaagaccagcaaggtggagctgaccctggccagcccctacatgaagcaggagaaggaggaggagaaggagggcttcagcgagagcgacttcagcgacggcaacaccagcagcaacgccgagagctggagaaaccccagcagcagcgaggaggagcccagccccgtgctgaagaccctggagagaagcgccgccagaaagatgcccagcaagagcctggaggacatcagcagcgacagcagcaaccaggccaaggtggacaaccagcccgaggagctggtgagaagcgccgaggacgacgagaagcccgaccagaagcccgtgaccaacgagtgcgtgcccagaatcagcaccgtgcccacccagcccgacaaccccttcagccaccccgacaagctgaagagaatgagcaagagcgtgcccgccttcctgcaggacgaggtgagcggcagcgtgatgagcgtgtacagcggcgacttcggcaacctggaggtgaagggcaacatccagttcgccatcgagtacgtggagagcctgaaggagctgcacgtgttcgtggcccagtgcaaggacctggccgccgccgacgtgaagaagcagagaagcgacccctacgtgaaggcctacctgctgcccgacaagggcaagatgggcaagaagaagaccctggtggtgaagaagaccctgaaccccgtgtacaacgagatcctgagatacaagatcgagaagcagatcctgaagacccagaagctgaacctgagcatctggcacagagacaccttcaagagaaacagcttcctgggcgaggtggagctggacctggagacctgggactgggacaacaagcagaacaagcagctgagatggtaccccctgaagagaaagaccgcccccgtggccctggaggccgagaacagaggcgagatgaagctggccctgcagtacgtgcccgagcccgtgcccggcaagaagctgcccaccaccggcgaggtgcacatctgggtgaaggagtgcctggacctgcccctgctgagaggcagccacctgaacagcttcgtgaagtgcaccatcctgcccgacaccagcagaaagagcagacagaagaccagagccgtgggcaagaccaccaaccccatcttcaaccacaccatggtgtacgacggcttcagacccgaggacctgatggaggcctgcgtggagctgaccgtgtgggaccactacaagctgaccaaccagttcctgggcggcctgagaatcggcttcggcaccggcaagagctacggcaccgaggtggactggatggacagcaccagcgaggaggtggccctgtgggagaagatggtgaacagccccaacacctggatcgaggccaccctgcccctgagaatgctgctgatcgccaagatcagcaagtag

SEQ ID NO: 342307 - DNA, 1956 bp, Artificial Sequence
  derived and/or modified sequence
gagacagtggagaaagcggaggcgcccctcatcacagagtctgccttcgacgccggctttgagaaattgctgaaggagataacggaagcccccccttatcagccccaggtgagcgtgcgagaggaaacacacgagaaggagtcatcacagagtgaacagactcgcttcttaggtacagtgccacacttctacagggccgcatcccagacttcagaaatgaaggacaaatccaacggccttgaatctcaagtcaatcagtgcgataaaatgctaggaggggatgctctggttaccgacctgctcgttgacttctgcggaagtaggagtggagtcgagataccacgaactccacagttatacgtggcccatgaaattgggactattaaaactgtgactcccccagaggacagagactcagaatctggtgttgctgggggacagggcactctccaagagcccggcttcggagaggcaagcgaggcaatttcagtctctagaaatcgacagccaattcctctactcatgaacaaggagaatagcacaaaaacttcaaaggtggagcttaccttagcttctccttatatgaagcaagagaaagaggaggaaaaagagggtttctcagaaagcgatttctctgatggcaacacttcatccaatgccgagtcctggaggaatcccagttcaagcgaagaggaacctagcccagtcctgaagaccctcgagcgcagcgcagctcgaaaaatgccttcgaagtctctggaggatattagctcggatagctctaatcaggcaaaagtggacaaccagcctgaggagctggtaaggtcggccgaggatgacgagaagcctgaccagaagcctgtgacgaatgagtgcgtacctagaatttcaaccgtccccacccagcctgacaaccctttttcacacccggacaaactgaaacgaatgtctaaaagtgtcccagcattcctgcaagatgaggtgagtggatctgtgatgagtgtctattcgggagacttcggaaacctggaggtgaaaggtaacatccagttcgccatcgaatatgtcgagagtctcaaggaattacatgtgtttgtggcccagtgcaaggacttggccgccgcagacgtaaaaaaacaaagaagcgatccatacgtgaaagcttacctgcttccagacaagggcaaaatgggtaaaaagaaaacacttgtggtcaagaaaacgcttaaccctgtctataacgagattctgcgatataagatcgagaagcagatccttaagacccaaaagttgaacctgtctatttggcatcgcgataccttcaagagaaacagtttcctcggtgaagttgagcttgacctggaaacatgggattgggataataaacagaacaagcagctccggtggtaccctttgaagcgcaaaaccgctccagtggccctggaagctgagaatcgcggggaaatgaaactggccctccagtacgttcctgaacctgtcccaggtaaaaagttgcctaccactggggaagtccatatatgggttaaggagtgcctcgatctgcccctgcttcgtgggagccatcttaactcttttgtgaagtgtaccattttgcccgacacaagtcgaaaatcacgccaaaaaacaagagctgtcggtaaaaccaccaaccctatttttaatcacactatggtgtacgatggtttccgcccagaggatctcatggaggcctgtgttgagctcaccgtctgggatcactataagctcaccaaccagtttctgggaggactgagaatcggattcggcaccggcaaaagctacggaacagaagtcgattggatggactccacttccgaggaggtggctctgtgggagaagatggtcaattcacctaacacctggatagaggcgaccctccctctccgcatgctcctgattgctaaaatctcgaaatag

SEQ ID NO: 342308 - DNA, 1956 bp, Artificial Sequence
  derived and/or modified sequence
gagaccgtggagaaggccgaggcccccctcatcacagagagcgcctttgatgctggctttgagaagctgctgaaggagatcacagaggccccaccctaccagccccaggtgtctgtgcgggaggagacccatgagaaggagagcagccagagcgagcagacccgcttcctgggcaccgtgccccacttctaccgggccgccagccagaccagcgagatgaaggacaagagcaatggcctggagagccaggtgaaccagtgtgacaagatgctgggcggagatgccctggtgacagacctgctggtggacttctgtggcagccgctctggagtggagatccccaggaccccccagctgtatgtggcccatgaaattggcaccatcaagacagtgaccccaccagaagatcgggacagcgagagcggcgtggccggcggccagggcaccctgcaggagcccggctttggagaggccagcgaggccatctctgtgtccaggaaccggcagcccatccccctgctgatgaacaaggagaacagcaccaagaccagcaaggtggagctgaccctggccagcccctacatgaagcaggagaaggaggaggagaaggagggcttcagcgagagtgacttcagtgatggcaacaccagcagcaatgctgagagctggaggaaccccagcagcagcgaggaggagcccagccctgtgctgaagaccctggagaggtctgctgccaggaagatgcccagcaagagcctggaggacatcagcagtgacagcagcaaccaggccaaggtggacaaccagcctgaggagctggtgcgctctgcagaagatgatgagaagccagaccagaagcctgtgaccaatgaatgtgtgccccgcatcagcacagtgcccacccagcctgacaaccccttcagccacccagacaagctgaagaggatgagcaagtctgtgcctgccttcctgcaggatgaggtgtctggctctgtgatgtctgtgtacagcggggactttggaaacctggaggtgaagggcaacatccagtttgccattgaatatgtggagagcctgaaggagctgcacgtgtttgtggcccagtgcaaggacctggccgctgctgatgtgaagaagcagaggagtgacccctacgtgaaggcctacctgctgcctgacaagggcaagatgggcaagaagaagaccctggtggtgaagaagaccctgaaccctgtgtacaatgagatcctgcgctacaagattgagaagcagatcctgaagacccagaagctgaacctgagcatctggcaccgggacaccttcaagagaaattccttcctgggggaggtggagctggacctggagacctgggactgggacaacaagcagaacaagcagctgcgctggtaccccctgaagaggaagacagcccctgtggccctggaggccgagaacagaggagagatgaagctggccctgcagtatgtgcctgagcctgtgcctgggaagaagctgcccaccaccggggaggtgcacatctgggtgaaggaatgtctggacctgcccctgctgcggggcagccacctgaacagctttgtgaagtgcaccatcctgcctgacaccagcaggaagagccggcagaagaccagggctgtgggcaagaccaccaaccccatcttcaaccacaccatggtgtatgatggcttccggcctgaggacctgatggaggcctgtgtggagctgactgtgtgggaccactacaagctgaccaaccagttcctgggcggcctgagaattggatttggaacaggcaagagctatggaacagaggtggactggatggacagcaccagcgaggaggtggccctgtgggagaagatggtgaacagccccaacacctggattgaggccaccctgcccctgaggatgctgctgattgccaagatcagcaagtag

SEQ ID NO: 342309 - DNA, 1956 bp, Artificial Sequence
  derived and/or modified sequence
gagaccgtggagaaggccgaggcccccctgatcaccgagagcgcctttgacgctggcttcgaaaaactgcttaaagagataacagaggcgccaccttaccagccgcaggtctcagttcgagaggagacacacgaaaaggaaagctctcagtccgaacagacgaggttcttgggaacagtaccacacttttatcgcgcagcctcccagacttcagaaatgaaggataagtccaacggccttgagtcccaggttaatcaatgtgacaagatgctcggcggggacgcccttgtcacggatttactggtagacttttgtggtagtcgctcgggggtggaaatccccagaacaccacaattatacgtggcccacgagattggaacaattaagaccgtcacaccccccgaagacagggactccgaatccggggtggccggagggcagggcactctgcaggagcctggctttggggaagcatccgaggcaatcagcgtcagccgcaatagacagccgatcccgttgctgatgaacaaggaaaattctacgaagacgtccaaggtcgaactgacactggcgtccccctatatgaagcaggagaaagaggaggaaaaagaaggctttagtgaatccgatttctcagatggaaatacctctagcaacgctgaaagttggcgaaatccttcctcaagcgaagaggaaccttccccagtcctaaagaccttagagcgaagcgcggctcgaaaaatgcccagcaaaagtctcgaggacatttccagcgatagcagcaatcaggccaaagtagacaaccagcccgaggagcttgttcgttccgctgaagacgacgaaaagccggaccaaaagcctgtcaccaacgagtgcgtccccaggatctctactgttccgacccaacctgataatccgttctcacatcccgacaagttaaagcggatgagtaagagcgtgcccgcattcttgcaagatgaggtgtctggttctgtgatgagtgtgtattccggtgacttcggcaacctcgaggttaagggcaatattcagtttgccattgagtatgtggagtctctaaaggaactccacgtgtttgtggctcaatgtaaggatttggctgccgctgacgtgaaaaagcagaggtcagacccctacgtaaaagcttatctgctgcccgataaaggcaaaatgggtaaaaagaagacgctagtagtgaagaaaacactgaaccccgtatacaacgagattctgcggtacaagatcgaaaaacagattcttaaaacgcagaagttgaatctgtccatatggcatcgggacacatttaaaagaaactctttcctaggggaggtggaactcgatttggagacttgggactgggacaataagcaaaataaacaactgagatggtaccccctgaagcgaaagaccgcccccgtcgctcttgaggctgagaataggggggagatgaagttagccctgcagtacgtgccagaacccgtgccaggcaagaagctaccaacaaccggggaagtacatatctgggtgaaggaatgtcttgatttgccattactgagagggtcccaccttaacagctttgttaagtgtacaatcttgccagacaccagtcgcaagtcccgtcagaaaaccagagccgtaggcaagaccacaaatccaatctttaaccatacaatggtctatgacgggtttcggccggaggatctaatggaagcgtgcgtggagctcaccgtgtgggatcattacaaactcaccaaccagtttctggggggtctgcgaattgggtttggcacgggaaagtcttacgggaccgaagtggactggatggactccacttctgaagaagttgccttatgggaaaagatggtcaatagtccaaatacatggatcgaagctacactgcccttacgcatgctgctgatagccaaaatttccaaatag

SEQ ID NO: 342310 - DNA, 1956 bp, Artificial Sequence
  derived and/or modified sequence
gaaactgttgagaaggctgaagcccctctgataaccgaaagcgctttcgatgctggattcgagaaattattgaaggagattactgaagccccaccttaccagccacaggtttccgtgagggaggaaacccatgagaaggaaagttcccagagcgagcagacccggttcctgggaaccgtgccacacttttacagggccgcatcacagacatcagaaatgaaagacaagtctaatggcctggagtcacaggtcaatcaatgcgacaaaatgctgggcggtgatgcccttgtgaccgacctacttgtggatttctgcggctcgaggtcaggtgtcgaaatccctcgaacgccacagctttatgtggcccatgagataggaacaatcaagacagtcactcctccagaagatcgagactctgagagcggggtggctggcggacagggcactctgcaggaaccgggatttggggaagcttcggaagcaatcagtgtatcacgaaatcgacagccaattcccctgctcatgaataaagaaaatagcaccaagacatccaaggtggaactgacactggcgagtccttatatgaaacaggaaaaggaagaagaaaaggaggggttttcagaatctgacttctcagacggaaatacttcatcgaacgccgaatcttggaggaatccctcaagttccgaagaggagccttcgcccgtgttaaaaacactggaacgatctgccgctcggaaaatgccttcaaagtcgctggaggacatcagttctgacagctcaaaccaggctaaggtcgataatcagcccgaagagttggttcgatccgcggaagacgacgaaaaacctgatcagaaacccgtgactaatgaatgtgtgcccaggatttcaaccgtaccaactcagcctgataatcctttttctcaccccgataagctgaagcgtatgagcaaatccgtgcctgcttttctgcaggatgaggtaagtggatctgttatgtctgtgtactcaggtgatttcgggaatcttgaagtgaaggggaacatccaattcgcaatcgagtacgtcgaatctctcaaagaactgcacgtcttcgtcgctcagtgcaaagacctggccgcagcggatgtcaagaaacagcggagcgacccatacgtcaaggcttaccttctcccagataagggcaaaatgggtaagaagaaaacactcgtcgtgaagaagactctaaatccggtgtacaacgagattctcagatacaaaatcgaaaagcaaatcctgaaaacacagaagcttaatcttagcatctggcacagagacactttcaaaagaaatagtttcctcggggaagtggaactcgatttagagacttgggactgggataataagcagaataagcagctgcgatggtaccccttgaaacgaaagactgcccctgttgccctagaggctgaaaatcgaggtgagatgaagctcgctctccagtacgtcccagaacctgtgccgggaaagaagttacccacaaccggggaggtgcacatctgggtgaaagagtgtctggaccttcccctcctgcgaggaagtcatttgaacagttttgtgaagtgcacaattctgcctgataccagcaggaagagccggcagaagactagggctgttggcaagactacaaacccaatcttcaatcatactatggtttatgacgggtttaggcccgaggatctaatggaagcctgcgttgagctgacagtctgggaccattacaaactcactaatcagttccttggcggacttcgcatcggatttggcacaggaaaatcttatggcactgaggttgattggatggactccactagtgaggaagtcgcattatgggagaagatggtgaattcacccaatacttggattgaagctacacttccactgagaatgctcctcattgcaaagatcagcaaatag

SEQ ID NO: 342311 - DNA, 2425 bp, Artificial Sequence
  derived and/or modified sequence
gaaacagtagaaaaggccgaggctccgttaataactgagagtgcttttgatgctggttttgagaaacttcttaaagaaataactgaagctcctccttatcagccccaggtgtcagtgagagaagaaactcacgagaaggagtcctcacagtcagagcagaccaggttcttggggacagtgccccatttttacagggcagcctcacagacctctgaaatgaaggataaaagtaatggtttggaatctcaagtcaaccaatgtgataaaatgttgggaggagacgcacttgtgactgatttattggtagatttttgtggttccagaagtggagttgagatccctagaaccccacaactttatgtggctcatgaaatagggaccattaaaactgtaacccccccagaggacagggacagtgaaagtggggttgcagggggacaagggactcttcaggaacctggctttggagaggcttctgaagcaattagtgtgtccagaaataggcaacccattcctctcctgatgaacaaagaaaactctacaaaaacaagtaaagttgaattgactctagcatcgccatatatgaaacaagagaaagaggaagaaaaagaaggtttctctgagtctgatttttcagatggaaacaccagttctaatgcagagagctggagaaatccttccagttcagaagaagaacccagtcctgttttgaaaactttggaaaggagtgccgctaggaaaatgccttccaaaagtctagaagacatttcatcagattcatcaaatcaagcaaaagtagataatcagccagaagaattagtgcgtagtgctgaagatgatgagaaaccagatcagaagccagttacaaatgaatgcgtaccaagaatttccacagtgcctacacaacctgataatccattttctcaccctgacaaactcaaaaggatgagcaagtctgttccagcatttctccaagatgaggtgagtggcagtgtgatgagtgtttatagtggagactttggcaatctggaagttaaaggaaatattcagtttgcaattgaatatgtggagtcactgaaggagttgcatgtttttgtggcccagtgtaaggacttagcagcagcggatgtaaaaaaacagcgttcagacccatatgtaaaggcctatttgctaccagacaaaggcaaaatgggcaagaagaaaacactcgtagtgaagaaaaccttgaatcctgtgtataacgaaatactgcggtataaaattgaaaaacaaatcttaaagacacagaaattgaacctgtccatttggcatcgggatacatttaagcgcaatagtttcctaggggaggtggaacttgatttggaaacatgggactgggataacaaacagaataaacaattgagatggtaccctctgaagcggaagacagcaccagttgcccttgaagcagaaaacagaggtgaaatgaaactagctctccagtatgtcccagagccagtccctggtaaaaagcttcctacaactggagaagtgcacatctgggtgaaggaatgccttgatctaccactgctaaggggaagtcatctaaattcttttgttaaatgtaccatccttccagatacaagtaggaaaagtcgccagaagacaagagctgtagggaaaaccaccaaccctatcttcaaccacactatggtgtatgatgggttcaggcctgaagatctgatggaagcctgtgtagagcttactgtctgggaccattacaaattaaccaaccaatttttgggaggtcttcgtattggctttggaacaggtaaaagttatgggactgaagtggactggatggactctacttcagaggaagttgctctctgggagaagatggtaaactcccccaatacttggattgaagcaacactgcctctcagaatgcttttgattgccaagatttccaaatgagcccaaattccactggctcctccactgaaaactactaaaccggtggaatctgatcttgaaaatctgagtaggtggacaaatatcctcactttctatctattgcacctaaggaatactacacagcatgtaaaagtcaatctgcatgtgcttctttgattacaaggcccaagggatttaaatataacaaaatgtgtaatttgtgactctaatattaaataagatatttgaacaagctaggaaaattgaatttctgctgctgcttcaaagaaaaagctgccccagagcattaaacatggggtattgttaagaagcaaaatgttcttgtttgccatcatgtgtttcacaccacaattctgtgccacagttaagagggtctggtacccttgcaggacctttgtaggttgtgggaaaaagtcgcagaaagatactcaaagtggagcagggaatggagacagacatcagtgatgat

SEQ ID NO: 342312 - protein, 103 aa, Artificial Sequence
  derived and/or modified sequence
MSKSVPAFLQDESDDRETDTASESSYQLSRHKKSPSSLTNLSSSSGMTSLSSVSGSVMSVYSGDFGNLEVKGNIQFAIEYVESLKELHVFVAQCKDLAAADVK

SEQ ID NO: 342313 - DNA, 3819 bp, Artificial Sequence
  derived and/or modified sequence
atggacgagcccaacgccgagcaggtgtacaaccccagccagttcgagaacctgagaaagttctgggacctggaggccaacagcaacagcaaggacaacgacaagaacatcaccaccaccagccagaagaacagcgcccccttcaacagacagaagcacaaggagttcagcgacatcaagctgagcggcaagaacacccacgaggccgaggtgctgctgagccccaagaaggtgatggccagagaggagatggagaagctgaacagcaagggcatcctgcaggtgctgcccgacgagatcaccttccccctgagccccctgagaaagtacacctaccagctgcccggcaacgagagcagcaaggagaacgtggagaagaacaccgagggcatcgtgacccccgtgttcaaggaggagaaggactacagcgagcaggagatccaggagagcatcatcaagaccaacgtgctgagcaaggactgcaaggacaccttcaacgacagcctgcagaagctgctgagcgagaccagcacccccgccatccagcccagcggcggcaaggtgcacggcaagcaggtgctggagcccagcgtgagcgagaacagaacctggccccagaagaccgacttcgccgacaccgaggaggaggtgaagggccccgagaagatcatcaacgagcacgtggacaagaccgtggtgcaccccaaggtgaagagaaacagcctgaccgccagcctggacaagctgctgaaggaggccaccggcaccagccccagccccctgcaggccaagctggcccccgtgatcaccggcaccaacagcaagctggaggagggcagattcttcggcaagggcatcgagcagagccacaacaccagcgccgacaagagagagatcctggcccccttccccgtgagagacgagaccttcggcaacaccgccctgctgaagaaggccgagagcggcgagtgccagctgagcacccagaacctgatccagatggccgccgaggacagccaccccctggaccccaccagccagctgagcagaaagggcagcttcggcgacgtggccagccccccccaggacatgctgttcccccaggacgcccacctggtgccccaggccagagtgcaccccagccagaccgagatcagcgagaccgtggagaaggtgatcctgccccccagacccgtgctgaacgacgtgagcgccgccctgcagaagctgtgcggcgaggtgtggctgagctaccccgccggcagagaggtgggccccggcgaggtgaaccccgagttccccgaggccgtgcagcccgtgtgcagccccctgaacccccccggcgtgatcagcccctgggccaccatggacaccatcgtgcccgacagaaaggacttctacagcagcaacgtggtgcccgacaagacccacgaggtgggcagctacctggccgcccagatgagccccagcgaccagaccctgagcagcttcgccagcatcgtggcccagtacggcaagggcctgccccaggaggtggaggagatcgtgagagagaccatcgtgcagcccaagagcgagttcctggagttcagcgccggcctggagaagctgctgaaggaggagaccgagaccttccccagcaagtacgagagcgacaccggcaacctgagccccagcaagctgatcggcagcaccgaggagcccagaagagccaccagcgagtgccaccccgaggagctgaaggagaccgtggagaaggccgaggcccccctgatcaccgagagcgccttcgacgccggcttcgagaagctgctgaaggagatcaccgaggcccccccctaccagccccaggtgagcgtgagagaggagacccacgagaaggagagcagccagagcgagcagaccagattcctgggcaccgtgccccacttctacagagccgccagccagaccagcgagatgaaggacaagagcaacggcctggagagccaggtgaaccagtgcgacaagatgctgggcggcgacgccctggtgaccgacctgctggtggacttctgcggcagcagaagcggcgtggagatccccagaaccccccagctgtacgtggcccacgagatcggcaccatcaagaccgtgaccccccccgaggacagagacagcgagagcggcgtggccggcggccagggcaccctgcaggagcccggcttcggcgaggccagcgaggccatcagcgtgagcagaaacagacagcccatccccctgctgatgaacaaggagaacagcaccaagaccagcaaggtggagctgaccctggccagcccctacatgaagcaggagaaggaggaggagaaggagggcttcagcgagagcgacttcagcgacggcaacaccagcagcaacgccgagagctggagaaaccccagcagcagcgaggaggagcccagccccgtgctgaagaccctggagagaagcgccgccagaaagatgcccagcaagagcctggaggacatcagcagcgacagcagcaaccaggccaaggtggacaaccagcccgaggagctggtgagaagcgccgaggacgacgagaagcccgaccagaagcccgtgaccaacgagtgcgtgcccagaatcagcaccgtgcccacccagcccgacaaccccttcagccaccccgacaagctgaagagaatgagcaagagcgtgcccgccttcctgcaggacgagagcgacgacagagagaccgacaccgccagcgagagcagctaccagctgagcagacacaagaagagccccagcagcctgaccaacctgagcagcagcagcggcatgaccagcctgagcagcgtgagcggcagcgtgatgagcgtgtacagcggcgacttcggcaacctggaggtgaagggcaacatccagttcgccatcgagtacgtggagagcctgaaggagctgcacgtgttcgtggcccagtgcaaggacctggccgccgccgacgtgaagaagcagagaagcgacccctacgtgaaggcctacctgctgcccgacaagggcaagatgggcaagaagaagaccctggtggtgaagaagaccctgaaccccgtgtacaacgagatcctgagatacaagatcgagaagcagatcctgaagacccagaagctgaacctgagcatctggcacagagacaccttcaagagaaacagcttcctgggcgaggtggagctggacctggagacctgggactgggacaacaagcagaacaagcagctgagatggtaccccctgaagagaaagaccgcccccgtggccctggaggccgagaacagaggcgagatgaagctggccctgcagtacgtgcccgagcccgtgcccggcaagaagctgcccaccaccggcgaggtgcacatctgggtgaaggagtgcctggacctgcccctgctgagaggcagccacctgaacagcttcgtgaagtgcaccatcctgcccgacaccagcagaaagagcagacagaagaccagagccgtgggcaagaccaccaaccccatcttcaaccacaccatggtgtacgacggcttcagacccgaggacctgatggaggcctgcgtggagctgaccgtgtgggaccactacaagctgaccaaccagttcctgggcggcctgagaatcggcttcggcaccggcaagagctacggcaccgaggtggactggatggacagcaccagcgaggaggtggccctgtgggagaagatggtgaacagccccaacacctggatcgaggccaccctgcccctgagaatgctgctgatcgccaagatcagcaagtag

SEQ ID NO: 342314 - DNA, 3819 bp, Artificial Sequence
  derived and/or modified sequence
atggacgagcccaacgctgaacaggtgtacaaccctagccagttcgagaatctcaggaagttttgggatcttgaggctaacagcaactctaaagataacgacaagaatatcacaactaccagccagaagaactctgcaccttttaacagacaaaaacacaaggagttctcggatatcaagctttcaggcaaaaatactcacgaggccgaagtgcttctttctccaaagaaggtaatggcacgagaggagatggaaaaactgaattccaaggggatccttcaggttctgcctgacgagatcacattccctctgagccccttgagaaagtatacttaccagctgcctggcaacgaatctagcaaagaaaacgtagagaagaataccgagggaatagttactcctgtctttaaggaggagaaagactatagcgagcaggagatccaggagagcattatcaaaacaaacgtgctttctaaagactgcaaagatacctttaatgactccctgcagaaactccttagcgagacctctaccccagcgattcagccctctggtggaaaagttcatggtaagcaggtattagagccctcggtcagcgaaaacaggacctggccgcaaaaaactgactttgccgacaccgaggaggaagtcaagggtcctgaaaaaatcattaacgagcacgtggataagaccgttgtgcatcctaaggtcaagagaaattccctcacggcctcactggacaagctgctaaaggaagcgaccgggacttctccttcgcctcttcaagctaaattggccccggtgatcactgggactaattcaaaattggaagaaggtcgattcttcggcaaagggattgaacagtctcacaatacctcagcagacaaaagggaaatactagcaccctttcctgtcagggatgagacatttggcaatacggccttattaaagaaggctgagagcggcgaatgccaattgtctacacaaaacttgattcagatggccgcagaggactcacaccctctggatccaacatcccagctaagcagaaagggttccttcggagatgtcgcttcccccccgcaggacatgttatttccacaggacgcacatcttgtcccacaggctagagtgcaccctagccagacggagattagcgagacagtggagaaagtgatcctgccccctcggccagtgctgaacgacgttagcgcagcactgcagaagctgtgtggggaggtgtggttaagctacccagccggtcgcgaggtgggcccaggcgaagtaaaccccgagtttccggaggcagtgcagcctgtctgctcgcccctgaaccctcccggggtgataagcccatgggctaccatggacaccatagtcccagacaggaaagacttttactcctccaatgttgtgcctgataagacacatgaggtcggttcttacttggctgcgcagatgtccccatcggatcagacattgagcagctttgcaagtatagtggcccagtatggaaagggcctgcctcaagaagttgaagagatcgtcagggagactatagtgcagcctaagtccgagtttttagagttctccgcaggactggaaaaactgctcaaggaagaaacggagacctttccatcaaagtacgagtctgacaccgggaatctcagcccttctaagctcatcggatcaactgaagaaccccggagggcaacttcagagtgccaccctgaagaattgaaggagaccgtggagaaagccgaggccccccttatcacagagtcagctttcgacgccggcttcgagaagctactgaaggagataacagaagcacctccataccagccccaggtgagtgtgcgggaggagacacacgaaaaagaatcttcccaatccgagcagactagattcctcggcaccgtcccccacttttacagagcggcatcgcaaaccagcgaaatgaaggacaaaagcaatgggcttgagtcccaggtgaatcagtgtgataagatgctgggcggtgacgctcttgttacggacctgctggtagacttctgcggatctcggagcggagttgagatcccccggacccctcagctgtatgtggctcatgagatcggcacaatcaaaactgtgacaccacctgaagaccgcgactcagaatctggggtcgctggaggccagggcaccctgcaagaacctggattcggcgaagcctccgaagccatcagtgttagccgaaacagacagccaatccctctgctgatgaataaggagaatagtacaaagacgtccaaagtggaactcactctcgcaagtccttatatgaagcaggagaaggaagaggaaaaggaaggcttcagcgaatccgatttttctgacggaaacacatcctcgaatgccgaaagctggcgaaaccccagttccagcgaggaggagccatctcctgtcttaaaaactctcgagcgcagcgccgccagaaagatgccatcaaagagcctggaggacatctccagtgacagtagcaatcaggcgaaagtggacaatcagccagaagagctcgtgaggtctgccgaggatgatgagaaacccgaccagaaacccgtaaccaacgaatgtgtccccaggatatcaactgttccaacacagcccgataatccattcagtcaccccgataagctcaaaaggatgagtaaaagtgtgcccgctttcttgcaagacgagtcagatgatagggagaccgacacagcaagcgagtcgtcttaccagttgtctcggcataaaaagtcacccagctccctgactaacctctctagctcttctggcatgacgtcccttagttctgtgagcggaagcgtgatgagcgtttactccggagacttcggaaatcttgaagtgaagggtaatattcagttcgccatcgagtatgtagagtcactaaaggaactacatgtctttgtggcacagtgcaaagacctcgctgctgccgacgttaagaagcaaagatctgacccatatgttaaagcttatcttctgccagataagggtaagatggggaaaaagaaaaccctcgtggttaaaaaaacattgaaccctgtgtataatgagatcctccgttacaaaattgagaaacagatccttaagacccagaagctgaacttatctatttggcatcgtgacacttttaaaagaaattcattcctaggagaagttgagctagatctagagacctgggattgggacaacaagcagaacaagcagttaagatggtatcctctgaaacgaaaaacagccccagtggcccttgaggcagaaaaccgaggggagatgaagttagccctgcagtatgtgccagagcccgtgccgggcaagaagttgccaacaaccggagaggttcatatatgggtcaaagaatgcctggatttgcctctcctcaggggttcccacctgaatagcttcgtgaaatgtacaattcttccagatacatctcgcaaaagtaggcagaaaacgcgggccgtggggaaaaccacaaaccccatctttaaccatacaatggtgtatgacggatttcggccagaggatcttatggaagcgtgcgtggagctcacagtatgggatcactacaagctcactaaccagtttttgggcggcttgcgcataggcttcgggactggcaaaagctatggcaccgaagtggattggatggattcaacaagtgaagaagtggctctttgggagaagatggtgaactctccgaacacgtggattgaggctactctcccgttgcggatgttgcttatcgcaaaaatctctaagtag

SEQ ID NO: 342315 - DNA, 3819 bp, Artificial Sequence
  derived and/or modified sequence
atggatgagcccaatgctgagcaggtgtacaaccccagccagtttgagaacctgaggaagttctgggacctggaggccaacagcaacagcaaggacaatgacaagaacatcaccaccaccagccagaagaacagcgcccccttcaaccggcagaagcacaaggagttcagtgacatcaagctgagcggcaagaacacccatgaagctgaggtgctgctgagccccaagaaggtgatggcccgggaggagatggagaagctgaacagcaagggcatcctgcaggtgctgcctgatgagatcaccttccccctgagccccctgaggaagtacacctaccagctgcctggaaatgaaagcagcaaagaaaatgtggagaagaacacagagggcatcgtgacccctgtgttcaaggaggagaaggactacagcgagcaggagatccaggagagcatcatcaagaccaacgtgctgagcaaggactgcaaggacaccttcaatgacagcctgcagaagctgctgtctgagaccagcaccccagccatccagcccagcggcggcaaggtgcacggcaagcaggtgctggagcccagcgtgtctgagaacagaacctggccccagaagacagactttgctgacacagaggaggaggtgaagggccctgagaagatcatcaatgaacatgtggacaagacagtggtgcaccccaaggtgaagaggaacagcctgacagccagcctggacaagctgctgaaggaggccaccggcaccagccccagccccctgcaggccaagctggcccctgtgatcaccggcaccaacagcaagctggaggagggccgcttcttcggcaagggcatcgagcagagccacaacaccagcgctgacaagcgggagatcctggcccccttccctgtgagagatgagaccttcggcaacacagccctgctgaagaaggccgagagcggggagtgccagctgagcacccagaacctgatccagatggctgctgaggacagccaccccctggaccccaccagccagctgagcaggaagggcagctttggagatgtggccagccccccccaggacatgctgttcccccaggatgcccacctggtgccccaggcccgggtgcaccccagccagacagagatcagcgagaccgtggagaaggtgatcctgccccccaggcctgtgctgaatgatgtgtctgctgccctgcagaagctgtgtggggaggtgtggctgagctacccagctggccgggaggtgggccctggagaggtgaaccctgagttccctgaggccgtgcagcctgtgtgcagccccctgaaccccccaggagtcatcagcccctgggccaccatggacaccatcgtgcctgacaggaaggacttctacagcagcaatgtggtgcctgacaagacccatgaggtgggcagctacctggccgcccagatgagccccagcgaccagaccctgagcagctttgccagcatcgtggcccagtatggcaagggcctgccccaggaggtggaggagatcgtgcgggagaccatcgtgcagcccaagtctgagttcctggagttctctgctggcctggagaagctgctgaaggaggagacagagaccttccccagcaaatatgaaagtgacaccggcaacctgagccccagcaagctgattggcagcacagaggagccccggcgggccaccagcgagtgccaccctgaggagctgaaggagaccgtggagaaggccgaggcccccctcatcacagaaagtgcctttgatgctggctttgagaagctgctgaaggagatcacagaggccccaccctaccagccccaggtgtctgtgcgggaggagacccatgagaaggagagcagccagagcgagcagacccgcttcctgggcaccgtgccccacttctacagagctgccagccagaccagcgagatgaaggacaagagcaatggcctggagagccaggtgaaccagtgtgacaagatgctgggcggagatgccctggtgacagacctgctggtggacttctgtggcagccgcagcggcgtggagatccccaggaccccccagctgtatgtggcccacgagatcggcaccatcaagacagtgaccccacctgaggaccgggacagcgagagcggcgtggccggcggccagggcaccctgcaggagcccggctttggagaggccagcgaggccatctctgtgtccaggaaccggcagcccatccccctgctgatgaacaaggagaacagcaccaagaccagcaaggtggagctgaccctggccagcccctacatgaagcaggagaaggaggaggagaaggagggcttcagcgagagtgacttcagtgatggcaacaccagcagcaatgctgagagctggaggaaccccagcagcagcgaggaggagcccagccctgtgctgaagaccctggagaggtctgctgccaggaagatgcccagcaagagcctggaggacatcagcagtgacagcagcaaccaggccaaggtggacaaccagcctgaggagctggtgcgctctgcagaagatgatgagaagccagaccagaagcctgtgaccaatgaatgtgtgccccgcatcagcacagtgcccacccagcctgacaaccccttcagccacccagacaagctgaagaggatgagcaagtctgtgcctgccttcctgcaggatgaaagtgatgaccgggagacagacacagccagcgagagcagctaccagctgagccgccacaagaagagccccagcagcctgaccaacctgagcagcagcagcggcatgaccagcctgagctctgtgtctggctctgtgatgtctgtgtacagcggggactttggaaacctggaggtgaagggcaacatccagtttgccatcgagtatgtggagagcctgaaggagctgcacgtgtttgtggcccagtgcaaggacctggccgctgctgatgtgaagaagcagaggagtgacccctacgtgaaggcctacctgctgcctgacaagggcaagatgggcaagaagaagaccctggtggtgaagaagaccctgaaccctgtgtacaatgagatcctgcgctacaagattgagaagcagatcctgaagacccagaagctgaacctgagcatctggcaccgggacaccttcaagaggaacagcttcctgggggaggtggagctggacctggagacctgggactgggacaacaagcagaacaagcagctgcgctggtaccccctgaagaggaagacagcccctgtggccctggaggctgaaaatagaggagagatgaagctggccctgcagtatgtgcctgagcctgtgcctgggaagaagctgcccaccactggagaggtgcacatctgggtgaaggagtgcctggacctgcccctgctgcggggcagccacctgaacagctttgtgaagtgcaccatcctgcctgacaccagcaggaagagccggcagaagaccagggctgtgggcaagaccaccaaccccatcttcaaccacaccatggtgtatgatggcttccggcctgaggacctgatggaggcctgtgtggagctgactgtgtgggaccactacaagctgaccaaccagttcctgggcggcctgcgcatcggcttcggcaccgggaagagctatggaacagaggtggactggatggacagcaccagcgaggaggtggccctgtgggagaagatggtgaacagccccaacacctggattgaggccaccctgcccctgaggatgctgctgattgccaagatcagcaagtag

SEQ ID NO: 342316 - DNA, 3819 bp, Artificial Sequence
  derived and/or modified sequence
atggacgagcccaacgccgagcaggtgtacaaccccagccagttcgaaaatctgcgcaagttctgggaccttgaggctaatagcaacagtaaggacaacgacaagaacatcacaacaacttcacagaagaactccgcaccctttaataggcagaaacacaaggagttcagcgatattaaactaagcggcaagaacacacatgaggcggaagtcctcctatccccgaagaaggtcatggcccgagaagagatggagaaactgaattctaagggtatcctccaggtcctgcccgacgaaataaccttccctctgtcaccgctgcgcaaatacacatatcagcttcctggcaatgagtcttctaaagaaaatgttgagaaaaatacagagggcattgtcacccccgtgtttaaggaagagaaggattattcagaacaggaaattcaggaatcaatcatcaagaccaatgtgctgagtaaggattgcaaggacacttttaatgacagtctccagaagctcctatccgagaccagcactccagcaattcagccaagtggtgggaaagtccacggaaagcaggtgctggagccgtcagtttcagagaataggacctggccccagaaaaccgattttgccgacacggaggaagaggtgaagggcccagaaaagataatcaacgagcatgttgataaaacggtggtgcaccccaaggtcaaaagaaacagcctgactgcctctttagataagctgctcaaggaagccaccgggacgtcccccagtcccctccaagcgaaactggccccagtgattaccggaactaactccaagctggaagaagggagattcttcggcaagggcatcgagcaaagccataacacatccgcggataagagggagattttggccccctttccggtacgtgatgagacgtttggtaatacagccctgctgaagaaagctgaatctggcgagtgtcagctctcgacacagaatctgatccagatggcggcagaggacagtcaccctctggaccccactagccaactttcacgcaagggctcattcggcgacgttgccagtcctccacaggacatgctgtttccacaagatgctcacttggtcccccaggcccgggtgcatcccagccaaacagagattagtgaaaccgtagaaaaagtcatactcccaccccggcctgtcctgaatgatgtttcagccgctctgcagaaattgtgtggcgaggtatggctgagttacccagccggacgggaagtgggtcctggagaggtgaatccggagtttccagaagccgtgcaacccgtttgttcacccctcaaccccccgggtgttatcagtccatgggcgaccatggatacgatcgttcctgacagaaaggacttctattccagcaacgtcgtgcccgataagacacacgaagtggggtcatatttagctgcccagatgtcccccagtgaccagactttgtcttcgttcgcaagcatcgtagcgcagtacggaaaaggactgccccaggaggtggaagagatcgtgcgtgagaccattgtacaaccgaaaagtgagtttctcgaattctctgcaggccttgagaagctgctcaaagaggagaccgagacttttccctccaagtatgagtccgatacaggcaacctgtctccaagcaaacttattgggagcaccgaggagccccgaagagctacatccgaatgtcacccagaagaacttaaggaaactgtcgaaaaggctgaagcccctttgatcactgagtcggcctttgacgccggattcgagaaattactgaaggaaatcaccgaggctcccccctatcaaccccaggtgtctgtccgagaggagacccacgagaaagagagctcccagagtgagcaaaccaggttcctcggaaccgtcccgcatttctaccgggccgccagtcagacctctgagatgaaagataagagcaatggtctggaaagccaggtgaatcagtgcgacaagatgctgggaggggacgccctggtgacagaccttctggtggacttttgcgggtctagatctggggtggagattcccagaacgccccagctgtatgtggcacatgagattggaacaatcaaaaccgtcacacccccagaagacagggactctgaatccggcgtcgcgggcggtcaagggacccttcaggaaccaggcttcggcgaggccagtgaggccatttcagtctctcggaataggcagcccatcccgttgcttatgaacaaggaaaattcaaccaagacaagcaaagtcgagttaactttggcttcaccttacatgaagcaggagaaggaggaggaaaaagagggcttttccgaaagcgacttttctgatggaaatacatcctcaaatgcagagtcctggcgtaatccatcctcatcggaggaggaacctagcccagtactgaagacattggagaggtccgccgccagaaagatgccaagcaagtctctggaagacatctcctccgattccagtaatcaggcaaaggtggacaaccaacccgaggagctggtgagaagcgcagaagacgacgagaagcccgaccagaagccagtgacgaatgaatgcgtgccgagaatctctactgtccccacccagcctgataatcccttttcccaccccgataaactgaagagaatgagtaaatcagtgcccgcgtttctgcaggatgagtcggacgaccgggaaaccgatacggcttccgagagctcttatcaactgtcccgtcataagaaaagcccatcctccctgacaaacttatcttcctcctctggtatgacctccctttcctccgttagtgggtcagtgatgagcgtgtactctggtgacttcggtaacctggaggtgaagggaaatattcaatttgcgattgaatatgtggagtctctgaaggagcttcacgtatttgtggcccagtgcaaggacctggctgctgctgacgtgaaaaaacaacgatctgacccctatgtgaaagcctatttacttccagataaaggcaagatgggaaaaaaaaagaccctggtggtgaaaaaaacacttaatccagtttataatgagatactaaggtataagatcgaaaaacagattctgaaaacccagaagttgaatctgagtatttggcacagggatacatttaagaggaattcctttctgggtgaagtcgaacttgatctcgagacatgggattgggacaataaacaaaacaaacagctcaggtggtatccgctgaaacgaaagaccgcaccagtcgccttggaggctgaaaacagaggtgagatgaagctggcactgcaatatgtacctgagcctgtccccggaaagaaacttcccacaactggtgaggtgcacatctgggttaaagagtgcctggacctgccactgctgcgtggatcacatctgaattctttcgtaaagtgcacaatactcccggacactagccgcaagagtcggcagaaaactcgggcggtgggcaagacaactaaccctatcttcaatcatactatggtgtatgacggctttagacctgaggacctgatggaagcctgtgtggaactgacggtgtgggaccactataaactcactaatcagttccttggaggtctgagaattggattcggcaccggtaaatcctacgggaccgaagtcgattggatggactccacttctgaggaagttgctctgtgggagaagatggtgaactcccctaacacatggatcgaagctactcttcccttaagaatgctactaatcgcaaagatctcaaaatag

SEQ ID NO: 342317 - DNA, 3819 bp, Artificial Sequence
  derived and/or modified sequence
atggacgagccaaacgcagagcaagtgtacaatcctagccaattcgaaaatcttcgcaagttctgggatctcgaggccaatagcaattcgaaggacaacgacaagaacatcaccaccacttcacagaaaaactccgccccattcaacaggcaaaagcataaggagttttccgatattaagctcagtggcaagaatactcatgaggcagaggtgttgttgtctcccaaaaaagttatggccagggaagaaatggagaaacttaacagcaaagggatccttcaagtgctgcctgatgaaattaccttccccctgagtccacttagaaagtacacctaccagttacccggtaatgaaagctccaaggaaaatgtggagaaaaacacagagggcattgtgacacccgtttttaaagaagaaaaagactacagtgaacaggagattcaggagagtataataaaaaccaacgtcctgtctaaagattgcaaggacaccttcaacgactctcttcagaaactgctgagcgaaactagcactcccgctattcagccctcgggtggaaaggtgcatggcaagcaggtgttagaaccttctgtatccgaaaaccgtacctggccacaaaaaaccgatttcgcagacacagaggaggaggtgaaggggccagaaaagatcatcaacgagcatgtggataagaccgtcgtgcatcctaaagtcaaacggaacagtcttaccgcttcgctggacaaactgttgaaagaggccaccggaacttccccaagcccgctacaagccaaactcgcccctgtaatcactggaacaaattccaagctggaggaaggcaggttttttggaaaaggtatcgaacagtctcataatacctccgctgacaaacgggagatcctcgcacctttccctgtgagagacgaaactttcggcaacacggccctcctgaagaaagccgagtcaggagagtgtcagctgagtactcagaatctcatacaaatggctgccgaagactcccacccgttggacccgacctcccagctatcccggaaaggaagtttcggcgacgtggcgagccctccacaggacatgctcttcccacaggacgctcacctggtcccccaagctcgcgttcacccatcccagaccgagatctcagagaccgtcgaaaaagtcatcctccccccacgaccagtgctcaatgacgtaagtgctgcgctgcaaaaactgtgtggagaggtgtggttgagctatcccgcaggtcgggaagtggggcctggagaagtcaatccagagtttcccgaagctgtgcagcccgtttgcagtccacttaacccacccggagtcattagcccgtgggccactatggatacaattgttccggacaggaaggacttctacagcagcaatgttgtccccgacaagacacacgaggtcggatcttatctagccgctcagatgagcccaagcgaccagactctgtccagttttgcaagcatcgttgcccagtatggcaagggtctgccccaggaagtggaagagatcgtccgtgagacaatcgtacagccgaagagtgagttcttggaatttagcgccggactggagaaactgctgaaggaagagaccgagacgtttcccagcaagtatgaaagcgatacgggaaatctctctccatccaagctgatcggttcgaccgaggagcccaggcgggctacttccgaatgccaccccgaggagcttaaggaaaccgtggagaaagcggaagcgccattaatcacagaaagcgcctttgatgcgggatttgagaagcttctaaaagagatcactgaagcccctccctaccagcctcaggtgtcagttagagaagaaacacatgaaaaggagagctcccagtcagaacagacaaggtttctaggaacagttccccacttctatcgggcagcatctcagacttccgagatgaaggataaatctaatggtctggagagccaggtcaatcagtgcgataagatgttgggcggagacgccctggtgactgaccttctggttgatttctgcgggtcccgaagtggagtggaaattccccgtactccccagctgtatgtggcgcacgaaatcgggacaattaaaacggtgaccccaccagaagatcgtgattcagaatctggggtcgccggtggccagggaacactgcaggagcctggatttggagaggcttccgaagccatttccgtgtcgcgcaacagacagcccattccacttctcatgaacaaggagaattcgacgaagacctccaaagttgagcttactctggccagtccctacatgaagcaggagaaggaggaggagaaggagggcttcagcgaatccgatttctccgatgggaacacctcctccaacgccgagtcatggcgtaatccttcttcctccgaagaagaaccgagccctgtgctgaagacactcgagagatccgccgctcgtaaaatgccctccaagagcctggaagacataagctctgatagcagtaatcaggcaaaggtcgataatcaaccggaggaactcgtacgcagcgctgaagacgatgagaagccggaccagaaacctgtgactaacgagtgcgttcctcggatctcaaccgtgccaacccagcccgataacccttttagccatcccgacaagttgaaacgcatgtcgaaatccgtgcctgctttccttcaagacgagtcagacgaccgagagaccgacactgcatccgagtcctcgtaccagttgtccagacataagaagagccccagtagcttaacaaatctgtccagctcaagtgggatgacatctctgagcagcgttagtggatctgtgatgtctgtttactcaggcgacttcggaaacttggaagtcaaggggaacattcaatttgccatcgagtacgtggaatcattgaaagagcttcacgtgttcgtggcccaatgtaaagatctcgccgctgccgatgtcaaaaagcaacggagcgatccttacgtcaaagcatacttgctcccagacaagggaaaaatgggcaagaagaagactctggtcgtaaagaagacactaaaccccgtttacaatgagattctgcggtataagatcgaaaaacagatactgaagactcagaaattaaatctgagcatctggcatcgtgatacttttaaacgcaacagtttcctgggggaagtcgaattagatctggaaacgtgggactgggataataagcagaataaacagctgagatggtatcccctgaaacggaagacagcccctgtagctctggaagccgagaatcgcggtgagatgaagcttgctcttcaatacgttccggagccggtcccaggcaaaaaattgcccaccaccggagaagtccacatttgggtcaaagaatgcctggatctaccactgctgaggggcagtcacctcaactcattcgtgaagtgcactattctcccagacacaagccggaaatcgcgacagaaaacacgagcggtcgggaagacaacaaacccaatctttaaccacacaatggtctacgacggcttccgtcctgaggacctgatggaggcctgcgtggagcttacggtctgggaccactataagttgacaaaccaattcctgggtgggctgcggattgggttcggaacagggaaaagttacgggactgaagtagactggatggactctacttctgaggaagtggccctgtgggagaaaatggtcaattccccaaacacctggatcgaagcaaccctgccactcagaatgctgctgatagccaaaatctcaaagtag

SEQ ID NO: 342318 - DNA, 4751 bp, Artificial Sequence
  derived and/or modified sequence
ctaaaagaaagaatggatgaacccaatgcagaacaggtctataatccctctcagtttgagaatttgagaaagttttgggacttagaagctaattcaaacagtaaggataatgacaagaatattaccaccacaagccaaaaaaattctgcaccttttaataggcagaaacacaaggaattcagcgacattaaattatcaggtaaaaatacccatgaagcagaggtgcttctaagcccaaaaaaagttatggcaagagaggaaatggagaaattaaattcaaagggcatactccaggtgctaccagatgaaatcacatttcctttgagtccacttagaaagtatacttatcagttgccaggaaatgagtcatcaaaggaaaatgtggaaaagaatacggaagggattgttactccagtgtttaaggaagaaaaggattactcagaacaagagattcaagaatccataataaaaaccaatgttttgtctaaagactgcaaagacacttttaatgacagcttgcagaaactgctttcagaaacctcaacaccagcaattcaaccctctggtggaaaagttcatggaaaacaagtgcttgaaccaagtgtttctgaaaataggacatggcctcaaaaaacagattttgctgatactgaggaagaagtcaaaggacctgagaagatcattaatgagcatgttgacaaaacagtagttcatccaaaggttaaacggaactctttgactgctagtctagacaaactcctgaaggaagcaactggaacttcaccctctcccttgcaagccaagttggcgcctgttatcactggaaccaactctaagctggaagaggggagattttttggaaaagggatagaacagagtcacaatacttcagctgataagagagaaatactagctccttttccagtgagagatgaaacttttggaaatacagctctcctcaagaaagctgaaagtggtgagtgccagctaagcacacagaatttgattcagatggctgcagaagattctcatccattggatccaacttcccagctttccagaaagggttcttttggggatgtggccagccctccccaagatatgctttttccccaggatgctcatcttgttccccaggctagggtacacccttctcaaacggaaatttcggagactgtagagaaagtcattcttccacccagacctgtattgaatgatgtaagtgctgcattacagaagctgtgtggagaagtatggttaagttatccagctggaagggaagtaggtcctggagaagtgaacccagaatttcctgaagcagtacagccagtatgtagccccctaaatcctccaggagtgatatcaccatgggctacgatggacaccatagttccagacaggaaggatttttattcctccaatgtagttcctgataaaactcatgaagttggatcttatttagctgcccaaatgtctccatcagaccagacgcttagctcatttgcttccattgttgctcaatatggcaaaggcctccctcaggaagtggaagaaattgtgagggaaacaattgttcaacccaaatcagagttcctcgaattcagtgctggcttagaaaaactactgaaggaagaaactgaaaccttcccctcaaaatatgaaagtgatacagggaatctttctccatcaaagttaataggtagtacagaggagcccaggcgagccacttctgaatgccatcctgaggaattaaaagaaacagtagaaaaggccgaggctccgttaataactgagagtgcttttgatgctggttttgagaaacttcttaaagaaataactgaagctcctccttatcagccccaggtgtcagtgagagaagaaactcacgagaaggagtcctcacagtcagagcagaccaggttcttggggacagtgccccatttttacagggcagcctcacagacctctgaaatgaaggataaaagtaatggtttggaatctcaagtcaaccaatgtgataaaatgttgggaggagacgcacttgtgactgatttattggtagatttttgtggttccagaagtggagttgagatccctagaaccccacaactttatgtggctcatgaaatagggaccattaaaactgtaacccccccagaggacagggacagtgaaagtggggttgcagggggacaagggactcttcaggaacctggctttggagaggcttctgaagcaattagtgtgtccagaaataggcaacccattcctctcctgatgaacaaagaaaactctacaaaaacaagtaaagttgaattgactctagcatcgccatatatgaaacaagagaaagaggaagaaaaagaaggtttctctgagtctgatttttcagatggaaacaccagttctaatgcagagagctggagaaatccttccagttcagaagaagaacccagtcctgttttgaaaactttggaaaggagtgccgctaggaaaatgccttccaaaagtctagaagacatttcatcagattcatcaaatcaagcaaaagtagataatcagccagaagaattagtgcgtagtgctgaagatgatgagaaaccagatcagaagccagttacaaatgaatgcgtaccaagaatttccacagtgcctacacaacctgataatccattttctcaccctgacaaactcaaaaggatgagcaagtctgttccagcatttctccaagatgagagtgatgacagagaaacagatacagcatcagaaagcagttaccagctcagcagacacaagaagagcccgagctctttaaccaatcttagcagctcctctggcatgacgtccttgtcttctgtgagtggcagtgtgatgagtgtttatagtggagactttggcaatctggaagttaaaggaaatattcagtttgcaattgaatatgtggagtcactgaaggagttgcatgtttttgtggcccagtgtaaggacttagcagcagcggatgtaaaaaaacagcgttcagacccatatgtaaaggcctatttgctaccagacaaaggcaaaatgggcaagaagaaaacactcgtagtgaagaaaaccttgaatcctgtgtataacgaaatactgcggtataaaattgaaaaacaaatcttaaagacacagaaattgaacctgtccatttggcatcgggatacatttaagcgcaatagtttcctaggggaggtggaacttgatttggaaacatgggactgggataacaaacagaataaacaattgagatggtaccctctgaagcggaagacagcaccagttgcccttgaagcagaaaacagaggtgaaatgaaactagctctccagtatgtcccagagccagtccctggtaaaaagcttcctacaactggagaagtgcacatctgggtgaaggaatgccttgatctaccactgctaaggggaagtcatctaaattcttttgttaaatgtaccatccttccagatacaagtaggaaaagtcgccagaagacaagagctgtagggaaaaccaccaaccctatcttcaaccacactatggtgtatgatgggttcaggcctgaagatctgatggaagcctgtgtagagcttactgtctgggaccattacaaattaaccaaccaatttttgggaggtcttcgtattggctttggaacaggtaaaagttatgggactgaagtggactggatggactctacttcagaggaagttgctctctgggagaagatggtaaactcccccaatacttggattgaagcaacactgcctctcagaatgcttttgattgccaagatttccaaatgagcccaaattccactggctcctccactgaaaactactaaaccggtggaatctgatcttgaaaatctgagtaggtggacaaatatcctcactttctatctattgcacctaaggaatactacacagcatgtaaaagtcaatctgcatgtgcttctttgattacaaggcccaagggatttaaatataacaaaatgtgtaatttgtgactctaatattaaataagatatttgaacaagctaggaaaattgaatttctgctgctgcttcaaagaaaaagctgccccagagcattaaacatggggtattgttaagaagcaaaatgttcttgtttgccatcatgtgtttcacaccacaattctgtgccacagttaagagggtctggtacccttgcaggacctttgtaggttgtgggaaaaagtcgcagaaagatactcaaagtggagcagggaatggagacagacatcagtgatgataaaaaaaaaaatggaccttaagaaactatttactctgtaatctctaataaaatatggaattccatattagggcaatgagactgaaactactggtgtttttctgccttgagaaaacaaacagttaaaacaagcctcaaatgtattttagtgccacccactggccataggtacaattcagttgttggcttgttttgacttaattctaaaataggtctcaagcctgtatttttatgagtttatttttttaaaaccctgcatatatatgattgtttttcttataactttactatatgaaagcagcataagagtagtcacaaacatgttttgcaacaaagttttaattagaatgtaagttgctcagttatactgttcttcttatgtatgtaaaattttcgtattttgtaaaaacccttagaataaattatcatttgatttaaattgtattagaaaa

SEQ ID NO: 342319 - protein, 70 aa, Artificial Sequence
  derived and/or modified sequence
MSKSVPAFLQDESDDRETDTASESSYQLSRHKKSPSSLTNLSSSSGMTSLSSVSGSVMSVYSGDFGNLEV

SEQ ID NO: 342320 - protein, 744 aa, Artificial Sequence
  derived and/or modified sequence
MKRLSYPFSREKQHLFDLSDKDSFFDSKTRSTIVYEILKRTTCTKAKYSMGITSLLANGVYAAAYPLHDGDYNGENVEFNDRKLLYEEWARYGVFYKYQPIDLVRKYFGEKIGLYFAWLGVYTQMLIPASIVGIIVFLYGCATMDENIPSMEMCDQRHNITMCPLCDKTCSYWKMSSACATARASHLFDNPATVFFSVFMALWAATFMEHWKRKQMRLNYRWDLTGFEEEEKALLDHPRAEYEARVLEKSLKKESRNKETDKVKLTWRDRFPAYLTNLVSIIFMIAVTFAIVLGVIIYRISMAAALAMNSSPSVRSNIRVTVTATAVIINLVVIILLDEVYGCIARWLTKIEVPKTEKSFEERLIFKAFLLKFVNSYTPIFYVAFFKGRFVGRPGDYVYIFRSFRMEECAPGGCLMELCIQLSIIMLGKQLIQNNLFEIGIPKMKKLIRYLKLKQQSPPDHEECVKRKQRYEVDYNLEPFAGLTPEYMEMIIQFGFVTLFVASFPLAPLFALLNNIIEIRLDAKKFVTELRRPVAVRAKDIGIWYNILRGIGKLAVIINAFVISFTSDFIPRLVYLYMYSKNGTMHGFVNHTLSSFNVSDFQNGTAPNDPLDLGYEVQICRYKDYREPPWSENKYDISKDFWAVLAARLAFVIVFQNLVMFMSDFVDWVIPDIPKDISQQIHKEKVLMVELFMREEQDKQQLLETWMEKERQKDEPPCNHHNTKACPDSLGSPAPSHAYHGGVL

SEQ ID NO: 342321 - DNA, 2235 bp, Artificial Sequence
  derived and/or modified sequence
atgaagaggttaagctacccattttcccgcgaaaagcaacacctattcgatctgagcgataaggactccttttttgactcgaaaacaagatccaccattgtttatgaaatcttgaaacgcacgacatgcactaaagcaaagtattctatgggcattacctctctactcgcaaacggggtgtacgccgctgcttacccgctgcatgacggagattacaacggcgagaatgtggagttcaacgataggaagttgctgtacgaggaatgggccagatatggcgtattctacaagtatcagccaatagatctggttcggaagtattttggagaaaaaattggtctctacttcgcttggctcggagtgtacacccagatgctgatccccgccagcatagttggaattatcgtattcctctacggatgtgccacaatggatgagaatattccttctatggaaatgtgtgatcaaaggcataatattacaatgtgtcctctgtgcgataagacgtgtagctattggaaaatgagtagtgcttgtgctacagcacgggcctcccacctgtttgataatccagccacggtcttctttagtgtgttcatggctctgtgggccgctacttttatggagcattggaaaaggaagcagatgcgtctgaactacagatgggacctgacaggtttcgaggaagaggagaaggcactgctggatcatccacgggcggagtatgaggcacgcgtgctggagaagagcctgaagaaagagtctcgtaataaagaaacagataaggtcaagctcacctggcgggatcggttccctgcctacctgaccaacctggtctcaatcatcttcatgatcgctgtgacctttgcgatcgttctgggcgttatcatttacagaatcagtatggctgccgcattagctatgaatagtagtcctagtgttagaagtaatattagagtaacagttaccgctacagccgtgatcatcaacctcgtggtcattattctcctggatgaggtgtacggctgcatagctcggtggttaacaaagatcgaggtgccgaaaaccgaaaaatcgtttgaggagcgactgatcttcaaagcattcctgctgaaatttgtgaacagttatacaccaattttttatgtggcctttttcaaggggagatttgttggccgacctggggattacgtctacatcttccgcagctttaggatggaggaatgtgcaccaggaggttgccttatggaactatgcatacaactgtctatcattatgctaggaaagcagctcatccagaataacctctttgaaataggaattccgaaaatgaagaagctaattcgctacctcaagctgaaacagcagagcccgcccgaccatgaagagtgcgtgaaacgcaagcagcggtatgaagtcgactacaacctagagccattcgccgggctgactccagagtacatggagatgattatccaatttggcttcgtcacattatttgtggcctcttttcctttagccccactcttcgctctgttaaacaatatcattgagatccgccttgacgctaaaaaatttgtcacagaactgaggcgccctgtggccgtgcgcgccaaggatattggcatttggtataacattctccgcggtattgggaagctagctgtcattatcaacgcctttgtaattagcttcacatccgattttatccccagactggtgtatctatacatgtactccaaaaatggaacgatgcatgggttcgtgaaccacaccctctcctcgttcaatgtgtctgactttcagaacgggactgcccccaatgatcctctggatctgggttatgaagtccagatatgccgctacaaagactatcgtgagccaccttggagcgagaacaaatatgatatttccaaggatttctgggctgtactggcggcaaggttagcatttgtgattgtattccagaacctcgtgatgttcatgagtgatttcgtcgattgggtcattcctgacattcctaaagatatcagccagcagattcacaaggagaaagtactaatggtggagctgtttatgcgcgaggagcaggataaacaacagttactggagacatggatggagaaagagagacagaaagatgagccaccttgtaaccaccacaacacaaaggcgtgccctgactccctaggctcccctgctcccagtcatgcctaccacggtggggtcttgtag

SEQ ID NO: 342322 - DNA, 2235 bp, Artificial Sequence
  derived and/or modified sequence
atgaagaggctgagctaccccttcagccgggagaagcagcacctgtttgacctgagtgacaaggacagcttctttgacagcaagaccaggagcaccatcgtgtatgagatcctgaagaggaccacctgcaccaaggccaagtacagcatgggcatcaccagcctgctggccaacggggtgtatgctgctgcctaccccctgcatgatggagactacaatggagaaaatgtggagttcaatgacaggaagctgctgtatgaggagtgggcccgctatggagtcttctacaagtaccagcccatcgacctggtgaggaagtactttggagagaagattggcctgtactttgcctggctgggcgtgtacacccagatgctgatcccagccagcatcgtgggcatcatcgtgttcctgtatggctgtgccaccatggatgagaacatccccagcatggagatgtgtgaccagaggcacaacatcaccatgtgccccctgtgtgacaagacctgcagctactggaagatgagcagcgcctgtgccacagcccgggccagccacctgtttgacaacccagccaccgtcttcttctctgtgttcatggccctgtgggccgccaccttcatggagcactggaagaggaagcagatgaggctgaactaccgctgggacctgactggatttgaggaggaggagaaggccctgctggaccaccccagggcagaatatgaggcccgggtgctggagaagagcctgaagaaggagagcaggaacaaggagacagacaaggtgaagctgacctggagggaccgcttccctgcctacctgaccaacctggtgtccatcatcttcatgattgctgtgacctttgccatcgtgctgggcgtcatcatctaccgcatctccatggccgccgccctggccatgaacagcagccccagcgtgcgcagcaacatccgggtgacagtgacagccacagctgtgatcatcaacctggtggtgatcatcctgctggatgaggtgtatggctgcatcgcccgctggctgaccaagattgaggtgcccaagacagagaagagctttgaggagcggctcatcttcaaggccttcctgctgaagtttgtgaacagctacacccccatcttctacgtggccttcttcaagggccgctttgtgggccggcctggggactatgtgtacatcttccgctccttcaggatggaggagtgtgcccctgggggctgcctgatggagctgtgcatccagctgagcatcatcatgctgggcaagcagctgatccagaacaacctgtttgaaattggcatccccaagatgaagaagctgatccgctacctgaagctgaagcagcagagccccccagaccatgaagaatgtgtgaagaggaagcagagatatgaggtggactacaacctggagccctttgctggcctgaccccagagtacatggagatgatcatccagtttggatttgtgaccctgtttgtggccagcttccccctggcccccctgtttgccctgctgaacaacatcatcgagatccggctggatgccaagaagtttgtgacagagctgcggcggcctgtggccgtgcgggccaaggacatcggcatctggtacaacatcctgcggggcatcggcaagctggccgtcatcatcaatgcctttgtgatctccttcaccagtgacttcatcccccggctggtgtacctgtacatgtacagcaagaatggcaccatgcacggctttgtgaaccacaccctgagcagcttcaacgtgtctgacttccagaatggaacagccccaaatgaccccctggacctgggctatgaggtgcagatctgccgctacaaggactaccgggagcccccctggagcgagaacaagtatgacatcagcaaggacttctgggccgtgctggccgcccggctggcctttgtgattgtgttccagaacctggtgatgttcatgtctgactttgtggactgggtgatcccagacatccccaaggacatcagccagcagatccacaaggagaaggtgctgatggtggagctgttcatgagggaggagcaggacaagcagcagctgctggagacctggatggagaaggagcggcagaaggatgagcccccctgcaaccaccacaacaccaaggcctgcccagacagcctgggcagccctgcccccagccacgcctaccacggcggcgtgctgtag

SEQ ID NO: 342323 - DNA, 2235 bp, Artificial Sequence
  derived and/or modified sequence
atgaagcggctgagctaccccttcagccgggagaagcagcacctgtttgatctgtccgacaaagattcttttttcgattccaagacacgctctaccattgtgtatgagatcctgaagcgtactacctgcactaaggctaaatatagcatgggtatcacctctctgctcgccaacggcgtgtatgccgctgcctaccccctgcacgatggtgattataacggtgagaacgtggaattcaatgatagaaagttgctgtacgaagagtgggccagatatggcgtgttttataagtaccagcccatcgatctcgtgcggaaatacttcggcgaaaaaatagggctgtattttgcttggttgggcgtatatacccagatgctcatccccgcatccatcgtcggcataatcgtatttttgtacggctgcgccacaatggatgaaaatatccctagtatggaaatgtgcgaccagcgtcataatatcactatgtgccctctgtgcgacaagacatgctcgtactggaagatgtcaagtgcttgcgctaccgctagagctagtcacttattcgacaaccccgccaccgtctttttcagtgtgtttatggccctgtgggctgccacctttatggagcactggaagcgaaaacaaatgcgtctgaactacaggtgggatttgacgggtttcgaagaggaagaaaaggccctgttagatcatccccgtgcagagtatgaagcccgcgtactggagaagagtcttaagaaagagagccgcaacaaagagacagacaaggtgaagctgacctggagggataggttccccgcttatctaactaacctggtcagcatcattttcatgattgcagttacctttgctatcgttctgggagttattatctacagaatctcgatggcagctgctctggctatgaatagcagcccaagcgtgcgttccaatattagagtcacggttactgcgacagcagtgatcatcaatcttgtggttatcatccttctagatgaagtatacggctgtatcgcccgctggctaaccaagattgaagtgcccaagaccgagaagtcattcgaggagcgcctgatattcaaggctttcctactgaaattcgtcaactcatacactcctatcttttacgtggcattctttaaaggcaggttcgtgggacgcccgggcgactatgtctatatcttcaggagctttaggatggaggagtgtgcaccaggcgggtgcctgatggagctctgcatccagctttccattattatgttaggcaagcagttgattcagaataacctgtttgaaattggaatccccaagatgaagaagcttattagatatctgaaattgaaacagcaatctccccccgatcacgaagagtgtgttaagcgaaaacagcggtacgaggttgactacaatctagaaccattcgcgggcctgacacctgagtacatggaaatgatcatccaatttggtttcgtgactctgttcgttgcgagctttcccctggccccccttttcgctctgctgaataatatcatagaaatacgactcgacgctaaaaaatttgtgactgaactcaggagaccggtggcagtgcgggcaaaagacattgggatttggtataatattctgcggggcattgggaagctggccgttatcatcaacgccttcgtaataagtttcacatccgatttcatcccccggctggtttatctctacatgtactcaaaaaatggaaccatgcacggtttcgtgaaccacacgctctcctcatttaacgtatcagacttccagaatggtaccgctcccaatgaccccctagacttgggatacgaagtgcaaatttgtagatacaaggattaccgggagccaccctggtcggagaacaagtacgatatctcgaaggatttttgggccgttctcgcggctcgtttggcttttgtgatagttttccagaacctggtgatgttcatgtccgacttcgttgattgggtgattcctgacatcccaaaggatatctcgcagcagatccataaagaaaaggtgctgatggtggaactatttatgcgtgaagagcaagataaacagcaactcctggagacttggatggagaaggaacgccagaaggatgaacctccctgtaatcatcacaataccaaggcgtgccctgatagcttggggagtcctgccccttcccatgcctatcacggaggcgtgctgtag

SEQ ID NO: 342324 - DNA, 4455 bp, Artificial Sequence
  derived and/or modified sequence
ggatggggagggcgcgccgcccggcggtcccagcgcacaggcggccacgatgagggtcaacgagaagtactcgacgctcccggccgaggaccgcagcgtccacatcatcaacatctgcgccatcgaggacatcggctacctgccgtccgagggcacgctgctgaactccttatctgtggaccctgatgccgagtgcaagtatggcctgtacttcagggacggccggcgcaaggtggactacatcctggtgtaccatcacaagaggccctcgggcaaccggaccctggtcaggagggtgcagcacagcgacaccccctctggggctcgcagcgtcaagcaggaccaccccctgccgggcaagggggcgtcgctggatgcaggctcgggggagcccccgatggactaccacgaggatgacaagcgcttccgcagggaggagtacgagggcaacctcctggaggcgggcctggagctggagcgggacgaggacactaaaatccacggagtcgggtttgtgaaaatccatgccccctggaacgtgctgtgcagagaggccgagtttctgaaactgaagatgccgacgaagaagatgtaccacattaatgagacccgtggcctcctgaaaaaaatcaactctgtgctccagaaaatcacagatcccatccagcccaaagtggctgagcacaggccccagaccatgaagagactctcctatcccttctcccgggagaagcagcatctatttgacttgtctgataaggattcctttttcgacagcaaaacccggagcacgattgtctatgagatcttgaagagaacgacgtgtacaaaggccaagtacagcatgggcatcacgagcctgctggccaatggtgtgtacgcggctgcatacccactgcacgatggagactacaacggtgaaaacgtcgagttcaacgacagaaaactcctgtacgaagagtgggcacgctatggagttttctataagtaccagcccatcgacctggtcaggaagtattttggggagaagatcggcctgtacttcgcctggctgggcgtgtacacccagatgctcatccctgcctccatcgtgggaatcattgtcttcctgtacggatgcgccaccatggatgaaaacatccccagcatggagatgtgtgaccagagacacaatatcaccatgtgcccgctttgcgacaagacctgcagctactggaagatgagctcagcctgcgccacggcccgcgccagccacctcttcgacaaccccgccacggtcttcttctctgtcttcatggccctctgggctgccaccttcatggagcactggaagcggaaacagatgcgactcaactaccgctgggacctcacgggctttgaagaggaagagaaagcacttctggatcatcctagagctgaatacgaagccagagtcttggagaagtctctgaagaaagagtccagaaacaaagagactgacaaagtgaagctgacatggagagatcggttcccagcctacctcactaacttggtctccatcatcttcatgattgcagtgacgtttgccatcgtcctcggcgtcatcatctacagaatctccatggccgccgccttggccatgaactcctccccctccgtgcggtccaacatccgggtcacagtcacagccaccgcagtcatcatcaacctagtggtcatcatcctcctggacgaggtgtatggctgcatagcccgatggctcaccaagatcgaggtcccaaagacggagaaaagctttgaggagaggctgatcttcaaggctttcctgctgaagtttgtgaattcctacacccccatcttttacgtggcgttcttcaaaggccggtttgttggacgcccgggcgactacgtgtacattttccgttccttccgaatggaagagtgtgcgccagggggctgcctgatggagctatgcatccagctcagcatcatcatgctggggaaacagctgatccagaacaacctgttcgagatcggcatcccgaagatgaagaagctcatccgctacctgaagctgaagcagcagagcccccctgaccacgaggagtgtgtgaagaggaaacagcggtacgaggtggattacaacctggagcccttcgcgggcctcaccccagagtacatggaaatgatcatccagtttggcttcgtcaccctgtttgtcgcctccttccccctggccccactgtttgcgctgctgaacaacatcatcgagatccgcctggacgccaaaaagtttgtcactgagctccgaaggccggtagctgtcagagccaaagacatcggaatctggtacaatatcctcagaggcattgggaagcttgctgtcatcatcaatgccttcgtgatctccttcacgtctgacttcatcccgcgcctggtgtacctctacatgtacagtaagaacgggaccatgcacggcttcgtcaaccacaccctctcctccttcaacgtcagtgacttccagaacggcacggcccccaatgaccccctggacctgggctacgaggtgcagatctgcaggtataaagactaccgagagccgccgtggtcggaaaacaagtacgacatctccaaggacttctgggccgtcctggcagcccggctggcgtttgtcatcgtcttccagaacctggtcatgttcatgagcgactttgtggactgggtcatcccggacatccccaaggacatcagccagcagatccacaaggagaaggtgctcatggtggagctgttcatgcgggaggagcaagacaagcagcagctgctggaaacctggatggagaaggagcggcagaaggacgagccgccgtgcaaccaccacaacaccaaagcctgcccagacagcctcggcagcccagcccccagccatgcctaccacgggggcgtcctgtagctatgccagcggggctgggcaggccagccgggcatcctgaccgatgggcaccctctcccagggcaggcggcttcccgctcccaccagggcccggtgggtcctgggttttctgcaaacatggaggaccactttctgataggacattttcctttcttctttctgttttctttcccttgtttttgcacaaagccattatgcagggaatattttttaatctgtagtattcaagatgaatcaaaatgatggctggtaatacggcaataaggtagcaaaggcaggtgctttgcagaaagaatgcttggaaacttgagtctccctagaggtgaaaagtgagcagaggcccgtagaaaccctcctctgaatcctcctaattccttaagatagatgcaaaatggtaagccgaggcatcgcgcaaaagctggtgcgatgcttcagggaaaatggaaaacccacgcaagaataatgattgattccggttccaaaaggtgtcacctacctgtttcagaaaagttagactttccatcgccttttccttccatcagttgagtggctgagagagaagtgcctcatccctgagccacacagggggcgtgggagcatcccagttatccctggaaagctagaaggggacagaggtgtccctgattaagcaggaaacagcacccttggcgtccccagcaggctccccactgtcagccacacacctgcccccatcacaccaagccgacctcagagttgttcatcttccttatgggacaaaaccggttgaccagaaaatgggcagagagagatgacctcggaagcatttccacagatggtgtcagggtttcaagaagtcttagggcttccaggggtcccctggaagctttagaatatttatgggttttttttcaaatatcaattatatggtagattgaggattttttttctgtagctcaaaggtggagggagtttattagttaaccaaatatcgttgagaggaatttaaaatactgttactaccaaagatttttattaataaaggcttatattttggtaacacttctctatatttttactcacaggaatgtcactgttggacaattattttaaaagtgtataaaaccaagtctcataaatgatatgagtgatctaaatttgcagcaatgatactaaacaactctctgaaatttctcaagcaccaagagaaacatcattttagcaaaggccaggaggaaaaatagaaataaatttgtcttgaagatctcattgatgtgatgttacattccctttaatctgccaactgtggtcaaagttcataggtgtcgtacatttccattatttgctaaaatcatgcaatctgatgcttctcttttctcttgtacagtaagtagtttgaagtgggttttgtatataaatactgtattaaaaattaggcaattaccaaaaatccttttatggaaaccatttttttaaaaagtgaatgtacacaaatccacagaggactgtggctggacattcatctaaataaatttgaatatacg

SEQ ID NO: 342325 - DNA, 2235 bp, Artificial Sequence
  derived and/or modified sequence
atgaagcgcctttcgtacccattttctcgtgaaaagcaacacctcttcgacctgagcgataaggattcgttcttcgattcaaagacaagaagtaccattgtgtacgagatactgaagcggactacatgcaccaaggccaagtacagcatgggtatcacatccctcttagccaacggggtgtatgctgcagcttacccacttcatgatggcgattataatggcgagaatgtagagttcaacgacagaaaactgctttacgaggagtgggcccgatatggcgtattctacaaataccagcccatcgacctcgtaagaaaatatttcggcgagaagattgggctgtattttgcttggttaggagtttacacccagatgttaatacctgccagtatagttggcatcatcgtcttcctgtatggatgcgccaccatggatgagaatataccctccatggaaatgtgcgaccagcgacacaacatcactatgtgtccactatgtgataaaacgtgttcctactggaagatgtcatcagcctgcgccaccgcacgggcaagccatttgttcgataatccagcaacagtatttttttcggtttttatggccctctgggctgccacttttatggaacactggaaacggaaacagatgcggctgaattataggtgggacctcaccgggttcgaagaggaggaaaaagctctcctggaccaccccagagcagaatacgaggctagagtgctggagaaatcattgaagaaggaaagtcggaacaaggagacggacaaagtcaagcttacttggcgcgaccgtttccctgcatacttaaccaatctggtttctattatctttatgatagctgtgacttttgccattgtcctgggagtcattatttacagaattagtatggctgcagccttggctatgaacagcagcccaagtgtgagatccaatattagagttacagtcaccgctacagcagtgatcatcaatctcgtggtcatcatactgcttgatgaagtctacggctgcatcgcacggtggctgaccaagatagaggtgcccaagactgagaagagttttgaggagagactgatttttaaggctttcttgctgaagttcgttaattcctacacgccgatcttttacgtggcttttttcaagggaaggttcgttgggaggcctggagattacgtctacatatttaggtcttttcggatggaggagtgtgctccaggcggatgccttatggagctgtgcatccagctgtcaattatcatgcttggcaagcagctgatccagaacaatctgtttgaaattggcattcctaagatgaaaaagctgataaggtacctgaagttgaagcagcagagcccccctgatcatgaagaatgtgtgaaacgaaagcagaggtatgaggtggactataaccttgaaccattcgctggcctgacacctgagtacatggaaatgatcatccagttcggcttcgtaacccttttcgttgcaagttttcctctcgctccacttttcgctttgctaaacaacattatagagattcggctggacgctaaaaagttcgtgacagaactgaggagacctgttgcggtacgagccaaagacatcggaatatggtacaacattcttaggggtattgggaagctggctgtgatcatcaacgcatttgttattagcttcacctctgattttatacccagactggtgtacctctacatgtactcaaaaaatggaacaatgcacgggtttgtgaatcacaccctgagctcgttcaatgtgagcgactttcagaacggtacggccccaaacgatcctttagatcttggatacgaagtgcaaatttgtcgctataaagactatcgggagcccccatggtccgagaataaatacgatatatccaaagacttctgggctgtgctggctgctagactggcattcgtgatcgtgtttcagaacctggtgatgttcatgagtgactttgtagactgggtaattcccgacatacccaaggacatatcacagcagatccacaaggaaaaggttctgatggtcgaactcttcatgcgcgaggagcaagataagcaacagctgttggagacctggatggaaaaagagcggcagaaagatgaacccccatgcaaccaccacaataccaaagcctgtcccgatagcttaggtagccctgcgccaagccacgcctaccacggaggcgtcctgtag

SEQ ID NO: 342326 - DNA, 2235 bp, Artificial Sequence
  derived and/or modified sequence
atgaagagactgagctaccccttcagcagagagaagcagcacctgttcgacctgagcgacaaggacagcttcttcgacagcaagaccagaagcaccatcgtgtacgagatcctgaagagaaccacctgcaccaaggccaagtacagcatgggcatcaccagcctgctggccaacggcgtgtacgccgccgcctaccccctgcacgacggcgactacaacggcgagaacgtggagttcaacgacagaaagctgctgtacgaggagtgggccagatacggcgtgttctacaagtaccagcccatcgacctggtgagaaagtacttcggcgagaagatcggcctgtacttcgcctggctgggcgtgtacacccagatgctgatccccgccagcatcgtgggcatcatcgtgttcctgtacggctgcgccaccatggacgagaacatccccagcatggagatgtgcgaccagagacacaacatcaccatgtgccccctgtgcgacaagacctgcagctactggaagatgagcagcgcctgcgccaccgccagagccagccacctgttcgacaaccccgccaccgtgttcttcagcgtgttcatggccctgtgggccgccaccttcatggagcactggaagagaaagcagatgagactgaactacagatgggacctgaccggcttcgaggaggaggagaaggccctgctggaccaccccagagccgagtacgaggccagagtgctggagaagagcctgaagaaggagagcagaaacaaggagaccgacaaggtgaagctgacctggagagacagattccccgcctacctgaccaacctggtgagcatcatcttcatgatcgccgtgaccttcgccatcgtgctgggcgtgatcatctacagaatcagcatggccgccgccctggccatgaacagcagccccagcgtgagaagcaacatcagagtgaccgtgaccgccaccgccgtgatcatcaacctggtggtgatcatcctgctggacgaggtgtacggctgcatcgccagatggctgaccaagatcgaggtgcccaagaccgagaagagcttcgaggagagactgatcttcaaggccttcctgctgaagttcgtgaacagctacacccccatcttctacgtggccttcttcaagggcagattcgtgggcagacccggcgactacgtgtacatcttcagaagcttcagaatggaggagtgcgcccccggcggctgcctgatggagctgtgcatccagctgagcatcatcatgctgggcaagcagctgatccagaacaacctgttcgagatcggcatccccaagatgaagaagctgatcagatacctgaagctgaagcagcagagcccccccgaccacgaggagtgcgtgaagagaaagcagagatacgaggtggactacaacctggagcccttcgccggcctgacccccgagtacatggagatgatcatccagttcggcttcgtgaccctgttcgtggccagcttccccctggcccccctgttcgccctgctgaacaacatcatcgagatcagactggacgccaagaagttcgtgaccgagctgagaagacccgtggccgtgagagccaaggacatcggcatctggtacaacatcctgagaggcatcggcaagctggccgtgatcatcaacgccttcgtgatcagcttcaccagcgacttcatccccagactggtgtacctgtacatgtacagcaagaacggcaccatgcacggcttcgtgaaccacaccctgagcagcttcaacgtgagcgacttccagaacggcaccgcccccaacgaccccctggacctgggctacgaggtgcagatctgcagatacaaggactacagagagcccccctggagcgagaacaagtacgacatcagcaaggacttctgggccgtgctggccgccagactggccttcgtgatcgtgttccagaacctggtgatgttcatgagcgacttcgtggactgggtgatccccgacatccccaaggacatcagccagcagatccacaaggagaaggtgctgatggtggagctgttcatgagagaggagcaggacaagcagcagctgctggagacctggatggagaaggagagacagaaggacgagcccccctgcaaccaccacaacaccaaggcctgccccgacagcctgggcagccccgcccccagccacgcctaccacggcggcgtgctgtag

SEQ ID NO: 342327 - DNA, 4443 bp, Artificial Sequence
  derived and/or modified sequence
ggatggggagggcgcgccgcccggcggtcccagcgcacaggcggccacgatgagggtcaacgagaagtactcgacgctcccggccgaggaccgcagcgtccacatcatcaacatctgcgccatcgaggacatcggctacctgccgtccgagggcacgctgctgaactccttatctgtggaccctgatgccgagtgcaagtatggcctgtacttcagggacggccggcgcaaggtggactacatcctggtgtaccatcacaagaggccctcgggcaaccggaccctggtcaggagggtgcagcacagcgacaccccctctggggctcgcagcgtcaagcaggaccaccccctgccgggcaagggggcgtcgctggatgcaggctcgggggagcccccgatggactaccacgaggatgacaagcgcttccgcagggaggagtacgagggcaacctcctggaggcgggcctggagctggagcgggacgaggacactaaaatccacggagtcgggtttgtgaaaatccatgccccctggaacgtgctgtgcagagaggccgagtttctgaaactgaagatgccgacgaagaagatgtaccacattaatgagacccgtggcctcctgaaaaaaatcaactctgtgctccagaaaatcacagatcccatccagcccaaagtggctgagcacaggccccagaccatgaagagactctcctatcccttctcccgggagaagcagcatctatttgacttgtctgataaggattcctttttcgacagcaaaacccggagcacgattgtctatgagatcttgaagagaacgacgtgtacaaaggccaagtacagcatgggcatcacgagcctgctggccaatggtgtgtacgcggctgcatacccactgcacgatggagactacaacggtgaaaacgtcgagttcaacgacagaaaactcctgtacgaagagtgggcacgctatggagttttctataagtaccagcccatcgacctggtcaggaagtattttggggagaagatcggcctgtacttcgcctggctgggcgtgtacacccagatgctcatccctgcctccatcgtgggaatcattgtcttcctgtacggatgcgccaccatggatgaaaacatccccagcatggagatgtgtgaccagagacacaatatcaccatgtgcccgctttgcgacaagacctgcagctactggaagatgagctcagcctgcgccacggcccgcgccagccacctcttcgacaaccccgccacggtcttcttctctgtcttcatggccctctgggctgccaccttcatggagcactggaagcggaaacagatgcgactcaactaccgctgggacctcacgggctttgaagaggaagaggatcatcctagagctgaatacgaagccagagtcttggagaagtctctgaagaaagagtccagaaacaaagagactgacaaagtgaagctgacatggagagatcggttcccagcctacctcactaacttggtctccatcatcttcatgattgcagtgacgtttgccatcgtcctcggcgtcatcatctacagaatctccatggccgccgccttggccatgaactcctccccctccgtgcggtccaacatccgggtcacagtcacagccaccgcagtcatcatcaacctagtggtcatcatcctcctggacgaggtgtatggctgcatagcccgatggctcaccaagatcgaggtcccaaagacggagaaaagctttgaggagaggctgatcttcaaggctttcctgctgaagtttgtgaattcctacacccccatcttttacgtggcgttcttcaaaggccggtttgttggacgcccgggcgactacgtgtacattttccgttccttccgaatggaagagtgtgcgccagggggctgcctgatggagctatgcatccagctcagcatcatcatgctggggaaacagctgatccagaacaacctgttcgagatcggcatcccgaagatgaagaagctcatccgctacctgaagctgaagcagcagagcccccctgaccacgaggagtgtgtgaagaggaaacagcggtacgaggtggattacaacctggagcccttcgcgggcctcaccccagagtacatggaaatgatcatccagtttggcttcgtcaccctgtttgtcgcctccttccccctggccccactgtttgcgctgctgaacaacatcatcgagatccgcctggacgccaaaaagtttgtcactgagctccgaaggccggtagctgtcagagccaaagacatcggaatctggtacaatatcctcagaggcattgggaagcttgctgtcatcatcaatgccttcgtgatctccttcacgtctgacttcatcccgcgcctggtgtacctctacatgtacagtaagaacgggaccatgcacggcttcgtcaaccacaccctctcctccttcaacgtcagtgacttccagaacggcacggcccccaatgaccccctggacctgggctacgaggtgcagatctgcaggtataaagactaccgagagccgccgtggtcggaaaacaagtacgacatctccaaggacttctgggccgtcctggcagcccggctggcgtttgtcatcgtcttccagaacctggtcatgttcatgagcgactttgtggactgggtcatcccggacatccccaaggacatcagccagcagatccacaaggagaaggtgctcatggtggagctgttcatgcgggaggagcaagacaagcagcagctgctggaaacctggatggagaaggagcggcagaaggacgagccgccgtgcaaccaccacaacaccaaagcctgcccagacagcctcggcagcccagcccccagccatgcctaccacgggggcgtcctgtagctatgccagcggggctgggcaggccagccgggcatcctgaccgatgggcaccctctcccagggcaggcggcttcccgctcccaccagggcccggtgggtcctgggttttctgcaaacatggaggaccactttctgataggacattttcctttcttctttctgttttctttcccttgtttttgcacaaagccattatgcagggaatattttttaatctgtagtattcaagatgaatcaaaatgatggctggtaatacggcaataaggtagcaaaggcaggtgctttgcagaaagaatgcttggaaacttgagtctccctagaggtgaaaagtgagcagaggcccgtagaaaccctcctctgaatcctcctaattccttaagatagatgcaaaatggtaagccgaggcatcgcgcaaaagctggtgcgatgcttcagggaaaatggaaaacccacgcaagaataatgattgattccggttccaaaaggtgtcacctacctgtttcagaaaagttagactttccatcgccttttccttccatcagttgagtggctgagagagaagtgcctcatccctgagccacacagggggcgtgggagcatcccagttatccctggaaagctagaaggggacagaggtgtccctgattaagcaggaaacagcacccttggcgtccccagcaggctccccactgtcagccacacacctgcccccatcacaccaagccgacctcagagttgttcatcttccttatgggacaaaaccggttgaccagaaaatgggcagagagagatgacctcggaagcatttccacagatggtgtcagggtttcaagaagtcttagggcttccaggggtcccctggaagctttagaatatttatgggttttttttcaaatatcaattatatggtagattgaggattttttttctgtagctcaaaggtggagggagtttattagttaaccaaatatcgttgagaggaatttaaaatactgttactaccaaagatttttattaataaaggcttatattttggtaacacttctctatatttttactcacaggaatgtcactgttggacaattattttaaaagtgtataaaaccaagtctcataaatgatatgagtgatctaaatttgcagcaatgatactaaacaactctctgaaatttctcaagcaccaagagaaacatcattttagcaaaggccaggaggaaaaatagaaataaatttgtcttgaagatctcattgatgtgatgttacattccctttaatctgccaactgtggtcaaagttcataggtgtcgtacatttccattatttgctaaaatcatgcaatctgatgcttctcttttctcttgtacagtaagtagtttgaagtgggttttgtatataaatactgtattaaaaattaggcaattaccaaaaatccttttatggaaaccatttttttaaaaagtgaatgtacacaaatccacagaggactgtggctggacattcatctaaataaatttgaatatacg

SEQ ID NO: 342328 - DNA, 3289 bp, Artificial Sequence
  derived and/or modified sequence
tgagtccaggtcctcctgaaggtcaccagcacagcggggccctgtgttactgtagagagaagtcagttgcttagtttcagcctcctgccggcaccagatgctgaccaggccctcccaggtggtgagcaatgctgtttccaggagaggcatcctagggccagagaggccaaggtgccagggacatggccccaactgtcccctaaccaggggtagaggagtctagacccttgacatcaacacctatgaaagctgctgaactccttatctgtggaccctgatgccgagtgcaagtatggcctgtacttcagggacggccggcgcaaggtggactacatcctggtgtaccatcacaagaggccctcgggcaaccggaccctggtcaggagggtgcagcacagcgacaccccctctggggctcgcagcgtcaagcaggaccaccccctgccgggcaagggggcgtcgctggatgcaggctcgggggagcccccgatggactaccacgaggatgacaagcgcttccgcagggaggagtacgagggcaacctcctggaggcgggcctggagctggagcgggacgaggacactaaaatccacggagtcgggtttgtgaaaatccatgccccctggaacgtgctgtgcagagaggccgagtttctgaaactgaagatgccgacgaagaagatgtaccacattaatgagacccgtggcctcctgaaaaaaatcaactctgtgctccagaaaatcacagatcccatccagcccaaagtggctgagcacaggccccagaccatgaagagactctcctatcccttctcccgggagaagcagcatctatttgacttgtctgataaggattcctttttcgacagcaaaacccggagcacgattgtctatgagatcttgaagagaacgacgtgtacaaaggccaagtacagcatgggcatcacgagcctgctggccaatggtgtgtacgcggctgcatacccactgcacgatggagactacaacggtgaaaacgtcgagttcaacgacagaaaactcctgtacgaagagtgggcacgctatggagttttctataagtaccagcccatcgacctggtcaggaagtattttggggagaagatcggcctgtacttcgcctggctgggcgtgtacacccagatgctcatccctgcctccatcgtgggaatcattgtcttcctgtacggatgcgccaccatggatgaaaacatccccagcatggagatgtgtgaccagagacacaatatcaccatgtgcccgctttgcgacaagacctgcagctactggaagatgagctcagcctgcgccacggcccgcgccagccacctcttcgacaaccccgccacggtcttcttctctgtcttcatggccctctgggctgccaccttcatggagcactggaagcggaaacagatgcgactcaactaccgctgggacctcacgggctttgaagaggaagaggatcatcctagagctgaatacgaagccagagtcttggagaagtctctgaagaaagagtccagaaacaaagagactgacaaagtgaagctgacatggagagatcggttcccagcctacctcactaacttggtctccatcatcttcatgattgcagtgacgtttgccatcgtcctcggcgtcatcatctacagaatctccatggccgccgccttggccatgaactcctccccctccgtgcggtccaacatccgggtcacagtcacagccaccgcagtcatcatcaacctagtggtcatcatcctcctggacgaggtgtatggctgcatagcccgatggctcaccaagatcgaggtcccaaagacggagaaaagctttgaggagaggctgatcttcaaggctttcctgctgaagtttgtgaattcctacacccccatcttttacgtggcgttcttcaaaggccggtttgttggacgcccgggcgactacgtgtacattttccgttccttccgaatggaagagtgtgcgccagggggctgcctgatggagctatgcatccagctcagcatcatcatgctggggaaacagctgatccagaacaacctgttcgagatcggcatcccgaagatgaagaagctcatccgctacctgaagctgaagcagcagagcccccctgaccacgaggagtgtgtgaagaggaaacagcggtacgaggtggattacaacctggagcccttcgcgggcctcaccccagagtacatggaaatgatcatccagtttggcttcgtcaccctgtttgtcgcctccttccccctggccccactgtttgcgctgctgaacaacatcatcgagatccgcctggacgccaaaaagtttgtcactgagctccgaaggccggtagctgtcagagccaaagacatcggaatctggtacaatatcctcagaggcattgggaagcttgctgtcatcatcaatgccttcgtgatctccttcacgtctgacttcatcccgcgcctggtgtacctctacatgtacagtaagaacgggaccatgcacggcttcgtcaaccacaccctctcctccttcaacgtcagtgacttccagaacggcacggcccccaatgaccccctggacctgggctacgaggtgcagatctgcaggtataaagactaccgagagccgccgtggtcggaaaacaagtacgacatctccaaggacttctgggccgtcctggcagcccggctggcgtttgtcatcgtcttccagaacctggtcatgttcatgagcgactttgtggactgggtcatcccggacatccccaaggacatcagccagcagatccacaaggagaaggtgctcatggtggagctgttcatgcgggaggagcaagacaagcagcagctgctggaaacctggatggagaaggagcggcagaaggacgagccgccgtgcaaccaccacaacaccaaagcctgcccagacagcctcggcagcccagcccccagccatgcctaccacgggggcgtcctgtagctatgccagcggggctgggcaggccagccgggcatcctgaccgatgggcaccctctcccagggcaggcggcttcccgctcccaccagggcccggaatgtcactgttggacaattattttaaaagtgtataaaaccaagtctcataaatgatatgagtgatctaaatttgcagcaatgatactaaacaactctctgaaatttctcaagcaccaagagaaacatcattttagcaaaggccaggaggaaaaatagaaataaatttgtcttgaagatctca

SEQ ID NO: 342329 - protein, 313 aa, Artificial Sequence
  derived and/or modified sequence
MLDAASKAREAPEAAPGWDDPQGEGRRGRGEGLSWAVGPHPDPGVLMQGEVWSGRFSHAVIQFGFVTLFVASFPLAPLFALLNNIIEIRLDAKKFVTELRRPVAVRAKDIGIWYNILRGIGKLAVIINAFVISFTSDFIPRLVYLYMYSKNGTMHGFVNHTLSSFNVSDFQNGTAPNDPLDLGYEVQICRYKDYREPPWSENKYDISKDFWAVLAARLAFVIVFQNLVMFMSDFVDWVIPDIPKDISQQIHKEKVLMVELFMREEQDKQQLLETWMEKERQKDEPPCNHHNTKACPDSLGSPAPSHAYHGGVL

SEQ ID NO: 342330 - protein, 642 aa, Artificial Sequence
  derived and/or modified sequence
MLTRPSQVLLNSLSVDPDAECKYGLYFRDGRRKVDYILVYHHKRPSGNRTLVRRVQHSDTPSGARSVKQDHPLPGKGASLDAGSGEPPMDYHEDDKRFRREEYEGNLLEAGLELERDEDTKIHGVGFVKIHAPWNVLCREAEFLKLKMPTKKMYHINETRGLLKKINSVLQKITDPIQPKVAEHRPQTMKRLSYPFSREKQHLFDLSDKDSFFDSKTRSTIVYEILKRTTCTKAKYSMGITSLLANGVYAAAYPLHDGDYNGENVEFNDRKLLYEEWARYGVFYKYQPIDLVRKYFGEKIGLYFAWLGVYTQMLIPASIVGIIVFLYGCATMDENIPSMEMCDQRHNITMCPLCDKTCSYWKMSSACATARASHLFDNPATVFFSVFMALWAATFMEHWKRKQMRLNYRWDLTGFEEEEDHPRAEYEARVLEKSLKKESRNKETDKVKLTWRDRFPAYLTNLVSIIFMIAVTFAIVLGVIIYRISMAAALAMNSSPSVRSNIRVTVTATAVIINLVVIILLDEVYGCIARWLTKIEVPKTEKSFEERLIFKAFLLKFVNSYTPIFYVAFFKGRFVGRPGDYVYIFRSFRMEEVTEILFISGSPFCLAYDLSTPCTWEKQLQHICSAKSSRFLSFLLETFLFP

SEQ ID NO: 342331 - DNA, 1929 bp, Artificial Sequence
  derived and/or modified sequence
atgctgactcgcccgtcccaggtcctccttaacagcctgtcagttgatcctgacgcagaatgcaagtacggcctgtatttccgcgacgggagacgaaaagtggactacattttggtgtaccaccacaaacggcctagcgggaataggactcttgtcagacgtgtgcagcacagtgacacccccagtggggccagaagtgtgaaacaggaccatcctttaccagggaaaggagcctcgttggatgcgggttccggcgagccgcctatggactatcatgaggatgataagcgcttcaggagagaagagtatgagggaaacctgctggaggccggcttggagctagaacgagacgaggataccaagatccatggcgtcggctttgtgaaaatccatgcaccctggaacgtgctctgccgagaggctgaattccttaaactgaaaatgcccacaaagaagatgtatcacatcaacgagacccgtgggttgctcaagaagattaattccgtcctgcagaagattacagatcctattcaacctaaagtggctgagcacagaccacagactatgaaaagactctcttaccctttcagtagggaaaagcaacacctgttcgatctaagcgacaaggacagctttttcgacagcaaaacccgctctacaattgtttatgagatactgaaaagaaccacctgcactaaggcgaagtactcaatgggcatcacttccctgctcgccaatggtgtgtatgctgccgcttaccctctgcatgacggcgactataacggtgagaatgttgaattcaatgacaggaagctgctgtacgaagaatgggcgaggtacggcgtattttacaagtatcagcctatcgacctggtgcggaagtactttggcgagaagatcggactgtactttgcgtggctgggggtgtacacccagatgctgatccctgcctcaattgttggtattattgtgtttctgtatgggtgtgccactatggatgagaatattccaagcatggagatgtgcgaccaaaggcacaatatcactatgtgtcccctatgcgacaagacatgcagctattggaagatgagttccgcatgcgcaaccgcccgtgcatctcacttgtttgacaatccagccaccgttttcttcagcgtattcatggctctgtgggccgcaacctttatggagcactggaaacggaaacaaatgaggttaaactaccgctgggacctcacaggattcgaggaagaggaagatcacccgagggccgaatatgaagcccgagtgctggagaagtcactcaagaaagagagtcgtaataaggaaactgacaaggttaaattaacgtggagggatcgttttcccgcctacttaaccaaccttgtgagcattatttttatgatcgctgtgactttcgcaatagtccttggggtcattatctaccggataagcatggccgcagctctggccatgaattcttcacccagcgtgcgcagcaacatccgggtgacagtgaccgcaactgcagttattatcaacctggttgtgatcattctgctggacgaggtgtacggatgcattgcaaggtggttgacaaaaatcgaagtacccaagacagaaaagtcatttgaggagcgcctgatctttaaggcctttcttttaaagtttgtaaatagctacaccccaattttttacgtggcatttttcaaaggcagatttgtgggcagacccggggactatgtgtacattttccgcagcttcaggatggaagaggtaaccgaaatcctgttcattagtgggtcaccattctgcttggcctatgacttgagtaccccgtgtacctgggagaaacagctccagcacatatgcagtgccaaaagctcccggtttttaagctttttgctggaaacgtttctgttcccatag

SEQ ID NO: 342332 - DNA, 1929 bp, Artificial Sequence
  derived and/or modified sequence
atgctgacccggcccagccaggtgctgctgaacagcctgtctgtggaccctgatgctgagtgcaagtatggcctgtacttcagagatggaagaaggaaggtggactacatcctggtgtaccaccacaagaggcccagcggcaacagaaccctggtgagaagagtgcagcacagcgacacccccagcggggcccggtctgtgaagcaggaccaccccctgcccgggaagggggccagcctggatgctggcagcggggagccccccatggactaccatgaagatgacaagcgcttcagaagagaggagtatgagggcaacctgctggaggccggcctggagctggagagagatgaggacaccaagatccatggagtgggctttgtgaagatccacgccccctggaatgtgctgtgccgggaggccgagttcctgaagctgaagatgcccaccaagaagatgtaccacatcaatgagacccggggcctgctgaagaagatcaacagcgtgctgcagaagatcacagaccccatccagcccaaggtggccgagcaccggccccagaccatgaagaggctgagctaccccttcagccgggagaagcagcacctgtttgacctgagtgacaaggacagcttctttgacagcaagaccaggagcaccatcgtgtatgagatcctgaagaggaccacctgcaccaaggccaagtacagcatgggcatcaccagcctgctggccaacggggtgtatgctgctgcctaccccctgcatgatggagactacaatggagaaaatgtggagttcaatgacaggaagctgctgtatgaggagtgggcccgctatggagtcttctacaagtaccagcccatcgacctggtgaggaagtactttggagagaagattggcctgtactttgcctggctgggcgtgtacacccagatgctgatcccagccagcatcgtgggcatcatcgtgttcctgtatggctgtgccaccatggatgagaacatccccagcatggagatgtgtgaccagaggcacaacatcaccatgtgccccctgtgtgacaagacctgcagctactggaagatgagcagcgcctgtgccacagcccgggccagccacctgtttgacaacccagccaccgtcttcttctctgtgttcatggccctgtgggccgccaccttcatggagcactggaagaggaagcagatgaggctgaactaccgctgggacctgactggatttgaggaggaggaggaccaccccagggcagaatatgaggcccgggtgctggagaagagcctgaagaaggagagcaggaacaaggagacagacaaggtgaagctgacctggagggaccgcttccctgcctacctgaccaacctggtgtccatcatcttcatgattgctgtgacctttgccatcgtgctgggcgtcatcatctaccgcatctccatggccgccgccctggccatgaacagcagccccagcgtgcgcagcaacatccgggtgacagtgacagccacagctgtgatcatcaacctggtggtgatcatcctgctggatgaggtgtatggctgcatcgcccgctggctgaccaagattgaggtgcccaagacagagaagagctttgaggagcggctcatcttcaaggccttcctgctgaagtttgtgaacagctacacccccatcttctacgtggccttcttcaagggccgctttgtgggccggcctggggactatgtgtacatcttccgctccttcaggatggaggaggtgacagagatcctcttcatcagcggcagccccttctgcctggcctatgacctgagcaccccctgcacctgggagaagcagctgcagcacatctgcagcgccaagagcagccgcttcctgtccttcctgctggagaccttcctgttcccctag

SEQ ID NO: 342333 - DNA, 1929 bp, Artificial Sequence
  derived and/or modified sequence
atgctgacccggcccagccaggtgctgctgaacagcctgagcgtggaccccgatgctgagtgtaagtatggcctctacttccgtgacggacgacggaaggtggactacatcctcgtgtaccatcacaagaggccttcaggcaatcggacccttgtgcgtcgggttcagcactctgataccccatcaggggcccgtagtgtgaagcaagaccaccccctgcctggaaaaggcgcatcactggacgccggctcgggcgaacctcccatggattaccacgaagacgataagagatttcgcagagaggagtacgaaggcaatctgctggaggcaggtctggagctagaacgagacgaggataccaagatacacggagtcgggtttgttaaaatccatgcaccatggaacgtgctgtgtcgagaagcggaattcctgaaactgaaaatgcccaccaagaaaatgtatcacatcaatgagacccggggccttctgaaaaagatcaactcagtccttcagaagattacggatcccatacagcctaaggtggccgagcacaggccccagacaatgaaacgattgagttatccattttctagggaaaagcaacacctgtttgacttgagcgataaggacagcttcttcgatagcaaaacaagatcaactatcgtgtatgagatcctaaagaggactacttgcacaaaagccaaatatagtatggggattacctctctcctcgctaacggcgtatacgcggccgcttacccactgcacgacggtgactacaacggggaaaatgtggaattcaatgaccgcaaactgctctacgaagaatgggctcgttacggagttttttataagtaccagccgattgatctcgtcagaaagtacttcggcgagaagattggcttatattttgcatggctgggcgtgtatacacagatgctcatccccgccagcatcgtgggtattatcgtgttcctgtatggatgcgctactatggatgaaaacattccatccatggagatgtgtgatcagcgccataatatcactatgtgtcctctgtgcgacaaaacatgcagctattggaaaatgagtagcgcttgtgcgacagccagggcctcgcacctcttcgacaaccctgccacggttttcttctccgtcttcatggccttatgggccgcgacattcatggagcattggaagcgcaaacaaatgcgcctgaattatcgatgggacttgaccgggttcgaggaggaggaggaccaccccagagccgagtacgaggcgagggttcttgagaagagcttgaagaaggagtcaagaaacaaggaaacagataaagtgaaactaacctggcgagatagatttcctgcatacctcacaaatctagtttccattatttttatgattgctgtgactttcgctatcgtgttaggggtgataatctatagaatttctatggcggcggcactggccatgaactcttcgccatcggtgcgaagtaacatccgcgttactgtgactgcaacggctgtcattatcaatctggtagtcattatcctactggacgaagtttatgggtgcattgccagatggctaaccaaaatcgaggttccaaagacagagaaatctttcgaggagagactaatttttaaagctttcctcctaaagttcgtgaacagttacacaccgatattctatgtagccttctttaaaggtcgattcgtgggacgccctggcgattacgtgtacatttttcggagttttaggatggaagaagtcaccgagatcctgtttatcagcggctcccctttctgtttggcgtacgacctctcaacaccctgcacctgggagaagcaactgcagcacatatgctccgctaagagctctcgcttcttgtcttttctgctggaaacgtttctattcccttag

SEQ ID NO: 342334 - DNA, 2118 bp, Artificial Sequence
  derived and/or modified sequence
acgcacactgagtccaggtcctcctgaaggtcaccagcacagcggggccctgtgttactgtagagagaagtcagttgcttagtttcagcctcctgccggcaccagatgctgaccaggccctcccaggtgctgctgaactccttatctgtggaccctgatgccgagtgcaagtatggcctgtacttcagggacggccggcgcaaggtggactacatcctggtgtaccatcacaagaggccctcgggcaaccggaccctggtcaggagggtgcagcacagcgacaccccctctggggctcgcagcgtcaagcaggaccaccccctgccgggcaagggggcgtcgctggatgcaggctcgggggagcccccgatggactaccacgaggatgacaagcgcttccgcagggaggagtacgagggcaacctcctggaggcgggcctggagctggagcgggacgaggacactaaaatccacggagtcgggtttgtgaaaatccatgccccctggaacgtgctgtgcagagaggccgagtttctgaaactgaagatgccgacgaagaagatgtaccacattaatgagacccgtggcctcctgaaaaaaatcaactctgtgctccagaaaatcacagatcccatccagcccaaagtggctgagcacaggccccagaccatgaagagactctcctatcccttctcccgggagaagcagcatctatttgacttgtctgataaggattcctttttcgacagcaaaacccggagcacgattgtctatgagatcttgaagagaacgacgtgtacaaaggccaagtacagcatgggcatcacgagcctgctggccaatggtgtgtacgcggctgcatacccactgcacgatggagactacaacggtgaaaacgtcgagttcaacgacagaaaactcctgtacgaagagtgggcacgctatggagttttctataagtaccagcccatcgacctggtcaggaagtattttggggagaagatcggcctgtacttcgcctggctgggcgtgtacacccagatgctcatccctgcctccatcgtgggaatcattgtcttcctgtacggatgcgccaccatggatgaaaacatccccagcatggagatgtgtgaccagagacacaatatcaccatgtgcccgctttgcgacaagacctgcagctactggaagatgagctcagcctgcgccacggcccgcgccagccacctcttcgacaaccccgccacggtcttcttctctgtcttcatggccctctgggctgccaccttcatggagcactggaagcggaaacagatgcgactcaactaccgctgggacctcacgggctttgaagaggaagaggatcatcctagagctgaatacgaagccagagtcttggagaagtctctgaagaaagagtccagaaacaaagagactgacaaagtgaagctgacatggagagatcggttcccagcctacctcactaacttggtctccatcatcttcatgattgcagtgacgtttgccatcgtcctcggcgtcatcatctacagaatctccatggccgccgccttggccatgaactcctccccctccgtgcggtccaacatccgggtcacagtcacagccaccgcagtcatcatcaacctagtggtcatcatcctcctggacgaggtgtatggctgcatagcccgatggctcaccaagatcgaggtcccaaagacggagaaaagctttgaggagaggctgatcttcaaggctttcctgctgaagtttgtgaattcctacacccccatcttttacgtggcgttcttcaaaggccggtttgttggacgcccgggcgactacgtgtacattttccgttccttccgaatggaagaggtaaccgaaattttattcatctctggcagccccttctgtcttgcttacgatttgtctacaccatgcacttgggagaagcagctgcagcacatttgttcagcaaagagcagcaggtttctttccttcttgctggaaacttttctgttcccctgatgtggtggggtgggctttaatcttatctggtgtgttcatatagaatcacctagaaggataaagtcgctgtagagttaatgaaag

SEQ ID NO: 342335 - DNA, 1929 bp, Artificial Sequence
  derived and/or modified sequence
atgctgacacgcccttcccaggtgctattgaactcgctgtccgtggatcccgacgccgagtgtaagtatggtttgtactttagagatgggaggaggaaggtcgattatattcttgtgtatcaccacaaaaggccctctgggaatcgcacgctcgtgcgcagggtgcaacactctgacactccatctggggcacgcagcgttaagcaggatcaccccttaccgggtaagggtgcctcactggacgctgggtctggagagccgccaatggattatcacgaggacgataaacggttccgcagggaggaatatgagggcaaccttctcgaggctggtttggagcttgagagggatgaggacactaaaatccacggcgtcggctttgtcaaaatccatgcgccttggaatgtgttgtgtcgggaggctgagttcctaaaactgaaaatgccgaccaagaagatgtatcacatcaacgagacacgtggactgctgaaaaagattaattctgtcctgcagaaaattactgaccctattcagccaaaggtggctgaacaccgcccacaaactatgaagagactgtcttacccattttcccgcgaaaagcagcacttgtttgacttgtctgacaaggattcattctttgattccaaaacgagatccacgatcgtgtacgaaatcctgaaacgaactacctgtacgaaagccaaatattctatggggatcacaagcttactcgctaacggcgtgtatgcagccgcatacccactgcacgatggagattacaacggggagaatgtggaatttaacgataggaagttgctctacgaggaatgggcccgatacggagtgttctacaaatatcagccaattgatctggtccgcaaatactttggtgagaagatcggattgtacttcgcatggttgggagtatacactcagatgcttattcccgcatccattgtaggcataatcgtgtttctctacggatgcgcgaccatggatgagaacattccttccatggagatgtgcgaccaacgccataatatcaccatgtgtcctctgtgcgacaaaacatgctcctactggaaaatgtcgagtgcctgtgccactgcgagggcttcccacttattcgacaacccggcaactgtcttcttcagcgtgttcatggccctgtgggcagccacatttatggaacactggaaacgcaaacagatgagactaaattaccgatgggacttgaccggtttcgaggaagaggaggatcaccctcgtgcagagtatgaagctagagttctggaaaaaagcctcaagaaggaaagccgcaataaagagactgacaaggtgaagctgacatggcgcgatagatttccagcatatctgactaacctggtctccatcatcttcatgatcgccgtgacttttgccatagtattgggcgtcatcatctacagaatctcgatggctgcagccctggccatgaacagctctccttcagtgcggtcaaacatccgtgttacagtgacagcgacagctgtgatcattaatctagtcgtcataatcctgctcgacgaagtgtacgggtgcatagccaggtggctgaccaagattgaggtgcccaaaaccgaaaaaagcttcgaggaacgcctgatcttcaaagccttccttcttaagtttgtcaattcttatacccctattttctatgtggcgtttttcaaaggccgattcgttggaagacccggagactacgtctacatattccgcagctttaggatggaggaagtgacagagatccttttcattagtgggagccctttctgtttagcctacgacttatccactccatgcacgtgggaaaaacagttgcagcatatctgttccgcgaagtcttcaagatttttgagcttcctcctcgagacttttctgtttccctag

SEQ ID NO: 342336 - DNA, 1929 bp, Artificial Sequence
  derived and/or modified sequence
atgctgaccagacccagccaggtgctgctgaacagcctgagcgtggaccccgacgccgagtgcaagtacggcctgtacttcagagacggcagaagaaaggtggactacatcctggtgtaccaccacaagagacccagcggcaacagaaccctggtgagaagagtgcagcacagcgacacccccagcggcgccagaagcgtgaagcaggaccaccccctgcccggcaagggcgccagcctggacgccggcagcggcgagccccccatggactaccacgaggacgacaagagattcagaagagaggagtacgagggcaacctgctggaggccggcctggagctggagagagacgaggacaccaagatccacggcgtgggcttcgtgaagatccacgccccctggaacgtgctgtgcagagaggccgagttcctgaagctgaagatgcccaccaagaagatgtaccacatcaacgagaccagaggcctgctgaagaagatcaacagcgtgctgcagaagatcaccgaccccatccagcccaaggtggccgagcacagaccccagaccatgaagagactgagctaccccttcagcagagagaagcagcacctgttcgacctgagcgacaaggacagcttcttcgacagcaagaccagaagcaccatcgtgtacgagatcctgaagagaaccacctgcaccaaggccaagtacagcatgggcatcaccagcctgctggccaacggcgtgtacgccgccgcctaccccctgcacgacggcgactacaacggcgagaacgtggagttcaacgacagaaagctgctgtacgaggagtgggccagatacggcgtgttctacaagtaccagcccatcgacctggtgagaaagtacttcggcgagaagatcggcctgtacttcgcctggctgggcgtgtacacccagatgctgatccccgccagcatcgtgggcatcatcgtgttcctgtacggctgcgccaccatggacgagaacatccccagcatggagatgtgcgaccagagacacaacatcaccatgtgccccctgtgcgacaagacctgcagctactggaagatgagcagcgcctgcgccaccgccagagccagccacctgttcgacaaccccgccaccgtgttcttcagcgtgttcatggccctgtgggccgccaccttcatggagcactggaagagaaagcagatgagactgaactacagatgggacctgaccggcttcgaggaggaggaggaccaccccagagccgagtacgaggccagagtgctggagaagagcctgaagaaggagagcagaaacaaggagaccgacaaggtgaagctgacctggagagacagattccccgcctacctgaccaacctggtgagcatcatcttcatgatcgccgtgaccttcgccatcgtgctgggcgtgatcatctacagaatcagcatggccgccgccctggccatgaacagcagccccagcgtgagaagcaacatcagagtgaccgtgaccgccaccgccgtgatcatcaacctggtggtgatcatcctgctggacgaggtgtacggctgcatcgccagatggctgaccaagatcgaggtgcccaagaccgagaagagcttcgaggagagactgatcttcaaggccttcctgctgaagttcgtgaacagctacacccccatcttctacgtggccttcttcaagggcagattcgtgggcagacccggcgactacgtgtacatcttcagaagcttcagaatggaggaggtgaccgagatcctgttcatcagcggcagccccttctgcctggcctacgacctgagcaccccctgcacctgggagaagcagctgcagcacatctgcagcgccaagagcagcagattcctgagcttcctgctggagaccttcctgttcccctag

SEQ ID NO: 342337 - DNA, 27 bp, Artificial Sequence
  derived and/or modified sequence
atgttctggaagttcgacctgcactag

SEQ ID NO: 342338 - DNA, 120 bp, Artificial Sequence
  derived and/or modified sequence
atgttctggaagttcgacctgcacagcagcagccacatcgacaccctgctggagagagaggacgtgaccctgaaggagctgatggacgaggaggacgtgctgcaggagtgcaaggcctag

SEQ ID NO: 342339 - DNA, 27 bp, Artificial Sequence
  derived and/or modified sequence
atgttttggaagtttgaccttcactag

SEQ ID NO: 342340 - DNA, 120 bp, Artificial Sequence
  derived and/or modified sequence
atgttctggaagttcgatctgcattcctccagccatatcgataccctcttggaacgtgaagatgtcacacttaaagaactgatggatgaggaagatgtattacaggagtgcaaagcctag

SEQ ID NO: 342341 - DNA, 27 bp, Artificial Sequence
  derived and/or modified sequence
atgttctggaagtttgacctgcactag

SEQ ID NO: 342342 - DNA, 120 bp, Artificial Sequence
  derived and/or modified sequence
atgttctggaagtttgacctgcacagcagcagccacatcgacaccctgctggagcgggaggatgtgaccctgaaggagctgatggatgaagaagatgtgctgcaggagtgcaaggcctag

SEQ ID NO: 342343 - DNA, 120 bp, Artificial Sequence
  derived and/or modified sequence
atgttctggaagttcgacctgcacagcagcagccacatcgacaccctcctagaacgcgaagatgtcactttgaaagaactgatggatgaggaagacgtgttgcaggaatgcaaagcttag

SEQ ID NO: 342344 - DNA, 27 bp, Artificial Sequence
  derived and/or modified sequence
atgttctggaagttcgatctccattag

SEQ ID NO: 342345 - DNA, 120 bp, Artificial Sequence
  derived and/or modified sequence
atgttttggaaatttgacttgcactcctcaagccacattgacacactcctagagcgggaggacgtgactctgaaggaactgatggatgaggaggacgtgcttcaagagtgcaaagcttag

SEQ ID NO: 342346 - protein, 75 aa, Artificial Sequence
  derived and/or modified sequence
MFWKFDLHSSSHIDTLLEREDVTLKELMDEEDVLQECKAQNRKLIEFLLKAECLEDLVSFIIEEPPQDMDEKIRY

SEQ ID NO: 342347 - protein, 39 aa, Artificial Sequence
  derived and/or modified sequence
MFWKFDLHSSSHIDTLLEREDVTLKELMDEEDVLQECKA

SEQ ID NO: 342348 - protein, 248 aa, Artificial Sequence
  derived and/or modified sequence
MNDRLGEDESLLMKLYSFLLNDSPLNPLLASFFSKVLSILISRKPEQIVDFLKKKHDFVDLIIKHIGTSAIMDLLLRLLTCIEPPQPRQDVLNWLNEEKIIQRLVEIVHPSQEEDRHSNASQSLCEIVRLSRDQMLQIQNSTEPDLLLASGLPDLNGVGPRGLLVDNMLWSRLVVSFASHGQGLAPLVAHVASVVWTWWLLHPTVASVVWTWWLLHPTQGNSVLLHPTDCWERASGTFLWGIILFCLS

SEQ ID NO: 342349 - protein, 172 aa, Artificial Sequence
  derived and/or modified sequence
MIYSCCIFVYCMFECFKIKNSVNYHLLFTLVLFSLIVTTVYLKVKEPIFHQVMYGMLVFTLVLRSIYIVTWVYPWLRGLGYTSLGIFLLGFLFWNIDNIFCESLRNFRKKVPPIIGITTQFHAWWHILTGLGSYLHILFSLYTRTLYLRYRPKVKFLFGIWPVILFEPLRKH

SEQ ID NO: 342350 - protein, 134 aa, Artificial Sequence
  derived and/or modified sequence
MAQSRLIGTSTSQVMYGMLVFTLVLRSIYIVTWVYPWLRGLGYTSLGIFLLGFLFWNIDNIFCESLRNFRKKVPPIIGITTQFHAWWHILTGLGSYLHILFSLYTRTLYLRYRPKVKFLFGIWPVILFEPLRKH

SEQ ID NO: 342351 - DNA, 678 bp, Artificial Sequence
  derived and/or modified sequence
atgatcatcccccccatgttcggcgccgtgcagagcgtgagagacggcctggagaagagatacatcgccagctacctggccctgaccgtggtgggcatgggcagctggtgcttccacatgaccctgaagtacgagatgcagctgctggacgagctgcccatgatctacagctgctgcatcttcgtgtactgcatgttcgagtgcttcaagatcaagaacagcgtgaactaccacctgctgttcaccctggtgctgttcagcctgatcgtgaccaccgtgtacctgaaggtgaaggagcccatcttccaccaggtgatgtacggcatgctggtgttcaccctggtgctgagaagcatctacatcgtgacctgggtgtacccctggctgagaggcctgggctacaccagcctgggcatcttcctgctgggcttcctgttctggaacatcgacaacatcttctgcgagagcctgagaaacttcagaaagaaggtgccccccatcatcggcatcaccacccagttccacgcctggtggcacatcctgaccggcctgggcagctacctgcacatcctgttcagcctgtacaccagaaccctgtacctgagatacagacccaaggtgaagttcctgttcggcatctggcccgtgatcctgttcgagcccctgagaaagcactag

SEQ ID NO: 342352 - DNA, 678 bp, Artificial Sequence
  derived and/or modified sequence
atgatcatccctcccatgttcggagccgttcaaagtgtgcgggatgggcttgagaagcgctacatcgcgtcctatttggctctgactgtagtgggaatgggatcttggtgcttccacatgacactgaaatatgaaatgcagcttctcgatgagctgcccatgatatactcgtgctgtatctttgtgtactgtatgttcgagtgctttaagatcaagaattcggtaaactaccacctgctctttaccctggtgttgttttccctgattgttacaaccgtttatctcaaagtcaaagagccgattttccatcaggtgatgtacggcatgctggtgttcacgctggtcctccgcagtatctacatagtgacatgggtttacccctggctcagagggttaggatacacatccttaggaatttttctgctgggtttcttattctggaacattgacaatattttctgcgagtctttgagaaattttcgcaaaaaggttccaccaatcatcggcatcactacacagttccatgcctggtggcacatcttgaccgggttgggcagttacctgcacatcctgttcagtctgtatacccgaacactgtatctccggtatagacccaaagtgaagttcctctttggtatctggcctgtcatcctttttgaacccctccggaagcactag

SEQ ID NO: 342353 - DNA, 678 bp, Artificial Sequence
  derived and/or modified sequence
atgatcatcccccccatgtttggagctgtgcagagcgtgagagatggcctggagaagcgctacatcgccagctacctggccctgactgtggtgggcatgggctcctggtgcttccacatgaccctgaagtatgagatgcagctgctggatgagctgcccatgatctacagctgctgcatctttgtgtactgcatgtttgagtgcttcaagatcaagaacagcgtgaactaccacctgctcttcaccctggtgctcttcagcctgattgtgaccaccgtgtacctgaaggtgaaggagcccatcttccaccaggtgatgtatggcatgctggtgttcaccctggtgctgcggagcatctacatcgtgacctgggtgtacccctggctgcggggcctgggctacaccagcctgggcatcttcctgctgggcttcctgttctggaacatcgacaacatcttctgtgagagcctgaggaacttcaggaagaaggtgccccccatcatcggcatcaccacccagttccacgcctggtggcacatcctgaccggcctgggcagctacctgcacatcctcttcagcctgtacaccaggaccctgtacctgcgctaccggcccaaggtgaagttcctgtttggcatctggcctgtgatcctgtttgagcccctgaggaagcactag

SEQ ID NO: 342354 - DNA, 678 bp, Artificial Sequence
  derived and/or modified sequence
atgatcatcccccccatgttcggcgccgtgcagagcgtgcgggacggcctcgaaaagaggtatatcgcttcatatctagccttgactgtggtgggtatgggttcctggtgctttcacatgacattaaaatacgagatgcagctcctagacgagttgccgatgatttatagttgctgtatatttgtgtattgtatgttcgaatgcttcaaaatcaagaacagtgtcaattaccacctccttttcaccctggttctcttcagtctgatcgtgactacggtctatctgaaggtaaaagagccgatcttccatcaggtaatgtacgggatgttggtgtttaccctggtcctacgcagtatctacattgtgacatgggtatacccgtggctcagaggacttggctacacttcactcgggatttttttgctcggcttcctgttctggaacatcgacaatatcttctgcgagagcctcaggaatttccgtaagaaagtgccacctattattggaattactacccagttccacgcatggtggcatatactgaccggtctcggatcctacctgcacattctgtttagcttgtacaccagaactttgtatctgagataccggccgaaagtgaagtttctgttcggtatttggccagtaatcttatttgagccgctccgaaaacactag

SEQ ID NO: 342355 - DNA, 678 bp, Artificial Sequence
  derived and/or modified sequence
atgatcattccgcctatgtttggtgcagttcagagcgtccgggacggcctagaaaagcgttatatcgctagttatcttgccctcactgtggtgggtatgggcagctggtgcttccacatgaccctgaagtacgagatgcagttacttgatgagctgcccatgatctactcctgttgcatctttgtctactgtatgtttgagtgctttaagataaagaattctgtcaactaccacctgctcttcacgctggttttgttcagcctgattgtcaccactgtatacctcaaggtgaaagagcctattttccatcaggtgatgtacggaatgctcgtgttcacattggtgctgcgcagcatctacatagtgacctgggtgtatccatggctgcgcggtctgggctacacttctttggggattttcctgcttggatttctcttctggaatatagataatatcttctgtgagtctctgcggaacttcagaaagaaagtgccaccaataattgggattactactcagttccacgcctggtggcacattctcactgggctgggttcttaccttcacatcttgtttagcttgtatacacggacgctgtacctgaggtaccggccaaaagttaaattcttatttgggatctggccggtcatcctgttcgagccccttcgtaagcattag

SEQ ID NO: 342356 - DNA, 159 bp, Artificial Sequence
  derived and/or modified sequence
atgaagctgtgtgtgacagtgctgagcctgctggtgctggtggccgccttctgcagcctggccctgagcgcccccagcaacaagcccctggaggccagcaagagcgccctgacccctgtgtccccaggcagccgcagcacctgcatgacctggaactag

SEQ ID NO: 342357 - protein, 499 aa, Artificial Sequence
  derived and/or modified sequence
MFGDASTSLVVPEKVKTPMKSSKTDLQGSASPSKVEGVHTPRQKRSTPLKERQLSKPLSERTNSSDSERSPDLGHSTQIPRKVVYDQLNQILVSDAALPENVILVNTTDWQGQYVAELLQDQRKPVVCTCSTVEVQAVLSALLTRIQRYCNCNSSMPRPVKVAAVGGQSYLSSILRFFVKSLANKTSDWLGYMRFLIIPLGSHPVAKYLGSVDSKYSSSFLDSGWRDLFSRSEPPVSEQLDVAGRVMQYVNGAATTHQLPVAEAMLTCRHKFPDEDSYQKFIPFIGVVKVGLVEDSPSTAGDGDDSPVVSLTVPSTSPPSSSGLSRDATATPPSSPSMSSALAIVGSPNSPYGDVIGLQVDYWLGHPGERRREGDKRDASSKNTLKSVFRSVQVSRLPHSGEAQLSGTMAMTVVTKEKNKKVPTIFLSKKPREKEVDSKSQVIEGISRLICSAKQQQTMLRVSIDGVEWSDIKFFQLAAQWPTHVKHFPVGLFSGSKAT

SEQ ID NO: 342358 - DNA, 276 bp, Artificial Sequence
  derived and/or modified sequence
atggccatgaccgtggtgaccaaggagaagaacaagaaggtgcccaccatcttcctgagcaagaagcccagagagaaggaggtggacagcaagagccaggtgatcgagggcatcagcagactgatctgcagcgccaagcagcagcagaccatgctgagagtgagcatcgacggcgtggagtggagcgacatcaagttcttccagctggccgcccagtggcccacccacgtgaagcacttccccgtgggcctgttcagcggcagcaaggccacctag

SEQ ID NO: 342359 - DNA, 1500 bp, Artificial Sequence
  derived and/or modified sequence
atgttcggcgacgccagcaccagcctggtggtgcccgagaaggtgaagacccccatgaagagcagcaagaccgacctgcagggcagcgccagccccagcaaggtggagggcgtgcacacccccagacagaagagaagcacccccctgaaggagagacagctgagcaagcccctgagcgagagaaccaacagcagcgacagcgagagaagccccgacctgggccacagcacccagatccccagaaaggtggtgtacgaccagctgaaccagatcctggtgagcgacgccgccctgcccgagaacgtgatcctggtgaacaccaccgactggcagggccagtacgtggccgagctgctgcaggaccagagaaagcccgtggtgtgcacctgcagcaccgtggaggtgcaggccgtgctgagcgccctgctgaccagaatccagagatactgcaactgcaacagcagcatgcccagacccgtgaaggtggccgccgtgggcggccagagctacctgagcagcatcctgagattcttcgtgaagagcctggccaacaagaccagcgactggctgggctacatgagattcctgatcatccccctgggcagccaccccgtggccaagtacctgggcagcgtggacagcaagtacagcagcagcttcctggacagcggctggagagacctgttcagcagaagcgagccccccgtgagcgagcagctggacgtggccggcagagtgatgcagtacgtgaacggcgccgccaccacccaccagctgcccgtggccgaggccatgctgacctgcagacacaagttccccgacgaggacagctaccagaagttcatccccttcatcggcgtggtgaaggtgggcctggtggaggacagccccagcaccgccggcgacggcgacgacagccccgtggtgagcctgaccgtgcccagcaccagcccccccagcagcagcggcctgagcagagacgccaccgccaccccccccagcagccccagcatgagcagcgccctggccatcgtgggcagccccaacagcccctacggcgacgtgatcggcctgcaggtggactactggctgggccaccccggcgagagaagaagagagggcgacaagagagacgccagcagcaagaacaccctgaagagcgtgttcagaagcgtgcaggtgagcagactgccccacagcggcgaggcccagctgagcggcaccatggccatgaccgtggtgaccaaggagaagaacaagaaggtgcccaccatcttcctgagcaagaagcccagagagaaggaggtggacagcaagagccaggtgatcgagggcatcagcagactgatctgcagcgccaagcagcagcagaccatgctgagagtgagcatcgacggcgtggagtggagcgacatcaagttcttccagctggccgcccagtggcccacccacgtgaagcacttccccgtgggcctgttcagcggcagcaaggccacctag

SEQ ID NO: 342360 - DNA, 276 bp, Artificial Sequence
  derived and/or modified sequence
atggcaatgactgtggtgaccaaagaaaaaaacaaaaaggtccccactatcttcctctcaaaaaaacctagagagaaagaggttgattccaaaagccaggttatcgagggcatcagtaggctgatctgtagtgccaagcaacaacagacaatgctgagagtctctatcgacggggtggagtggagtgatataaagttcttccaactggccgcccagtggcccactcacgtgaaacattttcccgtggggcttttttcaggctcaaaagctacatag

SEQ ID NO: 342361 - DNA, 1500 bp, Artificial Sequence
  derived and/or modified sequence
atgtttggagacgcttccacaagtcttgtggtgcccgagaaggtgaaaacacccatgaagtcctcaaaaacggatctccaagggagtgccagcccgagcaaagttgaaggcgtccatacaccacggcaaaaacgctccacccctctgaaagagcggcagcttagtaagcctctcagcgaaaggacaaattcaagtgattctgaacgttcaccagatcttggtcattcaacccagataccccgcaaggtagtgtatgatcaactgaatcagattctggtctccgacgcagccttacccgaaaatgtcattctagttaatactacggattggcaaggacagtacgtggcagagttgctacaagatcaacgtaagcccgtggtttgcacttgtagcaccgtggaggtacaggcggtcctcagcgccctcttgacacgcattcagcggtactgcaactgtaatagcagtatgccccgaccagtgaaagtagcagctgtgggcggtcagagctacctctcttctatactccgattctttgttaaatcactggccaacaaaacgagcgactggctgggctatatgaggttcctgattattcccctggggagccatcccgtcgctaagtacctggggtccgtggatagtaaatacagcagctcattcttagattccgggtggcgcgatcttttctcgcgttctgagcctccagtgtccgaacaactagatgtcgctgggagggtcatgcaatacgttaatggagccgctactacacaccaactgcctgtggccgaagccatgcttacctgcagacataaattcccggatgaagacagttaccagaaattcattccttttataggcgtggtgaaagtgggcctggtggaggatagtccgtcaaccgctggcgatggcgatgactctcccgtggtcagcctgacggtacctagtacaagcccgccctcaagctccggtctgtcccgagacgccaccgctactccccccagttcgccaagtatgtcctctgccctcgcaatcgtcgggagccccaacagtccctatggcgacgtgattggtctgcaagtggattactggctgggacatccaggagagcggagacgtgaaggcgacaagcgggatgcctcctctaagaacaccttaaagagcgtgtttcggagtgttcaagtgtctaggctgccgcattccggcgaggcgcagttgagtgggactatggctatgaccgtcgttacgaaagaaaagaacaaaaaggtgcccactatatttctgagtaagaagcctcgagaaaaggaggtcgattctaaatcccaagttattgaagggatttctagacttatctgctcagcaaagcaacagcagaccatgttgcgcgtctccattgacggcgtggaatggagtgacataaaatttttccagctggccgcacaatggcctactcacgtgaaacatttccctgtcgggctgttctctggctcaaaggcaacgtag

SEQ ID NO: 342362 - DNA, 276 bp, Artificial Sequence
  derived and/or modified sequence
atggccatgacagtggtgaccaaggagaagaacaagaaggtgcccaccatcttcctgagcaagaagccccgggagaaggaggtggacagcaagagccaggtgattgagggcatcagccgcctcatctgcagcgccaagcagcagcagaccatgctgcgggtgtccattgatggagtggagtggagcgacatcaagttcttccagctggccgcccagtggcccacccacgtgaagcacttccctgtgggcctcttcagcggcagcaaggccacctag

SEQ ID NO: 342363 - DNA, 1500 bp, Artificial Sequence
  derived and/or modified sequence
atgtttggagatgccagcaccagcctggtggtgcctgagaaggtgaagacccccatgaagagcagcaagacagacctgcagggcagcgccagccccagcaaggtggagggcgtgcacaccccccggcagaagaggagcacccccctgaaggagcggcagctgagcaagcccctgtctgagaggaccaacagcagtgacagcgagaggagcccagacctgggccacagcacccagatccccaggaaggtggtgtatgaccagctgaaccagatcctggtgtctgatgctgccctgcctgaaaatgtcatcctggtgaacaccacagactggcagggccagtatgtggccgagctgctgcaggaccagaggaagcctgtggtgtgcacctgcagcacagtggaggtgcaggccgtgctgagcgccctgctgacccgcatccagcgctactgcaactgcaacagctccatgcccaggcctgtgaaggtggccgctgtgggcggccagagctacctgagcagcatcctgcgcttctttgtgaagagcctggccaacaagaccagtgactggctgggctacatgaggttcctgatcatccccctgggcagccaccctgtggccaagtacctgggctctgtggacagcaagtacagcagcagcttcctggacagcggctggagggacctcttcagccgctctgagccccctgtgtctgagcagctggatgtggccggccgggtgatgcagtatgtgaatggagctgccaccacccaccagctgcctgtggccgaggccatgctgacctgccgccacaagttcccagatgaagattcctaccagaagttcatccccttcatcggcgtggtgaaggtgggcctggtggaggacagccccagcacagctggagatggagatgacagccctgtggtgtccctgactgtgcccagcaccagcccccccagcagcagcggcctgagcagagatgccacagccaccccacccagcagccccagcatgagcagcgccctggccatcgtgggcagccccaacagcccctatggagatgtgattggcctgcaggtggactactggctgggccaccctggagagaggagaagagaaggagacaagagagatgccagcagcaagaacaccctgaagtctgtgttccgctctgtgcaggtgtcccggctgccccacagcggggaggcccagctgagcggcaccatggccatgacagtggtgaccaaggagaagaacaagaaggtgcccaccatcttcctgagcaagaagccccgggagaaggaggtggacagcaagagccaggtgattgagggcatcagccgcctcatctgcagcgccaagcagcagcagaccatgctgcgggtgtccattgatggagtggagtggagcgacatcaagttcttccagctggccgcccagtggcccacccacgtgaagcacttccctgtgggcctcttcagcggcagcaaggccacctag

SEQ ID NO: 342364 - DNA, 276 bp, Artificial Sequence
  derived and/or modified sequence
atggccatgaccgtggtgaccaaggagaagaacaagaaggtgcccacgatctttctgagtaagaagccccgtgaaaaggaggtggatagtaaatcccaggtcatagaaggaatttccaggctgatatgctctgctaagcagcagcagacaatgttgagggtttcaatcgacggcgtggagtggtccgacatcaagttcttccaactagccgctcagtggcctacacacgtgaagcattttcctgtcggccttttcagcggcagtaaggccacttag

SEQ ID NO: 342365 - DNA, 1500 bp, Artificial Sequence
  derived and/or modified sequence
atgttcggcgacgccagcaccagcctggtggtgcccgagaaggtgaaaacacctatgaagagctccaagacagatctccagggctccgcgtccccttccaaggttgagggagttcataccccgaggcaaaagcgcagcacccccttgaaagagagacaactctctaaaccgctatcggagcgaacaaactcttccgattctgaaaggagccccgacctcggtcattctacgcagataccaagaaaagtagtgtatgaccaacttaaccagatcttagtgagcgatgccgctttgcccgaaaatgtgatcctggttaatacaaccgactggcagggtcagtacgtcgccgagctcctgcaggaccagcgcaaacctgttgtttgcacttgctcgacagtcgaggttcaggccgtcctgtctgctctgttaactagaatccagcgttactgcaactgcaacagtagtatgcctagacccgtgaaggtcgctgccgtgggaggccagtcttatctgtcttcaattctgagattctttgtgaaatctttggcaaacaagacatctgactggttagggtacatgaggttcttgatcatccctctgggcagtcaccctgttgctaagtatctgggttccgttgattccaagtactctagttcatttctagattccggctggagagatctgttctcaaggagtgagccacctgtgtccgaacagctggacgtcgccgggagagttatgcagtacgtcaatggcgccgctaccacccatcagctacctgttgcagaggcgatgctgacttgtcgacataaatttccggacgaggatagctatcagaagttcataccttttataggtgtggtaaaagtgggcctggtagaagacagcccgtcgactgcgggtgacggggacgattctccagtggtatccctcactgtgccgagtactagcccaccaagcagttcgggcctgagcagagatgctacagcaacccccccctcctctcctagtatgagttctgccctcgcaatcgtgggttcccccaactcaccttacggcgacgttatcgggctgcaggtggactactggttgggccaccccggagagagacggcgcgagggggataagcgagatgcaagctcaaaaaatacgctcaaatctgtgttccgtagtgtacaggtctctcgcctgccacacagtggtgaggcacagctgtcgggcacaatggccatgacagtcgtgactaaagagaagaataagaaagtcccgacaatattcttgtctaagaagccccgcgaaaaagaggtcgatagtaagtctcaggtcatcgaaggaatctccagactaatatgctctgccaaacaacagcagaccatgctaagggtgagcatcgatggggtggagtggagcgacatcaaattctttcagcttgctgcccagtggcccacacatgttaagcacttcccagttggcttgttctctggatctaaggcgacttag

SEQ ID NO: 342366 - DNA, 276 bp, Artificial Sequence
  derived and/or modified sequence
atggcaatgaccgttgtcaccaaagagaagaataagaaagtacctactatttttctcagtaagaaaccgagagagaaagaagtcgattcaaaatctcaggtaatcgaagggattagtcggttgatctgttccgccaagcagcagcagacaatgctgcgcgtatcaatcgatggagtcgagtggtcagatatcaagttctttcagctcgccgcacaatggcctacgcatgtgaagcacttcccagttggactgttctcgggatctaaggcgacatag

SEQ ID NO: 342367 - DNA, 1500 bp, Artificial Sequence
  derived and/or modified sequence
atgtttggcgatgcctcgacgagccttgtcgttcctgagaaggtaaagacacccatgaaaagctctaagacagacctacagggttcagctagccctagtaaggttgaaggagtccacacacccagacagaaaagatctactcctctgaaagaacgccagctttcaaaacccctttccgaacggaccaactcatccgactcagaacggagccccgacttaggacacagtacacagatccccaggaaagtcgtgtatgatcagctgaaccagatcctggttagcgatgcggcactccccgaaaacgttatcttagtgaatacaacagactggcaaggccagtacgttgccgaactgctgcaggatcagaggaaacctgttgtgtgtacctgcagtacggtggaggtgcaggcggtgctcagtgccctgcttacaagaatccagagatactgcaactgtaatagctccatgcccagaccagttaaagttgcagcggtcggcggtcagtcttacttatccagcattctcaggtttttcgtgaaatcgctcgccaacaagacctcggattggctaggctacatgagatttctcataatacctctcggttctcatcccgtggccaagtatcttggtagcgtggatagcaaatattcttcatccttcctggactccggctggcgggaccttttcagtagaagcgaacctccggtgtccgagcagttggacgtggccggacgtgtgatgcagtacgtgaatggggcagccacgactcatcagctgccagtggctgaagctatgctgacatgtcgccacaagtttcccgacgaagatagctatcaaaagttcattccattcataggtgttgtcaaggtaggtctggtcgaggattcaccttctacagcaggggatggcgacgattcacccgttgtgtcgctgacagtccctagcacgtcccctccatccagcagtggtctgagtagggacgccactgcaaccccaccgtcatctccgtcaatgagttctgcactcgccatagtgggttctccaaactcaccctatggcgacgtgattggcctccaggtcgactactggctggggcaccccggtgaacgacggagagaaggcgataagcgggacgccagttctaagaataccttaaagtccgtgtttaggtctgtccaggtatcgaggttgcctcacagtggggaggcacaactttcggggaccatggcaatgacagtcgttactaaggaaaaaaataaaaaagtacctactattttcctgtcgaagaagcccagggagaaagaggtggactctaaatctcaagtcattgagggaatttccaggttaatttgcagtgccaagcagcagcaaaccatgctaagagtctcgattgacggtgtagaatggagtgacatcaaattctttcagctggcagcccaatggcctacgcatgtgaagcacttcccagtgggcctgttcagcggatctaaggcaacatag

SEQ ID NO: 342368 - DNA, 628 bp, Artificial Sequence
  derived and/or modified sequence
tgcaggtcgggtggcaccagctgctgtcctgaggctgcactggagccgcccgcaggggcttctgccgggctcaggccttctctccagctcgaggctcagtttggcccaggctttgcctgctgggcgtgagccctaatagcccatatggggacgtgattggcctccaggtggactactggctgggccaccccggggagcggaggagggaaggcgacaagagggacgccagctcgaagaacaccctcaagagtgtcttccgctcagtgcaggtgtcccgcctgccccatagtggggaggcccagctttctggcaccatggccatgactgtggtcaccaaagaaaagaacaagaaagttcccaccatcttcctgagcaagaaaccccgagaaaaggaggtggattctaagagccaggtcattgaaggcatcagccgcctcatctgctcagccaagcagcagcagactatgctgagagtgtccatcgatggggtcgagtggagtgacatcaagttcttccagctggcagcccagtggcccacccatgtcaagcactttccagtgggactcttcagtggcagcaaggccacctgaggccctgtctcccagccactttccctcctggcactgcc

SEQ ID NO: 342369 - DNA, 1688 bp, Artificial Sequence
  derived and/or modified sequence
gcgattttccttcggctgaggcaggagctttaggaccacttgctttcaggaaaagaaaatgagtaactctctcttcaggatggtgatggggcctggccagtccaaggaggctcctgggtggtcactgagtgggaggtcatcttcactgtttcctctcctccatggtaggaaatcactgaccaggacatgtttggagatgccagcacgagtctggttgtgccggagaaagtcaaaactcccatgaagtccagtaaaacggatctccagggctctgcctcccccagcaaagtggagggggtgcacacaccccggcagaagaggagcacgcccctgaaggagcggcagctctccaagcccctaagtgagaggaccaacagttccgacagcgagcgctccccagatctgggccacagcacgcagattccaagaaaggtggtgtatgaccagctcaatcagatcctggtgtcagatgcagccctcccagaaaatgtcattctggtgaacaccactgactggcagggccagtatgtggctgagctgctccaggaccagcggaagcctgtggtgtgcacctgctccaccgtggaggtccaggccgtgctgtccgccctgctcacccggatccagcgctactgcaactgcaactcttccatgccgaggccagtgaaggtggctgctgtgggaggccagagctacctgagctccatcctcaggttctttgtcaagtccctggccaacaagacctccgactggcttggctacatgcgcttcctcatcatccccctcggttctcaccctgtggccaaatacttggggtcagtcgacagtaaatacagtagttccttcctggattctggttggagagatctgttcagtcgctcggagccaccagtgtcagagcaactggacgtggcagggcgggtgatgcagtacgtcaacggggcagccacgacacaccagcttcccgtggccgaagccatgctgacttgccggcataagttccctgatgaagactcctatcagaagtttattcccttcattggcgtggtgaaggtgggtctggttgaagactctccctccacagcaggcgatggggacgattctcctgtggtcagccttactgtgccctccacatcaccaccctccagctcgggcctgagccgagacgccacggccacccctccctcctccccatctatgagcagcgccctggccatcgtggggagccctaatagcccatatggggacgtgattggcctccaggtggactactggctgggccaccccggggagcggaggagggaaggcgacaagagggacgccagctcgaagaacaccctcaagagtgtcttccgctcagtgcaggtgtcccgcctgccccatagtggggaggcccagctttctggcaccatggccatgactgtggtcaccaaagaaaagaacaagaaagttcccaccatcttcctgagcaagaaaccccgagaaaaggaggtggattctaagagccaggtcattgaaggcatcagccgcctcatctgctcagccaagcagcagcagactatgctgagagtgtccatcgatggggtcgagtggagtgacatcaagttcttccagctggcagcccagtggcccacccatgtcaagcactttccagtgggactcttcagtggcagcaaggccacctgagg

SEQ ID NO: 342370 - DNA, 219 bp, Artificial Sequence
  derived and/or modified sequence
atggagaagtggaagctgggccggcagatccagcccccctggcccttggcccacgcacggggaagttggatggcgctgccgcgtagcgaacagctgggaaccggtggagaccaggactggcagctccagggacacacaagagcaactgaaaccaaagaaaatttccagaaggagagcatggtgaagtctctgcggatgcagagacgacagggagagtag

SEQ ID NO: 342371 - DNA, 480 bp, Artificial Sequence
  derived and/or modified sequence
atggcactcgtgagaggcggctggctctggcggcagtcaagcatcttaagaaggtggaagcgtaattggttcgcgctctggcttgatgggaccctcggatattatcatgatgaaactgcccaagatgaagaggacagggtgctgatacatttcaatgtacgagatattaaaattggcccagagtgtcacgatgttcaaccacccgaaggcaggagcagggacggactgctcaccgtgaacctgcgcgagggtgggcgactgcatctgtgcgccgagacaaaagacgacgcattagcgtggaagactgccctcctagaagcaaattctacacccatgattagactgaagcttattcatcctcacaacaagtacttactgagttgctacagtgccggagctcccttggccatgggcatgcttgccggtgctgccacgggggccgctctggggagtttgatgtggagcccatgttggttctag

SEQ ID NO: 342372 - DNA, 258 bp, Artificial Sequence
  derived and/or modified sequence
atggccctggtgaggggagggtggttgtggaggcaaagctccattctgcgaaggtggaaacgaaattggtttgctctctggctcgacggcaccctggggtactaccacgatgaaaccgctcaggatgaagaggacagagtactcatacatttcaatgtgagagacatcaagataggacccgagtgccatgatgtgcagcctcccgaagggcggtcacgggatgggttgttgaccgttaacctgagggaggggggctag

SEQ ID NO: 342373 - DNA, 480 bp, Artificial Sequence
  derived and/or modified sequence
atggccctggtgcggggcggctggctgtggaggcagagcagcatcctgcggcgctggaagaggaactggtttgccctgtggctggatggcaccctgggctactaccatgatgaaacagcccaggatgaggaggacagagtgctgatccacttcaacgtgcgggacatcaagattggaccagaatgtcatgatgtgcagcccccagagggccgcagcagagatggcctgctgactgtgaacctgcgggagggcggccgcctgcacctgtgtgccgagaccaaggatgatgccctggcctggaagacagccctgctggaggccaacagcacccccatgatccggctgaagctgatccacccccacaacaagtacctgctgagctgctacagcgctggggcccccctggccatgggcatgctggccggggccgccactggagctgccctgggcagcctgatgtggagcccctgctggttctag

SEQ ID NO: 342374 - DNA, 258 bp, Artificial Sequence
  derived and/or modified sequence
atggccctggtgcggggcggctggctgtggaggcagagcagcatcctgcggcgctggaagaggaactggtttgccctgtggctggatggcaccctgggctactaccatgatgaaacagcccaggatgaggaggacagagtgctgatccacttcaacgtgcgggacatcaagattggaccagaatgtcatgatgtgcagcccccagagggccgcagcagagatggcctgctgactgtgaacctgcgggagggcggctag

SEQ ID NO: 342375 - DNA, 480 bp, Artificial Sequence
  derived and/or modified sequence
atggccctggtgcggggcggctggctgtggcggcagagcagcatcttgcggaggtggaaaaggaattggttcgcactgtggctcgatgggacattgggttattatcacgacgaaactgcacaagacgaagaggaccgggtgctgattcacttcaacgttagagatatcaagatcgggcccgagtgtcatgacgtccaacctcccgagggcagaagtcgagacggcctgcttactgttaacctcagggagggcggcagactgcatttatgcgccgaaactaaagacgatgccctggcttggaaaacggcgctcctggaagcaaactctacacctatgatccggctaaagctgattcatccacacaataagtatctcttaagttgttacagcgccggagcaccgctggcaatggggatgttggcgggtgccgctaccggtgccgccctaggatcgcttatgtggtccccttgttggttctag

SEQ ID NO: 342376 - DNA, 258 bp, Artificial Sequence
  derived and/or modified sequence
atggccctggtgcggggcggctggctgtggcggcagagcagcatcctgagaaggtggaagaggaattggttcgccctctggctggatggcactctagggtactaccacgatgagaccgcacaggacgaggaagaccgagtcctaatccattttaacgttcgggacattaagattggcccagaatgccatgacgttcagccaccagaaggccgttcaagggacggtcttttgacagtgaatctccgcgaaggcggctag

SEQ ID NO: 342377 - DNA, 1164 bp, Artificial Sequence
  derived and/or modified sequence
aaagcgcaggcgcagcgggttgggtggcagcagcatcgagtagcggccgcttaggcagcaacatccgcaacaagtgtagacaaggtcccgcctgactccgctctggaaagtccttttgaagaaatggccctggtgaggggcggctggctgtggagacagagctccatcctccgccgctggaagcggaactggtttgccctgtggctggacgggaccctgggatactaccacgatgagacagcgcaggacgaggaggaccgtgtgctcatccacttcaatgtccgtgacataaagatcggcccagagtgccatgatgtgcagcccccagagggccggagccgagatggcctgctgactgtgaacctacgggaaggcggccgcctgcacctctgtgcggagaccaaggatgatgccctagcatggaagacagcactgctggaggcaaactccaccccgatgataagactgaagctcattcatccgcacaacaaatatttactgagctgctacagcgccggcgcccctctggccatgggcatgcttgcgggagccgccactggggcggcgctgggctcgctcatgtggtcgccctgctggttctgagccctgggactcggagcactgacccctgcgcttggattgctagactcctcttcctcctggaccccatcctctaccatccaagccctgtcccactttggccctatcctctccattagctccttccgggtttggaccattccccccactccctacccttaatccccacatgggaagaagctatcatcacaggtacaaacatcgcttgaagtcttcacatctaccactagacacccccaaaatctgttatagacatttatggatacatttcctctaaacacaacagggcacagcaaatacgacttcatttggcttcgagttccccaggcgctgtagacacaacatgaatcgggctctctgctctctccttagggagctcgagtcctggtggggagaacaggagtaaacaaggacttgacaaagctgaagagttatcagtcctttgacaaggacaggtggggcagggagcaagacaggtaggctggaagaacagttattggcaagtatgcagagccgtgaacgtcatggcatgtccaaggaattaaatgggagttcatttgggct

SEQ ID NO: 342378 - DNA, 534 bp, Artificial Sequence
  derived and/or modified sequence
aaagcgcaggcgcagcgggttgggtggcagcagcatcgagtagcggccgcttaggcagcaacatccgcaacaagtgtagacaaggtgggtgcatcaaggggaggggctggaaaaggagtctgcacctgaccctcttgtctgatctgtgtcaagaccgtggagaggggagggagcggcaagaggaacagacaaggctgggccttccagcccaggtgtgccagcccttgttacgcagcaacaggtcccgcctgactccgctctggaaagtccttttgaagaaatggccctggtgaggggcggctggctgtggagacagagctccatcctccgccgctggaagcggaactggtttgccctgtggctggacgggaccctgggatactaccacgatgagacagcgcaggacgaggaggaccgtgtgctcatccacttcaatgtccgtgacataaagatcggcccagagtgccatgatgtgcagcccccagagggccggagccgagatggcctgctgactgtgaacctacgggaaggcgg

SEQ ID NO: 342379 - DNA, 480 bp, Artificial Sequence
  derived and/or modified sequence
atggccctggtaagaggtgggtggctttggcgtcagagttcgatcctgagacgctggaaacgcaattggtttgctctatggttggacggaacgcttggttactaccacgatgagacagcccaggatgaggaagatagagtgcttatccattttaatgtccgtgatatcaagatcggaccggaatgtcatgacgtccagccgccagagggtaggtctagagatggtctcctgacagttaatctgcgcgaggggggtcgccttcatttgtgcgcagagaccaaggacgacgctttagcctggaaaacagctctgctcgaagcaaacagcacaccaatgatccgcctgaaactgattcacccccacaataagtatctcctgtcatgctattccgctggcgcaccactggcgatgggtatgctagccggagctgccacaggcgctgccctggggtcgctgatgtggtccccttgctggttctag

SEQ ID NO: 342380 - DNA, 258 bp, Artificial Sequence
  derived and/or modified sequence
atggctttggtgagaggcggttggctctggaggcagtcctccatactgcgacgctggaagcgtaattggttcgccttatggttggacggcacattaggctactaccacgacgagactgcacaagacgaggaggacagggtactcatccatttcaatgtaagggatataaaaattggacccgagtgccacgacgtgcaaccccctgagggacggtctcgcgacgggcttttgacagtgaatctccgggagggtggttag

SEQ ID NO: 342381 - DNA, 480 bp, Artificial Sequence
  derived and/or modified sequence
atggccctggtgagaggcggctggctgtggagacagagcagcatcctgagaagatggaagagaaactggttcgccctgtggctggacggcaccctgggctactaccacgacgagaccgcccaggacgaggaggacagagtgctgatccacttcaacgtgagagacatcaagatcggccccgagtgccacgacgtgcagccccccgagggcagaagcagagacggcctgctgaccgtgaacctgagagagggcggcagactgcacctgtgcgccgagaccaaggacgacgccctggcctggaagaccgccctgctggaggccaacagcacccccatgatcagactgaagctgatccacccccacaacaagtacctgctgagctgctacagcgccggcgcccccctggccatgggcatgctggccggcgccgccaccggcgccgccctgggcagcctgatgtggagcccctgctggttctag

SEQ ID NO: 342382 - DNA, 258 bp, Artificial Sequence
  derived and/or modified sequence
atggccctggtgagaggcggctggctgtggagacagagcagcatcctgagaagatggaagagaaactggttcgccctgtggctggacggcaccctgggctactaccacgacgagaccgcccaggacgaggaggacagagtgctgatccacttcaacgtgagagacatcaagatcggccccgagtgccacgacgtgcagccccccgagggcagaagcagagacggcctgctgaccgtgaacctgagagagggcggctag

SEQ ID NO: 342383 - DNA, 1113 bp, Artificial Sequence
  derived and/or modified sequence
ctcgtctgtagtgcacgccgcgggcccagctgcgaccccggccccgcccccgggaccccggccatggacgaactgttccccctcatcttcccggcagagccagcccaggcctctggcccctatgtggagatcattgagcagcccaagcagcggggcatgcgcttccgctacaagtgcgaggggcgctccgcgggcagcatcccaggcgagaggagcacagataccaccaagacccaccccaccatcaagatcaatggctacacaggaccagggacagtgcgcatctccctggtcaccaaggaccctcctcaccggcctcacccccacgagcttgtaggaaaggactgccgggatggcttctatgaggctgagctctgcccggaccgctgcatccacagtttccagaacctgggaatccagtgtgtgaagaagcgggacctggagcaggctatcagtcagcgcatccagaccaacaacaaccccttccaagttcctatagaagagcagcgtggggactacgacctgaatgctgtgcggctctgcttccaggtgacagtgcgggacccatcaggcaggcccctccgcctgccgcctgtcctttctcatcccatctttgacaatcgtgcccccaacactgccgagctcaagatctgccgagtgaaccgaaactctggcagctgcctcggtggggatgagatcttcctactgtgtgacaaggtgcagaaagcccatggaattccagtacctgccagatacagacgatcgtcaccggattgaggagaaacgtaaaaggacatatgagaccttcaagagcatcatgaagaagagtcctttcagcggacccaccgacccccggcctccacctcgacgcattgctgtgccttcccgcagctcagcttctgtccccaagccagcaccccagccctatccctttacgtcatccctgagcaccatcaactatgatgagtttcccaccatggtgtttccttctgggcagatcagccaggcctcggccttggccccggcccctccccaagtcctgccccaggctccagcccctgcccctgctccagccatggtatcagctctggcccagaggccccccgacccagc

SEQ ID NO: 342384 - DNA, 2163 bp, Artificial Sequence
  derived and/or modified sequence
ggcgaatggctcgtctgtagtgcacgccgcgggcccagctgcgaccccggccccgcccccgggaccccggccatggacgaactgttccccctcatcttcccggcagagccagcccaggcctctggcccctatgtggagatcattgagcagcccaagcagcggggcatgcgcttccgctacaagtgcgaggggcgctccgcgggcagcatcccaggcgagaggagcacagataccaccaagacccaccccaccatcaagatcaatggctacacaggaccagggacagtgcgcatctccctggtcaccaaggaccctcctcaccggcctcacccccacgagcttgtaggaaaggactgccgggatggcttctatgaggctgagctctgcccggaccgctgcatccacagtttccagaacctgggaatccagtgtgtgaagaagcgggacctggagcaggctatcagtcagcgcatccagaccaacaacaaccccttccaagttcctatagaagagcagcgtggggactacgacctgaatgctgtgcggctctgcttccaggtgacagtgcgggacccatcaggcaggcccctccgcctgccgcctgtcctttctcatcccatctttgacaatcgtgcccccaacactgccgagctcaagatctgccgagtgaaccgaaactctggcagctgcctcggtggggatgagatcttcctactgtgtgacaaggtgcagaaagaggacattgaggtctgtccccaagccagcaccccagccctatccctttacgtcatccctgagcaccatcaactatgatgagtttcccaccatggtgtttccttctgggcagatcagccaggcctcggccttggccccggcccctccccaagtcctgccccaggctccagcccctgcccctgctccagccatggtatcagctctggcccaggccccagcccctgtcccagtcctagccccaggccctcctcaggctgtggccccacctgcccccaagcccacccaggctggggaaggaacgctgtcagaggccctgctgcagctgcagtttgatgatgaagacctgggggccttgcttggcaacagcacagacccagctgtgttcacagacctggcatccgtcgacaactccgagtttcagcagctgctgaaccagggcatacctgtggccccccacacaactgagcccatgctgatggagtaccctgaggctataactcgcctagtgacaggggcccagaggccccccgacccagctcctgctccactgggggccccggggctccccaatggcctcctttcaggagatgaagacttctcctccattgcggacatggacttctcagccctgctgagtcagatcagctcctaagggggtgacgcctgccctccccagagcactgggttgcaggggattgaagccctccaaaagcacttacggattctggtggggtgtgttccaactgcccccaactttgtggatgtcttccttggaggggggagccatattttattcttttattgtcagtatctgtatctctctctctttttggaggtgcttaagcagaagcattaacttctctggaaaggggggagctggggaaactcaaacttttcccctgtcctgatggtcagctcccttctctgtagggaactctggggtcccccatccccatcctccagcttctggtactctcctagagacagaagcaggctggaggtaaggcctttgagcccacaaagccttatcaagtgtcttccatcatggattcattacagcttaatcaaaataacgccccagataccagcccctgtatggcactggcattgtccctgtgcctaacaccagcgtttgaggggctggccttcctgccctacagaggtctctgccggctctttccttgctcaaccatggctgaaggaaaccagtgcaacagcactggctctctccaggatccagaaggggtttggtctgggacttccttgctctccctcttctcaagtgccttaatagtagggtaagttgttaagagtgggggagagcaggctggcagctctccagtcaggaggcatagtttttactgaacaatcaaagcacttggactcttgctctttctactctgaactaataaatctgttgccaagctg

SEQ ID NO: 342385 - DNA, 72 bp, Artificial Sequence
  derived and/or modified sequence
atgacctcacagccagtaccaaatgagacaatcattgtccttcccagcaacgtaatcaacttctcgcaatag

SEQ ID NO: 342386 - DNA, 72 bp, Artificial Sequence
  derived and/or modified sequence
atgaccagccagcctgtgcccaatgagaccatcatcgtgctgcccagcaatgtcatcaacttcagccagtag

SEQ ID NO: 342387 - DNA, 682 bp, Artificial Sequence
  derived and/or modified sequence
gatacattgaagtcagcttccaaagaatgccacccaaggttttgaaggggcacagtgcctctgtcctcacaaaaccagcctgcatatgagtttactgaattcatttaggtcctgctgaatctttcccatttgttccttctctgtttcaatatttcaatgcttccctggaggggcccaacctttctggagggcaaagatctgttgttagagaaaaagagcagccagaggaggaagatgacttgaggattagaaaactgaagcttcaagaacagacttgcctaacaacaggaaacttgtatgtctcgaagtggcaattcacacataaggctccatgactcctgaactctcacaaatattagttggctcttttcatggttttactgaagttgctagaagtttacagaaaaggaagtgcaggaacatttcacaaatctacaatctgtgagtatcacatcctgtatagctgtaaacactggaataaggaagggctgatgactttcagaagatgaaggtaagtagaaaccgttgatgggactgagaaaccagagttaaaacctctttggagcttctgaggactcagctggaaccaacgggcacagttggcaacaccatcatgacatcacaacctgttcccaatgagaccatcatagtgctcccatcaaatgtcatcaacttctcccaa

SEQ ID NO: 342388 - DNA, 72 bp, Artificial Sequence
  derived and/or modified sequence
atgaccagccagcccgtgcccaacgagaccatcatcgtgctgccctccaacgtaatcaacttcagccaatag

SEQ ID NO: 342389 - DNA, 72 bp, Artificial Sequence
  derived and/or modified sequence
atgacctctcagccggtccccaacgagacgatcatagtacttccctcaaacgtgatcaatttctctcagtag

SEQ ID NO: 342390 - DNA, 72 bp, Artificial Sequence
  derived and/or modified sequence
atgaccagccagcccgtgcccaacgagaccatcatcgtgctgcccagcaacgtgatcaacttcagccagtag

SEQ ID NO: 342391 - protein, 258 aa, Artificial Sequence
  derived and/or modified sequence
MDEFFSEIEETRLNIDKISEHVEEAKKLYSIILSAPIPEPKTKDDLEQLTTEIKKRANNVRNKLKSMEKHIEEDEVRSSADLRIRKSQHSVLSRKFVEVMTKYNEAQVDFRERSKGRIQRQLEITGKKTTDEELEEMLESGNPAIFTSGIIDSQISKQALSEIEGRHKDIVRLESSIKELHDMFMDIAMLVENQGEMLDNIELNVMHTVDHVEKARDETKKAVKYQSQARKKLIIIIVLVVVLLGILALIIGLSVGLN

SEQ ID NO: 342392 - protein, 289 aa, Artificial Sequence
  derived and/or modified sequence
MKDRLEQLKAKQLTQDDDTDAVEIAIDNTAFMDEFFSEIEETRLNIDKISEHVEEAKKLYSIILSAPIPEPKTKDDLEQLTTEIKKRANNVRNKLKSMEKHIEEDEVRSSADLRIRKSQHSVLSRKFVEVMTKYNEAQVDFRERSKGRIQRQLEITGKKTTDEELEEMLESGNPAIFTSGIIDSQISKQALSEIEGRHKDIVRLESSIKELHDMFMDIAMLVENQGEMLDNIELNVMHTVDHVEKARDETKKAVKYQSQARKKLIIIIVLVVVLLGILALIIGLSVGLN

SEQ ID NO: 342393 - protein, 76 aa, Artificial Sequence
  derived and/or modified sequence
MFMDIAMLVENQGEMLDNIELNVMHTVDHVEKARDETKKAVKYQSQARKKLIIIIVLVVVLLGILALIIGLSVGLN

SEQ ID NO: 342394 - DNA, 231 bp, Artificial Sequence
  derived and/or modified sequence
atgttcatggacatcgccatgctggtggagaaccagggcgagatgctggacaacatcgagctgaacgtgatgcacaccgtggaccacgtggagaaggccagagacgagaccaagaaggccgtgaagtaccagagccaggccagaaagaagctgatcatcatcatcgtgctggtggtggtgctgctgggcatcctggccctgatcatcggcctgagcgtgggcctgaactag

SEQ ID NO: 342395 - DNA, 231 bp, Artificial Sequence
  derived and/or modified sequence
atgttcatggatatagccatgctagtggaaaaccagggtgaaatgcttgataacatcgagctcaacgtgatgcatacagtcgaccacgtggagaaggcgagggatgaaactaagaaggctgttaaatatcagtctcaggcccgcaagaaacttattatcataatcgtcctagtggtcgtgttgctcggcatactcgctctgatcatcggtttatctgtaggcctgaactag

SEQ ID NO: 342396 - DNA, 231 bp, Artificial Sequence
  derived and/or modified sequence
atgttcatggacatcgccatgctggtggagaaccagggcgagatgctggacaacatcgagctgaatgtgatgcacacagtggaccacgtggagaaggccagagatgagaccaagaaggctgtgaagtaccagagccaggccaggaagaagctgatcatcatcatcgtgctggtggtggtgctgctgggcatcctggccctgatcatcggcctgtctgtgggcctgaactag

SEQ ID NO: 342397 - DNA, 231 bp, Artificial Sequence
  derived and/or modified sequence
atgttcatggacatcgccatgctggtggagaaccagggcgagatgctagataatatcgaactcaacgttatgcatactgtggaccacgtagagaaggccagagatgagaccaaaaaagccgtgaagtatcaatctcaagctcgtaagaaattaattattattatcgtgctcgtcgtcgtgctcctcggcattctggcgctcatcatcggcctgagcgtggggttgaactag

SEQ ID NO: 342398 - DNA, 231 bp, Artificial Sequence
  derived and/or modified sequence
atgtttatggacatagcaatgctggtagaaaaccagggggagatgctggataacatcgagctgaacgtgatgcatacggtggatcacgtcgagaaggccagagacgaaaccaaaaaagccgttaagtaccagagtcaagccagaaagaagcttatcatcatcattgtgttggttgttgtcctcctgggcattctggctctgatcataggcctgagcgttggtcttaattag

SEQ ID NO: 342399 - DNA, 534 bp, Artificial Sequence
  derived and/or modified sequence
atgtttatggacatcgccatgctggtggagaatcagggtgagatgttagataacatagagttgaatgtcatgcacacagtggaccacgtggagaaggcacgagatgaaacgaaaaaagctgtgaaataccagagtcaggcccggaagaaattgataattatcattgtgctagtagttgtgttgctgggcattttagcattgattattggactttccgttgggctgaattaagagtggcctaagaggctgctgcactgaaattgtgtctcttcttattcctcctccttccatgtgaccaggggatctaaaagtcagcttattacagcattgagcattcaacttcatcttgaaagataagcaacagtgagatgaacaacctctcatagacaggtggttggttgattttttttttcccctcttttttctggcacttggagtctagcccttgacttttttgtatgtgaactttaaattttggtttggctctgaacaatctgattgaaatagatgttgaaattttaaaaagatataaga

SEQ ID NO: 342400 - protein, 355 aa, Artificial Sequence
  derived and/or modified sequence
MIPRKRYGSKNTDQGVYLGLSKTQVLSPATAGSSSSDIAPLPPPVTLVPPPPDTMSCRDRTQEFLSACKSLQTRQNGIQTNKPALRAVRQRSEFTLMAKRIGKDLSNTFAKLEKLTILAKRKSLFDDKAVEIEELTYIIKQDINSLNKQIAQLQDFVRAKGSQSGRHLQTHSNTIVVSLQSKLASMSNDFKSVLEVRTENLKQQRSRREQFSRAPVSALPLAPNHLGGGAVVLGAESHASKDVAIDMMDSRTSQQLQLIDEQDSYIQSRADTMQNIESTIVELGSIFQQLAHMVKEQEETIQRIDENVLGAQLDVEAAHSEILKYFQSVTSNRWLMVKIFLILIVFFIIFVVFLA

SEQ ID NO: 342401 - protein, 301 aa, Artificial Sequence
  derived and/or modified sequence
MSCRDRTQEFLSACKSLQTRQNGIQTNKPALRAVRQRSEFTLMAKRIGKDLSNTFAKLEKLTILAKRKSLFDDKAVEIEELTYIIKQDINSLNKQIAQLQDFVRAKGSQSGRHLQTHSNTIVVSLQSKLASMSNDFKSVLEVRTENLKQQRSRREQFSRAPVSALPLAPNHLGGGAVVLGAESHASKDVAIDMMDSRTSQQLQLIDEQDSYIQSRADTMQNIESTIVELGSIFQQLAHMVKEQEETIQRIDENVLGAQLDVEAAHSEILKYFQSVTSNRWLMVKIFLILIVFFIIFVVFLA

SEQ ID NO: 342402 - protein, 259 aa, Artificial Sequence
  derived and/or modified sequence
MAKRIGKDLSNTFAKLEKLTILAKRKSLFDDKAVEIEELTYIIKQDINSLNKQIAQLQDFVRAKGSQSGRHLQTHSNTIVVSLQSKLASMSNDFKSVLEVRTENLKQQRSRREQFSRAPVSALPLAPNHLGGGAVVLGAESHASKDVAIDMMDSRTSQQLQLIDEQDSYIQSRADTMQNIESTIVELGSIFQQLAHMVKEQEETIQRIDENVLGAQLDVEAAHSEILKYFQSVTSNRWLMVKIFLILIVFFIIFVVFLA

SEQ ID NO: 342403 - DNA, 1068 bp, Artificial Sequence
  derived and/or modified sequence
atgatccccagaaagagatacggcagcaagaacaccgaccagggcgtgtacctgggcctgagcaagacccaggtgctgagccccgccaccgccggcagcagcagcagcgacatcgcccccctgcccccccccgtgaccctggtgccccccccccccgacaccatgagctgcagagacagaacccaggagttcctgagcgcctgcaagagcctgcagaccagacagaacggcatccagaccaacaagcccgccctgagagccgtgagacagagaagcgagttcaccctgatggccaagagaatcggcaaggacctgagcaacaccttcgccaagctggagaagctgaccatcctggccaagagaaagagcctgttcgacgacaaggccgtggagatcgaggagctgacctacatcatcaagcaggacatcaacagcctgaacaagcagatcgcccagctgcaggacttcgtgagagccaagggcagccagagcggcagacacctgcagacccacagcaacaccatcgtggtgagcctgcagagcaagctggccagcatgagcaacgacttcaagagcgtgctggaggtgagaaccgagaacctgaagcagcagagaagcagaagagagcagttcagcagagcccccgtgagcgccctgcccctggcccccaaccacctgggcggcggcgccgtggtgctgggcgccgagagccacgccagcaaggacgtggccatcgacatgatggacagcagaaccagccagcagctgcagctgatcgacgagcaggacagctacatccagagcagagccgacaccatgcagaacatcgagagcaccatcgtggagctgggcagcatcttccagcagctggcccacatggtgaaggagcaggaggagaccatccagagaatcgacgagaacgtgctgggcgcccagctggacgtggaggccgcccacagcgagatcctgaagtacttccagagcgtgaccagcaacagatggctgatggtgaagatcttcctgatcctgatcgtgttcttcatcatcttcgtggtgttcctggcctag

SEQ ID NO: 342404 - DNA, 1068 bp, Artificial Sequence
  derived and/or modified sequence
atgatccctaggaaacgctatggaagtaagaacacggatcagggggtctatttaggtctgtctaaaactcaagttctgtcgccagccactgccggcagctctagtagtgatatcgctcctctccccccaccagtgactctggtcccaccccccccggacacgatgtcctgccgagacaggacacaggaattcctcagcgcctgcaagtccctgcagacacgacagaatggtatacaaaccaacaagccggccctgcgcgcagtgcgccagagatccgaattcaccctgatggctaagagaattgggaaggatctgtctaataccttcgcgaagcttgagaagctcaccatcttagcgaaacgaaagtctctgttcgacgataaagctgtggaaatcgaggaattgacctacatcattaagcaggatataaacagtctgaataaacagatcgcccagctccaagatttcgtcagagccaaggggtcccaaagcggccgccatttgcagacccactctaataccattgtggtttctctccagagcaaactggccagcatgagcaatgacttcaaatctgtgcttgaggtcagaacagagaatttgaaacaacagaggtcgcggcgtgagcagttcagtcgagctcccgtgtcagctctgccactggcacccaaccatctgggcggcggggccgtcgttcttggcgcagagagccatgcgagcaaagacgtggcaatcgacatgatggattctcggacctctcagcaactccagctgattgatgagcaggacagttatatccagagcagggcggacacaatgcagaacattgaatccaccatcgtggagctcggatccatcttccagcagctggcccatatggtgaaggaacaggaagagaccatccaacgcattgatgaaaacgttcttggcgcgcagcttgacgttgaggccgctcactctgagatcttaaagtatttccagtccgtgaccagcaatagatggctgatggttaagattttcctgattctgattgtctttttcatcattttcgtggtcttcctggcatag

SEQ ID NO: 342405 - DNA, 1068 bp, Artificial Sequence
  derived and/or modified sequence
atgatccccaggaagagatatggcagcaagaacacagaccagggcgtgtacctgggcctgagcaagacccaggtgctgagccctgccacagctggcagcagcagcagtgacatcgcccccctgcccccacctgtgaccctggtgcccccacctccagacaccatgagctgccgggacaggacccaggagttcctgagcgcctgcaagagcctgcagacccggcagaatggcatccagaccaacaagccagccctgcgggctgtgcggcagaggtctgagttcaccctgatggccaagagaattggcaaggacctgagcaacacctttgccaagctggagaagctgaccatcctggccaagaggaagagcctgtttgatgacaaggctgtggagattgaggagctgacctacatcatcaagcaggacatcaacagcctgaacaagcagatcgcccagctgcaggactttgtgcgggccaagggcagccagagcggccgccacctgcagacccacagcaacaccatcgtggtgtccctgcagagcaagctggcctccatgagcaatgacttcaagtctgtgctggaggtgaggacagagaacctgaagcagcagaggagcagaagagagcagttcagccgggcccctgtgtctgccctgcccctggcccccaaccacctgggcggcggcgctgtggtgctgggcgctgagagccacgccagcaaggatgtggccatcgacatgatggacagcaggaccagccagcagctgcagctgattgatgagcaggacagctacatccagagcagagctgacaccatgcagaacatcgagagcaccatcgtggagctgggcagcatcttccagcagctggcccacatggtgaaggagcaggaggagaccatccagagaattgatgaaaatgtgctgggcgcccagctggatgtggaggccgcccacagcgagatcctgaagtacttccagagcgtgaccagcaaccgctggctgatggtgaagatcttcctgatcctgattgtgttcttcatcatctttgtggtgttcctggcctag

SEQ ID NO: 342406 - DNA, 1068 bp, Artificial Sequence
  derived and/or modified sequence
atgatcccccggaagcggtacggcagcaagaacaccgaccagggcgtctatctcgggctgtctaagacacaagtactaagcccagccactgcaggaagcagcagctccgacatcgcccctctaccacctcccgttacgctggtgccgccaccacctgacactatgtcttgcagagacagaacgcaggaatttctgagcgcctgcaagtcactccagaccagacaaaatggtatacagaccaacaaacctgcccttagggcggttcggcagcggtccgagtttactctgatggctaagaggatcggcaaggacctgagcaacacgtttgccaagctcgagaagcttaccatcttggccaaaaggaagagtttatttgacgataaggctgtcgagatcgaggagctgacatacattattaaacaggacattaacagtctgaataagcagatcgcgcaacttcaagatttcgtgcgtgccaaagggtcccagtctggtcgtcatctgcagacacactcaaatacaatagtggtctccttgcaatctaagctagccagcatgtccaatgacttcaaatctgtgttggaagtacgtacagagaatttaaaacagcaaagatctaggagggagcagtttagccgcgcaccagttagcgccttaccccttgctccaaaccacctgggcggtggtgccgttgtcctaggggccgaaagccacgcttcaaaagacgtcgccattgacatgatggattcacgaacctctcagcagctgcagctgatcgacgaacaggattcctatatccagtccagggccgataccatgcagaacatcgagagcaccatcgtggaattggggagtatttttcagcagctggcacacatggtaaaagaacaggaggagacaatacagcggattgacgagaacgtgctgggcgcacagttggacgttgaagccgctcattccgaaatactaaagtatttccaaagtgtgacaagcaacagatggctaatggtgaagattttcttgattctaatcgtcttcttcatcatttttgtcgtgtttttggcctag

SEQ ID NO: 342407 - DNA, 1068 bp, Artificial Sequence
  derived and/or modified sequence
atgattcctcgaaaacggtatggaagtaagaatactgatcagggggtctatcttggtctatcaaaaactcaggtgttgtcacccgcaactgccggttcttcttcctcagacattgccccactgccccctcctgtcaccctggtgccccctccccctgacaccatgtcctgccgtgaccgcactcaggaatttctctctgcatgcaagagcctacaaacacgccagaacggaatacagaccaacaagccagccctgagggccgtacggcaacggtctgagttcaccctgatggccaagaggatcggaaaggatctgagcaatacatttgccaaactggagaaactaacaattcttgcaaagcgtaagtcactcttcgatgacaaggctgtcgaaatcgaggaacttacttatataatcaaacaagacattaacagtcttaataaacagattgcacagctgcaggactttgtgagagcaaaagggagccagagcggcagacacctccagacccattcaaataccatagtggtgagcctacaatcaaaactcgcgtcaatgtcgaacgatttcaagtccgtgttggaagtgcgcaccgaaaaccttaagcaacagcgttcaaggcgggaacagttctcgcgcgctcctgtgtcagctctacccctcgcccctaatcatttaggcggtggcgctgtggttctgggagccgaatcccacgctagtaaggatgtcgcaatcgacatgatggatagccgcacaagccaacagctgcagctcatcgacgaacaagactcttacatacaaagtcgcgctgacacaatgcaaaacatcgagtctaccatagtggagctcggatcaatctttcagcagctcgctcacatggtgaaggagcaagaggaaactatccaaaggatcgacgagaatgtcctaggcgctcagcttgacgtcgaagcagcacatagtgaaatcctgaagtatttccagtccgtgacctctaaccgttggttgatggtgaagatattccttatcctgatcgtcttcttcataatttttgtcgtctttctggcctag

SEQ ID NO: 342408 - DNA, 1794 bp, Artificial Sequence
  derived and/or modified sequence
gggggtggggttacgtgtaggtgacgtggccgcttccagtctttggtcgggtttcggcggcttcagtgctcggggaggaggcagtgacggccggtgagattggaagtggcggcggcggcaggcggcagaggggagtccgaggttatgcgtctcaatgatcccgcggaaacgctacgggtctaagaacacggatcagggtgtctacctgggtctctcaaagacacaggtcctgtcccctgcaactgctggcagtagcagcagcgacatcgcccctctgccccccccagtgaccctcgtccctccccctcccgacaccatgtcctgccgggatcggacccaggagtttctgtctgcctgcaagtcgctgcagacccgtcagaatggaatccagacaaataagccagctttgcgtgctgtccgacaacgcagtgaattcaccctcatggccaagcgcattgggaaagaccttagcaacacatttgccaagctggagaagctgacaatcttggcaaagcgcaagtccctctttgatgataaagcagtggaaattgaagagctaacatatatcatcaaacaggacatcaatagcctcaacaaacaaattgctcagctccaggatttcgtgagagccaagggcagccagagtggccggcacctgcagacccactccaacaccattgtggtctccttgcagtcgaaactggcttctatgtccaatgacttcaaatcggttttagaagtgaggacagagaacctgaagcagcagaggagccggagagagcagttctcccgggcacctgtgtcagccctgccccttgcccctaaccacctgggcggtggtgctgtggttctgggggcagagtcccatgcctccaaggatgtcgccatcgacatgatggactctcggaccagccagcagctgcagctcattgacgagcaggattcctacatccagagtcgggcagacaccatgcagaacattgagtcgacaattgttgagttgggctccatctttcagcagttggcacacatggttaaggaacaggaggaaaccattcagaggatcgacgagaacgtgctaggagcccagctggacgttgaggccgcccattcagagatcctcaagtacttccagtctgtcacctccaaccggtggctcatggtcaaaatcttcctcatcctcattgtcttcttcatcatctttgtggtcttccttgcttgaaccctctctactctgaggcactctgttggggtttgggaccctcctgggaaggcaagtggccagtgctgccactgagcctgtgcagggtacttgggagaaaggccctgtttccctggaactgctaagaatgaccactgcccctgatcccccaccccttgcctctggccaccctgtcctccccccaccaccctcaggcctatgaaacacacagggttctagatttgaactctgctgtgaagtgactggaagggagcagaggccagctgggggccagtgggggaggttgtttccactaggagatttttataaaccctctccagcctctcccaaaggaagcgttggcagcaaagggagatgatgcccttacccaccttcctgtgagtgaagagaggaagcagccccagggaccaattttcccaattgacctctttcttcctctttcaccatgtgaggcagggagccctgagcccttcagctgcctgcacaacccctgacattggctgctggtgactcaatctgccaaatgtgctgcagctcgttttctcccaattacagcaagactgtcagcctca

SEQ ID NO: 342409 - DNA, 1568 bp, Artificial Sequence
  derived and/or modified sequence
tcgggtttcggcggcttcagtgctcggggaggaggcagtgacggccggtgagattggaagtggcggcggcggcaggcggcagaggggagtgaccctcgtccctccccctcccgacaccatgtcctgccgggatcggacccaggagtttctgtctgcctgcaagtcgctgcagacccgtcagaatggaatccagacaaataagccagctttgcgtgctgtccgacaacgcagtgaattcaccctcatggccaagcgcattgggaaagaccttagcaacacatttgccaagctggagaagctgacaatcttggcaaagcgcaagtccctctttgatgataaagcagtggaaattgaagagctaacatatatcatcaaacaggacatcaatagcctcaacaaacaaattgctcagctccaggatttcgtgagagccaagggcagccagagtggccggcacctgcagacccactccaacaccattgtggtctccttgcagtcgaaactggcttctatgtccaatgacttcaaatcggttttagaagtgaggacagagaacctgaagcagcagaggagccggagagagcagttctcccgggcacctgtgtcagccctgccccttgcccctaaccacctgggcggtggtgctgtggttctgggggcagagtcccatgcctccaaggatgtcgccatcgacatgatggactctcggaccagccagcagctgcagctcattgacgagcaggattcctacatccagagtcgggcagacaccatgcagaacattgagtcgacaattgttgagttgggctccatctttcagcagttggcacacatggttaaggaacaggaggaaaccattcagaggatcgacgagaacgtgctaggagcccagctggacgttgaggccgcccattcagagatcctcaagtacttccagtctgtcacctccaaccggtggctcatggtcaaaatcttcctcatcctcattgtcttcttcatcatctttgtggtcttccttgcttgaaccctctctactctgaggcactctgttggggtttgggaccctcctgggaaggcaagtggccagtgctgccactgagcctgtgcagggtacttgggagaaaggccctgtttccctggaactgctaagaatgaccactgcccctgatcccccaccccttgcctctggccaccctgtcctccccccaccaccctcaggcctatgaaacacacagggttctagatttgaactctgctgtgaagtgactggaagggagcagaggccagctgggggccagtgggggaggttgtttccactaggagatttttataaaccctctccagcctctcccaaaggaagcgttggcagcaaagggagatgatgcccttacccaccttcctgtgagtgaagagaggaagcagccccagggaccaattttcccaattgacctctttcttcctctttcaccatgtgaggcagggagccctgagcccttcagctgcctgcacaacccctgacattggctgctggtgactcaatctgccaaatgtgctgcagctcgttttct

SEQ ID NO: 342410 - DNA, 906 bp, Artificial Sequence
  derived and/or modified sequence
atgagctgcagagacagaacccaggagttcctgagcgcctgcaagagcctgcagaccagacagaacggcatccagaccaacaagcccgccctgagagccgtgagacagagaagcgagttcaccctgatggccaagagaatcggcaaggacctgagcaacaccttcgccaagctggagaagctgaccatcctggccaagagaaagagcctgttcgacgacaaggccgtggagatcgaggagctgacctacatcatcaagcaggacatcaacagcctgaacaagcagatcgcccagctgcaggacttcgtgagagccaagggcagccagagcggcagacacctgcagacccacagcaacaccatcgtggtgagcctgcagagcaagctggccagcatgagcaacgacttcaagagcgtgctggaggtgagaaccgagaacctgaagcagcagagaagcagaagagagcagttcagcagagcccccgtgagcgccctgcccctggcccccaaccacctgggcggcggcgccgtggtgctgggcgccgagagccacgccagcaaggacgtggccatcgacatgatggacagcagaaccagccagcagctgcagctgatcgacgagcaggacagctacatccagagcagagccgacaccatgcagaacatcgagagcaccatcgtggagctgggcagcatcttccagcagctggcccacatggtgaaggagcaggaggagaccatccagagaatcgacgagaacgtgctgggcgcccagctggacgtggaggccgcccacagcgagatcctgaagtacttccagagcgtgaccagcaacagatggctgatggtgaagatcttcctgatcctgatcgtgttcttcatcatcttcgtggtgttcctggcctag

SEQ ID NO: 342411 - DNA, 906 bp, Artificial Sequence
  derived and/or modified sequence
atgtcttgccgcgatcggactcaggaattccttagcgcttgcaagtcgctgcagacacgccagaatggaattcagaccaacaaacctgctctcagagctgttcgtcaaaggagcgaatttactctgatggccaagcgtattggcaaggaccttagcaatacgtttgccaaattggagaaactgactattctcgcaaagcgcaagagcctgttcgatgacaaggcagtggagatcgaagagcttacatatataatcaaacaggatatcaatagcttgaacaaacaaatagcccagcttcaagacttcgttcgcgctaaaggctctcagtctggacgccatctgcaaactcattctaataccattgtggtgagcttgcaaagcaaactggcctcgatgagcaatgacttcaaatctgtactggaggttcgcactgaaaatctaaagcagcaaaggtcacgtcgcgagcaattctcaagagcaccagttagtgccctgccgctggcccctaatcacctcggaggcggagctgtcgtactcggagctgaatctcatgcttccaaggacgtggccattgacatgatggattccaggacctcacagcagctacagcttattgatgagcaagactcctatatccaaagccgagccgacaccatgcagaacattgaaagcacaattgtggagcttgggtccatatttcagcagctggcccacatggttaaagagcaggaggagacgatccaacgaattgacgagaatgtgttgggtgcacagcttgatgtggaggctgcacactccgagatcttgaagtacttccagtcagtgacatcaaataggtggttgatggttaaaatttttttaattttgatcgtctttttcattattttcgtggtgttcctcgcctag

SEQ ID NO: 342412 - DNA, 906 bp, Artificial Sequence
  derived and/or modified sequence
atgagctgccgggacaggacccaggagttcctgagcgcctgcaagagcctgcagacccggcagaatggcatccagaccaacaagccagccctgcgggctgtgcggcagaggtctgagttcaccctgatggccaagagaattggcaaggacctgagcaacacctttgccaagctggagaagctgaccatcctggccaagaggaagagcctgtttgatgacaaggctgtggagattgaggagctgacctacatcatcaagcaggacatcaacagcctgaacaagcagatcgcccagctgcaggactttgtgcgggccaagggcagccagagcggccgccacctgcagacccacagcaacaccatcgtggtgtccctgcagagcaagctggcctccatgagcaatgacttcaagtctgtgctggaggtgaggacagagaacctgaagcagcagaggagcagaagagagcagttcagccgggcccctgtgtctgccctgcccctggcccccaaccacctgggcggcggcgctgtggtgctgggcgctgagagccacgccagcaaggatgtggccatcgacatgatggacagcaggaccagccagcagctgcagctgattgatgagcaggacagctacatccagagcagagctgacaccatgcagaacatcgagagcaccatcgtggagctgggcagcatcttccagcagctggcccacatggtgaaggagcaggaggagaccatccagagaattgatgaaaatgtgctgggcgcccagctggatgtggaggccgcccacagcgagatcctgaagtacttccagagcgtgaccagcaaccgctggctgatggtgaagatcttcctgatcctgattgtgttcttcatcatctttgtggtgttcctggcctag

SEQ ID NO: 342413 - DNA, 906 bp, Artificial Sequence
  derived and/or modified sequence
atgagctgccgggaccggacccaggagttcctgagcgcctgcaagagcttacagacccggcagaatgggatccaaaccaataaaccagctctgagggctgttcggcagcgttccgagtttacattgatggccaaaagaattggcaaagatctgtccaatactttcgctaagcttgagaaacttacaatactcgccaagcggaagtctctgtttgatgataaagctgtagaaattgaggagcttacttatattattaagcaggacatcaattccttgaataagcaaatagcccagttacaggatttcgtgcgggcgaaggggagtcagtctgggaggcacctgcagacccattctaatacaattgtagtcagtttgcagagcaagttagccagcatgagcaacgatttcaaaagtgttctcgaagtgaggacagaaaacctgaagcagcagcgctcccggcgtgaacagttctcaagagcgcctgtatctgccctgcccctggcccctaatcacctggggggaggggcagtggtgctcggagccgaatcacacgcctctaaggatgtggcaattgatatgatggatagccgcacctctcaacaactgcagctgattgatgagcaggatagttacatccagtctcgggccgacaccatgcagaatattgagagcaccattgtggaactcggatccatttttcaacagctcgctcacatggtaaaagagcaggaagaaactatccagagaatcgacgagaatgtgttgggggctcagctggacgttgaagccgctcacagcgagatactgaaatattttcagtcagtgaccagcaacagatggttgatggtcaaaatctttctcattctgattgtgttcttcattatcttcgtggtattcttagcctag

SEQ ID NO: 342414 - DNA, 906 bp, Artificial Sequence
  derived and/or modified sequence
atgtcctgtagggaccggacacaggagttcctttccgcttgcaagtctctccaaactcggcaaaacggcatccagactaacaaaccggcattaagagctgtgcggcagcgatcagaattcacacttatggctaaaagaatcggcaaggatctgagcaatacctttgcgaagctggagaagctgactatcctcgccaagcgtaagtcactctttgatgacaaagcggtagagattgaagagctgacatatataattaaacaggatattaattccctgaataagcagattgcgcaactgcaggattttgtgcgtgctaaaggtagtcagtcggggagacacctgcagactcacagcaacacaattgtggtgtccttacaaagcaagctggctagcatgtccaacgatttcaagtccgtgttagaagtgagaacggaaaatctgaagcagcagcgctcacggagagaacagttttctagagctccagtgtctgccttacctttggcaccgaatcatctcggcggaggcgctgtagtactcggggcagaatctcatgcgagtaaagacgtggccatcgatatgatggattcacggacttcgcagcagcttcagcttattgatgagcaggacagctacatccagagccgggcagacacaatgcagaacatcgagtcaacgattgtagaactagggagcatctttcagcagctagcacacatggtgaaagagcaagaagagactatccaacggatcgacgaaaacgttctgggcgctcagctcgatgttgaagcagctcatagcgagattttgaagtatttccagtccgtcacctccaacaggtggctcatggtcaaaatttttctgatattgatagtgttctttataattttcgtagtctttctggcgtag

SEQ ID NO: 342415 - DNA, 991 bp, Artificial Sequence
  derived and/or modified sequence
agtctttggtcgggtttcggcggcttcagtgctcggggaggaggcagtgacggccggtgagattggaagtggcggcggcggcaggcggcagaggggagaatggaatccagacaaataagccagctttgcgtgctgtccgacaacgcagtgaattcaccctcatggccaagcgcattgggaaagaccttagcaacacatttgccaagctggagaagctgacaatcttggcaaagcgcaagtccctctttgatgataaagcagtggaaattgaagagctaacatatatcatcaaacaggacatcaatagcctcaacaaacaaattgctcagctccaggatttcgtgagagccaagggcagccagagtggccggcacctgcagacccactccaacaccattgtggtctccttgcagtcgaaactggcttctatgtccaatgacttcaaatcggttttagaagtgaggacagagaacctgaagcagcagaggagccggagagagcagttctcccgggcacctgtgtcagccctgccccttgcccctaaccacctgggcggtggtgctgtggttctgggggcagagtcccatgcctccaaggatgtcgccatcgacatgatggactctcggaccagccagcagctgcagctcattgacgagcaggattcctacatccagagtcgggcagacaccatgcagaacattgagtcgacaattgttgagttgggctccatctttcagcagttggcacacatggttaaggaacaggaggaaaccattcagaggatcgacgagaacgtgctaggagcccagctggacgttgaggccgcccattcagagatcctcaagtacttccagtctgtcacctccaaccggtggctcatggtcaaaatcttcctcatcctcattgtcttcttcatcatctttgtggtcttccttgcttgaaccctctctactctgaggcactctgttggggtttgggaccctcctgggaa

SEQ ID NO: 342416 - DNA, 780 bp, Artificial Sequence
  derived and/or modified sequence
atggccaagagaatcggcaaggacctgagcaacaccttcgccaagctggagaagctgaccatcctggccaagagaaagagcctgttcgacgacaaggccgtggagatcgaggagctgacctacatcatcaagcaggacatcaacagcctgaacaagcagatcgcccagctgcaggacttcgtgagagccaagggcagccagagcggcagacacctgcagacccacagcaacaccatcgtggtgagcctgcagagcaagctggccagcatgagcaacgacttcaagagcgtgctggaggtgagaaccgagaacctgaagcagcagagaagcagaagagagcagttcagcagagcccccgtgagcgccctgcccctggcccccaaccacctgggcggcggcgccgtggtgctgggcgccgagagccacgccagcaaggacgtggccatcgacatgatggacagcagaaccagccagcagctgcagctgatcgacgagcaggacagctacatccagagcagagccgacaccatgcagaacatcgagagcaccatcgtggagctgggcagcatcttccagcagctggcccacatggtgaaggagcaggaggagaccatccagagaatcgacgagaacgtgctgggcgcccagctggacgtggaggccgcccacagcgagatcctgaagtacttccagagcgtgaccagcaacagatggctgatggtgaagatcttcctgatcctgatcgtgttcttcatcatcttcgtggtgttcctggcctag

SEQ ID NO: 342417 - DNA, 780 bp, Artificial Sequence
  derived and/or modified sequence
atggccaagcgcatagggaaggatctcagtaacacttttgccaaactggagaagctcacaattctcgcaaagcgtaagagtctctttgacgacaaagccgtggagatcgaggagctgacctacatcattaaacaagacataaacagtttgaataaacagatcgcccagctgcaggactttgtcagggccaagggatcacagagtgggaggcatctgcagacccactctaataccatagtggtcagtctgcaatcgaaactggcctccatgagcaacgattttaagtccgtgttggaagtgcgcacggagaacctaaagcagcagagatcacgcagagagcaattttctagggccccagtttccgcgttgccattggcaccaaatcatctgggaggaggtgctgtggtgctgggtgctgaaagtcatgcaagcaaagacgtcgccatcgacatgatggatagcaggaccagccaacagctgcagctgatcgatgaacaggactcctatatccaatctagggccgatacgatgcagaacatcgagagcaccattgtcgagttgggttccattttccaacagctagcacacatggtaaaggaacaggaagagaccattcagcgcattgacgagaatgtcctaggcgcacagttagacgtagaagcggctcactctgagattctgaagtactttcagagtgtgacatctaaccggtggttgatggtcaaaatttttttgattctcattgtgtttttcattatatttgtggtgttcctagcctag

SEQ ID NO: 342418 - DNA, 780 bp, Artificial Sequence
  derived and/or modified sequence
atggccaagagaattggcaaggacctgagcaacacctttgccaagctggagaagctgaccatcctggccaagaggaagagcctgtttgatgacaaggctgtggagattgaggagctgacctacatcatcaagcaggacatcaacagcctgaacaagcagatcgcccagctgcaggactttgtgcgggccaagggcagccagagcggccgccacctgcagacccacagcaacaccatcgtggtgtccctgcagagcaagctggcctccatgagcaatgacttcaagtctgtgctggaggtgaggacagagaacctgaagcagcagaggagcagaagagagcagttcagccgggcccctgtgtctgccctgcccctggcccccaaccacctgggcggcggcgctgtggtgctgggcgctgagagccacgccagcaaggatgtggccatcgacatgatggacagcaggaccagccagcagctgcagctgattgatgagcaggacagctacatccagagcagagctgacaccatgcagaacatcgagagcaccatcgtggagctgggcagcatcttccagcagctggcccacatggtgaaggagcaggaggagaccatccagagaattgatgaaaatgtgctgggcgcccagctggatgtggaggccgcccacagcgagatcctgaagtacttccagagcgtgaccagcaaccgctggctgatggtgaagatcttcctgatcctgattgtgttcttcatcatctttgtggtgttcctggcctag

SEQ ID NO: 342419 - DNA, 780 bp, Artificial Sequence
  derived and/or modified sequence
atggccaagcggatcggcaaggacctgagcaacaccttcgccaagctggaaaaacttacaatactggctaaaagaaagagcctctttgatgacaaagccgtggagatcgaggaactcacttatataatcaaacaggatatcaattctttgaacaagcagattgcccagctgcaggacttcgtgcgagccaaaggttcccaaagtggtcgccatctacagacccactcaaacacaatagttgtgagcctgcagtctaagctcgccagtatgtctaacgatttcaagtctgtccttgaggtgcggacagagaatctcaagcagcagcgcagcagaagggagcagtttagtagagcgcctgtgtctgcactgcccctggcccctaatcatctgggcggcggcgccgtggttctgggtgcagagagtcacgcttctaaggacgtggcaatcgacatgatggattcaagaacgtcccagcaactgcagctgatcgatgaacaggactcctacatacagtctcgcgctgatacaatgcagaatattgagtctacaatcgtcgaacttgggagtattttccagcagcttgcgcacatggtgaaggaacaggaggaaacaattcagcgtattgacgagaatgtgctaggggctcagctcgatgtcgaagctgcccacagtgaaattctcaagtatttccagtccgtgacaagcaaccggtggctgatggtcaaaatatttctgatccttatagtgttctttattatcttcgtggtcttcttagcctag

SEQ ID NO: 342420 - DNA, 780 bp, Artificial Sequence
  derived and/or modified sequence
atggctaagcggatcggaaaagatctgagcaatacatttgctaagttggaaaaacttacaatcctggccaaacgcaaatccctgttcgatgataaggctgtcgagatagaggaactgacttacataattaagcaggacatcaactcactgaacaagcagattgctcaactccaggattttgtgcgcgctaagggctcacaaagtggtaggcatttgcagacacactcaaacacaattgttgtgtcccttcagtcaaaattagccagtatgtccaatgacttcaaaagtgttctggaggtacggaccgaaaacctaaaacagcagcggagcagacgagaacagttttctcgggctcccgtttccgccctccctcttgcccctaaccacctgggaggtggggctgtggtactcggcgctgagtctcacgcttccaaggacgtcgccatcgatatgatggactcccggacaagccaacaattacaactgattgatgaacaagattcgtacattcagagccgagctgacacgatgcagaatatagagagcacaatagtcgagctgggatcaatttttcagcaactcgcacacatggtaaaagaacaggaagagacgatacagcgtatagacgagaacgtgctcggggctcagcttgacgttgaagcagcccattctgagattttgaaatactttcagtctgtgacgtccaatagatggttgatggtcaagattttcctcatcctgatagtgttttttataatattcgtggtctttctggcctag

SEQ ID NO: 342421 - protein, 640 aa, Artificial Sequence
  derived and/or modified sequence
MFSCVKPYEDQNYSALRRDCRRRKVLFEDPLFPATDDSLYYKGTPGPAVRWKRPKGICEDPRLFVDGISSHDLHQGQVGNCWFVAACSSLASRESLWQKVIPDWKEQEWDPEKPNAYAGIFHFHFWRFGEWVDVVIDDRLPTVNNQLIYCHSNSRNEFWCALVEKAYAKLAGCYQALDGGNTADALVDFTGGVSEPIDLTEGDFANDETKRNQLFERMLKVHSRGGLISASIKAVTAADMEARLACGLVKGHAYAVTDVRKVRLGHGLLAFFKSEKLDMIRLRNPWGEREWNGPWSDTSEEWQKVSKSEREKMGVTVQDDGEFWMTFEDVCRYFTDIIKCRVINTSHLSIHKTWEEARLHGAWTLHEDPRQNRGGGCINHKDTFFQNPQYIFEVKKPEDEVLICIQQRPKRSTRREGKGENLAIGFDIYKVEENRQYRMHSLQHKAASSIYINSRSVFLRTDQPEGRYVIIPTTFEPGHTGEFLLRVFTDVPSNCRELRLDEPPHTCWSSLCGYPQLVTQVHVLGAAGLKDSPTGANSYVIIKCEGDKVRSAVQKGTSTPEYNVKGIFYRKKLSQPITVQVWNHRVLKDEFLGQVHLKADPDNLQALHTLHLRDRNSRQPSNLPGTVAVHILSSTSLMAV

SEQ ID NO: 342422 - protein, 680 aa, Artificial Sequence
  derived and/or modified sequence
MSCTGTPSCIYLLSALSLQDLVLDWEPRGVPPPLPGAAATMFSCVKPYEDQNYSALRRDCRRRKVLFEDPLFPATDDSLYYKGTPGPAVRWKRPKGICEDPRLFVDGISSHDLHQGQVGNCWFVAACSSLASRESLWQKVIPDWKEQEWDPEKPNAYAGIFHFHFWRFGEWVDVVIDDRLPTVNNQLIYCHSNSRNEFWCALVEKAYAKLAGCYQALDGGNTADALVDFTGGVSEPIDLTEGDFANDETKRNQLFERMLKVHSRGGLISASIKAVTAADMEARLACGLVKGHAYAVTDVRKVRLGHGLLAFFKSEKLDMIRLRNPWGEREWNGPWSDTSEEWQKVSKSEREKMGVTVQDDGEFWMTFEDVCRYFTDIIKCRVINTSHLSIHKTWEEARLHGAWTLHEDPRQNRGGGCINHKDTFFQNPQYIFEVKKPEDEVLICIQQRPKRSTRREGKGENLAIGFDIYKVEENRQYRMHSLQHKAASSIYINSRSVFLRTDQPEGRYVIIPTTFEPGHTGEFLLRVFTDVPSNCRELRLDEPPHTCWSSLCGYPQLVTQVHVLGAAGLKDSPTGANSYVIIKCEGDKVRSAVQKGTSTPEYNVKGIFYRKKLSQPITVQVWNHRVLKDEFLGQVHLKADPDNLQALHTLHLRDRNSRQPSNLPGTVAVHILSSTSLMAV

SEQ ID NO: 342423 - protein, 557 aa, Artificial Sequence
  derived and/or modified sequence
MFSCVKPYEDQNYSALRRDCRRRKVLFEDPLFPATDDSLYYKGTPGPAVRWKRPKYSGHSLAPHRPGWGDARRMENVPRPGSSGCPSSSLRARDLGICEDPRLFVDGISSHDLHQGQVGNCWFVAACSSLASRESLWQKVIPDWKEQEWDPEKPNAYAGIFHFHFWRFGEWVDVVIDDRLPTVNNQLIYCHSNSRNEFWCALVEKAYAKLAGCYQALDGGNTADALVDFTGGVSEPIDLTEGDFANDETKRNQLFERMLKVHSRGGLISASIKAVTAADMEARLACGLVKGHAYAVTDVRKVRLGHGLLAFFKSEKLDMIRLRNPWGEREWNGPWSDTSEEWQKVSKSEREKMGVTVQDDGEFWMTFEDVCRYFTDIIKCRVINTSHLSIHKTWEEARLHGAWTLHEDPRQNRGGGCINHKDTFFQNPQYIFEVKKPEDEVLICIQQRPKRSTRREGKGENLAIGFDIYKVEENRQYRMHSLQHKAASSIYINSRSVFLRTDQPEGRYVIIPTTFEPGHTGEFLLRVFTDVPSNCRELRLDEPPHTCWSSLCGYPQW

SEQ ID NO: 342424 - DNA, 1923 bp, Artificial Sequence
  derived and/or modified sequence
atgtttagttgcgtgaaaccctacgaggatcagaattactcagcgctgaggcgcgattgtcggcgccgtaaggtactgtttgaagatcctctgttccccgcaactgatgacagcctatattacaaggggacaccaggtcccgccgtgcggtggaagagaccgaagggaatttgcgaggatccccggctctttgtggacggaatttcctcccatgacctccatcaggggcaggtcgggaattgctggtttgttgcagcctgttctagcctcgctagtcgggaatctctctggcagaaggtgatccccgactggaaagaacaggaatgggacccagagaagcccaacgcctatgccgggattttccatttccacttctggagattcggggagtgggtcgacgtggttatcgacgacaggcttcccacagtcaataatcagctcatctactgccactctaattctcggaatgagttttggtgcgctctggttgagaaggcttacgccaaactggctgggtgctatcaggcacttgacggaggcaacactgccgatgccctggtcgacttcacggggggagtatcagagcccatcgacctgaccgaaggcgacttcgcaaatgatgagaccaaaaggaatcaactatttgaacgcatgcttaaggtccacagtagagggggacttatctccgcctccatcaaggctgtcactgcagccgacatggaagcacgtctggcctgcggactggtgaagggccatgcttacgccgttacagatgtgcgtaaagttagactgggacacggcctcctcgctttcttcaagagcgagaagctggacatgatccgactacggaatccctggggtgagcgtgaatggaacgggccatggtccgatacttctgaggagtggcagaaagtcagcaagagcgagagagagaagatgggcgttactgtgcaagacgatggcgagttttggatgacttttgaagatgtgtgtcgctactttaccgacataattaagtgcagagtgatcaacacgtcacatctttccatccacaaaacatgggaggaggcaagattacatggagcctggacacttcacgaggacccacggcagaatagaggcggggggtgtataaatcataaggacacattttttcagaatccccagtacatctttgaagtgaagaagcctgaggacgaagtccttatctgtatccagcagcgtccgaaaagaagcacccgacgcgagggcaagggggagaacctggcaatcggtttcgatatatacaaggttgaggagaacagacagtaccggatgcactctttgcagcacaaggccgcctcctccatctacatcaacagtcggagtgtgtttctaaggactgatcagccggaggggaggtatgtgatcatacctacaacctttgagcccggtcataccggggaattcctgctgagagtgttcactgacgtcccctccaactgccgtgaactaagactggatgaaccccctcatacgtgttggagctctttgtgcgggtatccccagctcgtcactcaggtccacgtgctgggggcagctggtcttaaagattcaccaactggcgcaaacagttacgtaatcatcaagtgcgaaggcgacaaagttcgatccgccgtccaaaagggtacttctacccccgagtataatgtgaaagggattttttatcgaaagaagctgagtcaacctataacggttcaagtgtggaatcaccgggtgctcaaagacgagttcctcggccaggtccacctgaaagccgaccccgacaatctgcaggcgctccacaccctacacctgagggacagaaacagccgccaaccctctaatcttccaggcactgtcgccgtgcacatcctgagttccacttcgttgatggctgtctag

SEQ ID NO: 342425 - DNA, 2043 bp, Artificial Sequence
  derived and/or modified sequence
atgtcctgcacaggcaccccgagctgcatctatttactatctgccctgtccttacaagatctagtgctggactgggagcctcgtggtgtgcccccccctcttccaggagcagcagcaactatgttttcttgtgtcaaaccatatgaagaccagaactactcagcgctgcggcgggattgtcgtaggcgtaaagtcctgttcgaagacccactgtttccggccactgatgactccctatactataaaggcacgcccggaccagcggtgaggtggaagagaccaaagggtatctgcgaggatcctcgactgtttgtggacggaatttcatctcacgacctgcaccagggacaagtgggcaactgctggtttgtggcggcctgctcctctctcgcatctagggagagtttgtggcagaaggtaatccctgactggaaggagcaggagtgggaccctgaaaagcctaacgcgtacgcaggaatttttcacttccacttctggcgcttcggcgagtgggtggacgtagtcatcgatgaccgactcccaactgtgaataaccaactgatctactgtcactccaattctcgcaacgaattctggtgcgccctcgtggaaaaggcctatgcaaaactggctggttgctaccaggcactggatggaggtaacactgccgatgccctcgtagatttcacaggaggtgtgagcgagccaatcgacctaactgagggagactttgcaaacgacgagactaagagaaatcagctgtttgaacgaatgctgaaggtgcatagtagggggggcctcataagtgcttcgattaaagctgtgacggccgcagacatggaggcaaggctggcgtgtgggcttgttaagggccacgcatacgctgtgacagatgtcagaaaggttcgcttgggtcacggcctgctcgctttttttaaaagtgagaagttagacatgattagattacggaatccctggggagagcgcgagtggaacgggccctggagcgatacttctgaggagtggcaaaaagtctcaaaatccgagcgagagaagatgggcgttactgtccaggacgacggtgaattctggatgacattcgaggacgtctgccgctactttaccgacatcattaaatgcagggtcattaataccagccatctgtccattcacaaaacgtgggaagaagcgcgcttacatggggcatggactcttcatgaggatccgcggcagaacagaggcggaggctgcatcaatcataaagatacttttttccaaaatccccagtatatttttgaggtaaagaagcctgaggatgaagtgctcatttgtatccaacagcggcccaagagaagcacacgaagagaggggaaaggcgagaacctggctatcggatttgacatctataaggtggaagagaacagacaatataggatgcacagcttgcaacacaaggctgcctcctcgatctatattaacagccgctcggtcttcctcaggaccgatcagccagagggacgctacgtgataattcctacaacattcgaacctggccacactggcgagtttctgctgagggtcttcaccgatgtgccatctaactgccgggaattgcggttagacgaacctccacatacctgctggtctagcctttgtggatacccgcagctcgtgacccaggtacacgttttgggggccgccggcctgaaggactctcccaccggtgcaaacagctacgtgattattaagtgcgagggagacaaagttagatctgccgttcagaaaggaacgagtacccctgagtataacgtgaaaggaatcttctataggaaaaagctaagccagcctattacagtccaggtgtggaatcatagggtcttaaaggatgagtttctcggtcaggtgcacctgaaggcggaccccgataacttgcaggcccttcatacactgcatttgagggaccgaaactccagacaaccgtccaacctccccggcacggtggccgtgcacatcttgagctccacaagccttatggcagtttag

SEQ ID NO: 342426 - DNA, 1923 bp, Artificial Sequence
  derived and/or modified sequence
atgttttcatgcgtgaagccatatgaggatcagaactattctgccctgcggcgcgactgtcgccggagaaaggtcttgttcgaagacccactgttcccagcaactgatgacagcctctattataaaggtacccctggcccagctgtgagatggaagcgaccaaagggcatctgtgaggatcctaggctgttcgtggacggcatcagttctcatgacctacaccaaggacaagttggcaactgctggtttgtggctgcctgcagtagcctcgctagcagagagagcctgtggcagaaagtgatccccgactggaaggagcaggaatgggaccccgagaagcccaacgcctatgccgggatattccacttccatttttggcgttttggggagtgggtcgacgtggtgattgacgacaggcttccaacagtgaacaaccagctgatttactgtcactcaaactccaggaatgagttttggtgtgcactggttgagaaagcgtatgccaagctcgcaggatgttaccaagctttagatgggggaaacaccgctgatgctctcgtggactttactggtggtgtctcagagccaatcgacctaacagaaggggatttcgctaatgacgagacaaagcgcaaccagctgtttgagcgaatgttgaaagtccattcccggggcggcctgatctctgcttcaataaaggccgtcacagctgcagacatggaagcacgcctcgcctgcggtctggtgaagggacacgcatatgcagtgaccgatgtgcgcaaggtgaggctgggccatggcctgctggcattctttaagtccgaaaaactggacatgatccgcttgcgaaatccttggggcgagcgagaatggaatggcccatggtcagacacgagtgaggaatggcagaaagtgtccaagagcgagagagaaaagatgggcgttaccgtgcaagatgatggagagttctggatgactttcgaggatgtgtgtagatacttcaccgatatcattaagtgccgcgtgatcaataccagccacttgtctatacacaaaacctgggaggaggcaaggctccacggagcctggacactgcacgaagacccacgacagaataggggcggaggctgcattaaccacaaggatacatttttccagaacccacaatatatttttgaggttaagaaaccagaagatgaagttttaatctgcatccagcagagacctaagcgtagcacccggagggaggggaaaggcgaaaacctggccatcggctttgatatttataaggtcgaggaaaacagacaatacaggatgcatagccttcagcataaggcagctagctcgatatacattaactctcgaagcgtgttcctaaggacagaccaaccagaggggcgctacgttatcatccctactaccttcgagcctgggcacacaggagagttcctgctccgagtctttaccgatgtcccctcaaactgccgcgagcttcgccttgatgagccaccacatacatgttggtccagtctgtgtggttaccctcagctcgtcactcaggtgcatgtgctgggtgcggccggactcaaggattctccgaccggggctaactcctacgtgatcataaagtgtgaaggcgacaaggttcggtccgcggttcaaaaggggacctccacgcccgaatacaacgtcaaaggaatcttctaccgtaagaagttaagccagcctatcacggtacaggtctggaatcaccgggttttgaaggacgaattcttggggcaggtacacctgaaggccgatcccgacaatctccaggccttgcacacactgcatctacgggatcgaaacagcaggcaacctagtaacctccctggcacagtcgctgtgcatattctttcgtcaacctctctcatggctgtgtag

SEQ ID NO: 342427 - DNA, 1674 bp, Artificial Sequence
  derived and/or modified sequence
atgttttcttgtgtgaaaccctatgaggatcaaaattattccgcactccgacgcgactgcagacggagaaaagtcctcttcgaggatccgctttttccagcgaccgatgactcactgtactataaaggcacccctggcccagcagtcaggtggaagcggccaaagtacagcggacattccttggcccctcacagacccggctggggtgacgcaagaaggatggagaatgtgcctcgacctggcagtagtgggtgcccctcctccagtttgcgggcacgagatctcggtatctgcgaagatccacgtctgttcgttgatggaattagttcccatgacttgcaccaaggccaggtgggtaactgctggttcgtagctgcatgttcctcattggcgagtcgtgagtcattatggcaaaaggtcatacccgattggaaagagcaagagtgggaccccgaaaaacctaacgcatacgctggaatatttcattttcatttttggcggtttggagagtgggttgacgtggtcatagacgatcgtctgccgaccgtgaataaccaactgatttactgccattcaaacagtcgaaacgaattctggtgcgcgcttgtggagaaggcctatgccaagctggcgggttgttatcaagccctggacgggggcaacactgccgatgcactggttgactttaccgggggcgtgagcgaacctatcgatctgaccgagggagacttcgccaatgacgaaaccaaacgcaatcaactgttcgagcgcatgctcaaggtccactctcgaggtggcctgatctcagcctcaataaaggcagtgaccgctgcggatatggaagctagactcgcttgtggactagtgaaaggccacgcatacgcagtcactgacgtacgaaaggtccggctcggtcacggcttgcttgccttttttaagtcagagaagctggacatgataagattaaggaacccgtggggtgaaagagaatggaatgggccttggtctgacacgtctgaggagtggcaaaaggtaagtaagtccgagcgggagaagatgggtgtcacagttcaggatgatggcgagttctggatgacgtttgaggatgtctgtaggtattttaccgatattatcaagtgccgtgtgatcaacaccagtcacctgagtatccataagacctgggaggaggcacgtctccatggagcctggaccctgcatgaggatcctcggcagaaccgcggagggggttgcattaaccacaaagatacttttttccagaatccgcagtatatctttgaggttaagaagcccgaagatgaagtcctcatttgtattcagcagaggccaaagcgaagcacgcgtagagaaggcaagggggaaaacctcgccattgggttcgacatttataaggtggaggagaacaggcagtatcgaatgcactccttgcagcacaaagcggcaagctcaatctatatcaactcaaggagtgtgttcctgcgcactgaccagcctgaaggacggtacgtcataattccgaccacttttgaaccaggccacacgggggagtttctgcttcgagtctttacagacgtccctagcaattgtcgcgagctccgcttggatgaaccccctcacacatgctggagctctctctgcggctatccacagtggtag

SEQ ID NO: 342428 - DNA, 1923 bp, Artificial Sequence
  derived and/or modified sequence
atgttcagctgtgtgaagccctatgaggaccagaactacagcgccctgcggcgggactgcagaagaaggaaggtgctgtttgaggaccccctcttccctgccacagatgacagcctgtactacaagggcaccccaggccctgctgtgcgctggaagaggcccaagggcatctgtgaggacccccggctgtttgtggatggcatcagcagccatgacctgcaccagggccaggtgggcaactgctggtttgtggccgcctgcagcagcctggccagccgggagagcctgtggcagaaggtgatcccagactggaaggagcaggagtgggaccctgagaagcccaatgcctatgccggcatcttccacttccacttctggaggtttggagagtgggtggatgtggtgattgatgaccggctgcccaccgtgaacaaccagctgatctactgccacagcaacagcagaaatgagttctggtgtgccctggtggagaaggcctatgccaagctggccggctgctaccaggccctggatggcggcaacacagcagatgccctggtggacttcaccggcggcgtgtctgagcccatcgacctgacagaaggagactttgccaatgatgagaccaagaggaaccagctgtttgagaggatgctgaaggtgcacagcagaggaggcctcatcagcgccagcatcaaggctgtgacagctgctgacatggaggcccggctggcctgtggcctggtgaagggccacgcctatgctgtgacagatgtgaggaaggtgcggctgggccacggcctgctggccttcttcaagtctgagaagctggacatgatccggctgaggaacccctggggcgagcgggagtggaatggcccctggagcgacaccagcgaggagtggcagaaggtgtccaagtctgagcgggagaagatgggcgtgacagtgcaggatgatggagagttctggatgacctttgaagatgtgtgccgctacttcacagacatcatcaagtgcagggtcatcaacaccagccacctgagcatccacaagacctgggaggaggcccggctgcacggggcctggaccctgcacgaggacccccggcagaacagaggaggcggctgcatcaaccacaaggacaccttcttccagaacccccagtacatctttgaggtgaagaagccagaagatgaggtgctgatctgcatccagcagaggcccaagaggagcacccggcgggagggcaagggggagaacctggccatcggctttgacatctacaaggtggaggagaaccggcagtacaggatgcacagcctgcagcacaaggccgccagcagcatctacatcaacagccgcagcgtcttcctgaggacagaccagcctgagggccgctacgtgatcatccccaccacctttgagcccggccacactggagagttcctgctgcgggtcttcacagatgtgcccagcaactgccgggagctgcggctggatgagcccccccacacctgctggagcagcctgtgtggctacccccagctggtgacccaggtgcacgtgctgggcgctgctggcctgaaggacagccccaccggggccaacagctatgtgatcatcaagtgtgagggggacaaggtgcgctctgctgtgcagaagggcaccagcaccccagagtacaacgtgaagggcatcttctacaggaagaagctgagccagcccatcaccgtgcaggtgtggaaccaccgggtgctgaaggatgagttcctgggccaggtgcacctgaaggctgaccctgacaacctgcaggccctgcacaccctgcacctgcgggacaggaacagccggcagcccagcaacctgcccggcaccgtggccgtgcacatcctgagcagcaccagcctgatggctgtgtag

SEQ ID NO: 342429 - DNA, 2043 bp, Artificial Sequence
  derived and/or modified sequence
atgagctgcaccggcacccccagctgcatctacctgctgagcgccctgagcctgcaggacctggtgctggactgggagccccggggcgtgcccccacccctgcctggagctgctgccaccatgttcagctgtgtgaagccctatgaggaccagaactacagcgccctgcggcgggactgcagaagaaggaaggtgctgtttgaggaccccctcttccctgccacagatgacagcctgtactacaagggcaccccaggccctgctgtgcgctggaagaggcccaagggcatctgtgaggacccccggctgtttgtggatggcatcagcagccatgacctgcaccagggccaggtgggcaactgctggtttgtggccgcctgcagcagcctggccagccgggagagcctgtggcagaaggtgatcccagactggaaggagcaggagtgggaccctgagaagcccaatgcctatgccggcatcttccacttccacttctggaggtttggagagtgggtggatgtggtgattgatgaccggctgcccaccgtgaacaaccagctgatctactgccacagcaacagcagaaatgagttctggtgtgccctggtggagaaggcctatgccaagctggccggctgctaccaggccctggatggcggcaacacagcagatgccctggtggacttcaccggcggcgtgtctgagcccatcgacctgacagaaggagactttgccaatgatgagaccaagaggaaccagctgtttgagaggatgctgaaggtgcacagcagaggaggcctcatcagcgccagcatcaaggctgtgacagctgctgacatggaggcccggctggcctgtggcctggtgaagggccacgcctatgctgtgacagatgtgaggaaggtgcggctgggccacggcctgctggccttcttcaagtctgagaagctggacatgatccggctgaggaacccctggggcgagcgggagtggaatggcccctggagcgacaccagcgaggagtggcagaaggtgtccaagtctgagcgggagaagatgggcgtgacagtgcaggatgatggagagttctggatgacctttgaagatgtgtgccgctacttcacagacatcatcaagtgcagggtcatcaacaccagccacctgagcatccacaagacctgggaggaggcccggctgcacggggcctggaccctgcacgaggacccccggcagaacagaggaggcggctgcatcaaccacaaggacaccttcttccagaacccccagtacatctttgaggtgaagaagccagaagatgaggtgctgatctgcatccagcagaggcccaagaggagcacccggcgggagggcaagggggagaacctggccatcggctttgacatctacaaggtggaggagaaccggcagtacaggatgcacagcctgcagcacaaggccgccagcagcatctacatcaacagccgcagcgtcttcctgaggacagaccagcctgagggccgctacgtgatcatccccaccacctttgagcccggccacactggagagttcctgctgcgggtcttcacagatgtgcccagcaactgccgggagctgcggctggatgagcccccccacacctgctggagcagcctgtgtggctacccccagctggtgacccaggtgcacgtgctgggcgctgctggcctgaaggacagccccaccggggccaacagctatgtgatcatcaagtgtgagggggacaaggtgcgctctgctgtgcagaagggcaccagcaccccagagtacaacgtgaagggcatcttctacaggaagaagctgagccagcccatcaccgtgcaggtgtggaaccaccgggtgctgaaggatgagttcctgggccaggtgcacctgaaggctgaccctgacaacctgcaggccctgcacaccctgcacctgcgggacaggaacagccggcagcccagcaacctgcccggcaccgtggccgtgcacatcctgagcagcaccagcctgatggctgtgtag

SEQ ID NO: 342430 - DNA, 1674 bp, Artificial Sequence
  derived and/or modified sequence
atgttcagctgtgtgaagccctatgaggaccagaactacagcgccctgcggcgggactgcagaagaaggaaggtgctgtttgaggaccccctcttccctgccacagatgacagcctgtactacaagggcaccccaggccctgctgtgcgctggaagaggcccaagtacagcggccacagcctggccccccaccggcccggctggggagatgcccggaggatggagaatgtgccccggcccggcagcagcggctgccccagcagcagcctgcgggcccgggacctgggcatctgtgaggacccccggctgtttgtggatggcatcagcagccatgacctgcaccagggccaggtgggcaactgctggtttgtggccgcctgcagcagcctggccagccgggagagcctgtggcagaaggtgatcccagactggaaggagcaggagtgggaccctgagaagcccaatgcctatgccggcatcttccacttccacttctggaggtttggagagtgggtggatgtggtgattgatgaccggctgcccaccgtgaacaaccagctgatctactgccacagcaacagcagaaatgagttctggtgtgccctggtggagaaggcctatgccaagctggccggctgctaccaggccctggatggcggcaacacagcagatgccctggtggacttcaccggcggcgtgtctgagcccatcgacctgacagaaggagactttgccaatgatgagaccaagaggaaccagctgtttgagaggatgctgaaggtgcacagcagaggaggcctcatcagcgccagcatcaaggctgtgacagctgctgacatggaggcccggctggcctgtggcctggtgaagggccacgcctatgctgtgacagatgtgaggaaggtgcggctgggccacggcctgctggccttcttcaagtctgagaagctggacatgatccggctgaggaacccctggggcgagcgggagtggaatggcccctggagcgacaccagcgaggagtggcagaaggtgtccaagtctgagcgggagaagatgggcgtgacagtgcaggatgatggagagttctggatgacctttgaagatgtgtgccgctacttcacagacatcatcaagtgcagggtcatcaacaccagccacctgagcatccacaagacctgggaggaggcccggctgcacggggcctggaccctgcacgaggacccccggcagaacagaggaggcggctgcatcaaccacaaggacaccttcttccagaacccccagtacatctttgaggtgaagaagccagaagatgaggtgctgatctgcatccagcagaggcccaagaggagcacccggcgggagggcaagggggagaacctggccatcggctttgacatctacaaggtggaggagaaccggcagtacaggatgcacagcctgcagcacaaggccgccagcagcatctacatcaacagccgcagcgtcttcctgaggacagaccagcctgagggccgctacgtgatcatccccaccacctttgagcccggccacactggagagttcctgctgcgggtcttcacagatgtgcccagcaactgccgggagctgcggctggatgagcccccccacacctgctggagcagcctgtgtggctacccccagtggtag

SEQ ID NO: 342431 - DNA, 1923 bp, Artificial Sequence
  derived and/or modified sequence
atgttcagctgcgtgaagccctacgaggaccagaactacagcgccctgaggagagattgtcggagacgcaaggttttgttcgaggatcccctctttccagccactgatgactcactctattacaagggcacccctggccctgcagtcaggtggaagaggcctaaaggcatctgcgaggacccacgcctgtttgtggacgggatctcctcccacgacttgcatcagggccaggtcgggaattgttggttcgtcgccgcttgttcgagcctggcaagccgggagtctctgtggcagaaagtgatacctgattggaaggagcaggagtgggatcccgaaaagcctaacgcctacgctggcatctttcattttcacttttggcgctttggcgagtgggtggatgtcgtgattgacgatcgactccctacagtgaataatcaactcatctattgtcatagtaattcaaggaatgagttctggtgcgcactcgtggaaaaagcgtacgctaaattggcagggtgctaccaggcactggacgggggcaatacggccgatgccctggtcgatttcacaggcggagtatcagaacccatagacctaaccgagggagactttgccaatgatgagacaaaaaggaaccagctatttgagaggatgttgaaagtgcacagcagagggggactgatctccgcttccataaaagctgtgaccgccgccgacatggaggcacgtctggcctgcggactcgttaagggacacgcctacgcagtgaccgatgtacggaaagtgaggctgggccatgggctccttgctttcttcaaaagcgagaagttggatatgatacggctccgaaatccgtggggcgaacgcgaatggaatgggccatggtcagacacgtccgaggagtggcaaaaggtgtctaaatccgagcgggagaagatgggagtcacggttcaggatgacggagagttctggatgacgttcgaagatgtgtgtagatacttcactgacattatcaagtgcagggtgattaacacgtctcatctgagcatccacaagacttgggaagaggccagactacacggtgcctggactctacacgaggaccctagacagaacagaggcgggggctgcatcaatcataaggacactttttttcagaatccgcaatacatcttcgaggtgaagaagcccgaggacgaggttttaatttgcattcagcagaggccaaagagaagtacacgccgggagggcaagggtgaaaatctggccatcggcttcgatatttacaaagttgaggagaatagacagtacaggatgcattccttgcagcacaaggcagcctcttccatttatatcaactcccgtagcgtgtttctgagaactgaccaacccgagggccggtacgttatcatacccacgacgtttgagccagggcacacaggagaattcctgctgagagtgttcactgacgtgccctctaactgtcgggagctccggctagatgagcctccacacacgtgctggtcctcactttgtggatacccccagctggttacccaagttcacgtcttaggcgctgctggattgaaagattctcctaccggagctaactcctatgtcataatcaagtgtgaaggagataaagtgcgatcagcagtgcaaaagggcacaagcacgcctgagtataacgtaaaggggatcttctacagaaagaagctaagccaacccatcaccgtacaggtgtggaaccatcgtgtccttaaagacgaatttctgggacaggtacacctaaaggccgatcccgacaacttgcaggcgctgcatactttgcatctgagggacagaaattcaaggcagccctcaaatctccctgggacagtggccgttcatatactcagttccacctccctgatggccgtgtag

SEQ ID NO: 342432 - DNA, 2043 bp, Artificial Sequence
  derived and/or modified sequence
atgagctgcaccggcacccccagctgcatctacctgctgagcgccttatccctccaggaccttgtgctggattgggaaccaaggggtgtcccacctcctctcccgggagctgcagccaccatgttttcatgcgtcaagccatatgaggatcagaattacagcgcactgcggagagattgccggagaagaaaggtgttgttcgaggacccgctgttccctgccaccgacgactccttatactacaagggaacaccggggccagctgtgagatggaagcgaccaaagggaatatgcgaggaccctcgactgttcgtggacggtatctcctctcacgatctgcatcaaggacaggtgggcaactgctggttcgtggcggcatgcagttcactggcttctcgagagtccctatggcagaaggtgatacctgattggaaggagcaggaatgggacccagagaagcctaacgcctacgcaggtatcttccatttccacttctggcgattcggggaatgggtcgatgttgtcatcgacgatcggcttccaactgttaataatcagctgatatactgccactctaattcacggaatgagttctggtgtgccctggtcgaaaaagcatacgcaaaattggccgggtgctatcaggcactagacgggggaaatactgccgatgcccttgtcgattttaccggtggtgtgtcagagccgattgatcttactgaaggtgactttgcgaacgacgagaccaagcgtaatcagctgttcgaaagaatgctcaaggtgcatagcagaggcggactgatatcagcttcgattaaggccgtgaccgccgccgatatggaagcgagactggcttgtggcctcgtgaaaggtcacgcatacgccgtgacagatgtcaggaaagttcggcttggccacggcctgctggcattcttcaaatccgagaaattggacatgattagactgcgtaatccatggggagaaagagaatggaacggcccatggagtgatacaagcgaagaatggcagaaagtgagcaagtcggaaagggagaagatgggcgttaccgtgcaggatgatggagagttctggatgacatttgaggacgtctgtcgctactttaccgacataatcaagtgtcgcgttataaatacatcgcatcttagcatccataaaacatgggaagaggcacggctgcacggtgcttggaccctgcacgaggatcctcggcagaaccggggcggaggatgcatcaaccacaaagataccttctttcagaatccacagtacatcttcgaagtgaaaaagccggaggatgaagtgctcatctgtatccagcagcgtccaaagcggtcaacccgcagggaaggaaaaggggaaaacctcgccattggcttcgatatctataaagtggaagagaacaggcaataccggatgcacagcttgcagcataaggcagcaagcagtatatacatcaactctaggtccgtatttctgagaaccgaccaaccagagggaagatatgtaattatcccaacaactttcgagcctggccatactggtgagttcctgttgcgggtcttcacggacgtcccgagcaactgtagggagctgcgactggatgaaccacctcacacatgctggtcttctctgtgtggctatcctcaattggtcacacaagttcacgtcctgggggctgccgggttaaaagacagccctacgggcgctaatagctacgtcatcattaaatgtgagggcgataaagtgaggtctgctgtccagaagggaacctctacccctgagtataacgtcaagggtatcttctatagaaaaaaattgagtcagcccatcaccgtacaggtgtggaaccacagagtgcttaaggacgagtttttgggccaggttcacctcaaagctgatccggacaacctgcaggctctgcacacattgcatctgcgagaccgcaacagcaggcagccatctaacttgccaggcaccgtcgccgtacatattctgagttccactagtctgatggctgtctag

SEQ ID NO: 342433 - DNA, 1923 bp, Artificial Sequence
  derived and/or modified sequence
atgttcagctgcgtgaagccctacgaggaccagaactacagcgccttacggcgggactgtcgcagacgtaaggtgctcttcgaggatccactgtttcccgcaacagatgactccttgtactataagggaacgcccggtcccgcagtgaggtggaagcgcccgaaggggatctgtgaggatccaaggcttttcgtcgacggaattagctcacacgatttgcatcaaggtcaagtggggaattgctggttcgtagccgcatgctcatctcttgctagcagggaatcactgtggcaaaaggttatccccgactggaaggaacaggagtgggaccccgagaaacccaatgcctacgcaggtatctttcactttcatttttggcgcttcggcgagtgggtcgacgttgtgatagatgataggctgccgaccgtcaataatcaactaatctactgccatagcaactctagaaacgagttctggtgcgcactcgtcgagaaggcttatgcaaagctcgccggttgttaccaagccctggacggtggtaatacagcagacgctctggtagatttcacagggggagtcagcgagccgatcgaccttacagaaggggatttcgctaatgacgaaaccaaacgtaatcagctattcgagagaatgcttaaggttcactcacgcggtggcctgatatctgcatcaatcaaggcagtcacagcagcggatatggaagccagattggcctgtggtctcgtcaaaggccacgcctacgccgtgaccgatgttcggaaggtccgcctggggcatggactcttggccttttttaagagcgaaaagctcgatatgattcggctccgaaacccctggggagagagagagtggaacggcccttggtctgacacctccgaggagtggcagaaggtgtccaaatcggaacgcgagaagatgggagttacggtgcaggacgacggagaattttggatgacctttgaagatgtttgtcggtatttcacagacatcatcaagtgccgggtcattaatacttcacatctgagtattcacaaaacatgggaggaggcccgcctgcatggggcttggaccctgcatgaagacccacggcagaatagagggggggggtgtatcaaccacaaggacactttttttcagaacccacagtacatctttgaggttaaaaaaccggaagatgaggtcctcatctgtattcaacagcgacccaagaggtcgacccgcagggaaggcaaaggcgagaatctggctattggattcgatatttacaaagtcgaggagaacagacagtataggatgcactccttgcagcacaaggccgccagttcgatttacatcaatagccgatcagtgttcctgcgtaccgaccagcctgaggggcggtacgtgattatccctaccacgttcgaacccgggcacaccggtgagttcctacttcgcgtgtttaccgatgtgcccagcaactgtcgcgagctcagactggatgagcctcctcacacatgttggagctctctctgtggctacccacaactagtcacgcaggtgcatgtcctcggcgctgccggactgaaggacagtcctaccggggcaaattcatacgttattattaagtgtgagggcgacaaggtgcgaagcgcagtgcaaaaggggacctccaccccggagtacaacgtgaagggtatcttctaccggaagaaactttcgcagcccattacagttcaagtgtggaaccatcgcgtgcttaaggatgaatttctgggccaggtccatctgaaggccgaccccgataacctgcaagccctccataccctgcacctccgagatcgtaactcgcggcagccctcgaaccttccgggaaccgtagccgtgcacattttatcctctacatcgctgatggccgtatag

SEQ ID NO: 342434 - DNA, 1674 bp, Artificial Sequence
  derived and/or modified sequence
atgttcagctgcgtgaagccctacgaggaccagaactacagcgccttgcgcagggattgccgccggaggaaggttctcttcgaggacccgctgtttcccgccacagatgactccctttattacaagggcaccccggggccagcagtccggtggaagcggcctaaatatagtggccacagcctggccccacatcggccggggtggggggacgcgagaaggatggagaacgttccccgaccagggtcttcaggttgcccctcatccagcctgcgcgcacgcgatctcgggatctgtgaagaccctcgcctgttcgtcgacggcatctcctcgcacgacttgcaccaggggcaggtcggcaactgttggttcgtagcggcttgctccagcttggcttcccgcgagtctctgtggcagaaagtgattccagattggaaagaacaagaatgggatcctgaaaagcctaacgcttatgcaggaatatttcacttccatttctggcgtttcggagagtgggtcgatgtcgtgattgacgatcgcctgcccacagtcaacaaccaattgatttactgccacagtaactcgcgtaacgagttctggtgtgcgctcgtagagaaggcctatgcaaaattggccggctgttaccaggccctggacggaggtaacactgctgatgctttggtcgattttacgggcggtgtctctgagcccatcgatctgaccgagggagatttcgccaacgacgagaccaaacgaaaccagctatttgaacgtatgcttaaagtacactcacggggcggcctcatatcagcttctatcaaggcggtgaccgcagctgacatggaagccagactggcttgcgggctggttaagggacacgcgtatgcagttaccgatgtccgaaaggtgagattgggacacgggctcttagcatttttcaaatctgagaagctggacatgatccgacttaggaatccatggggagagagggaatggaacgggccgtggagcgacacctctgaggagtggcagaaggtttctaagagcgaacgcgagaagatgggggtaacggtgcaggacgatggtgagttctggatgacctttgaggacgtgtgtcgctactttaccgacattattaagtgccgggtcatcaatacaagtcatttgtcgatccataagacatgggaggaggcccgtttgcatggtgcctggacgctgcatgaggatcccaggcagaatcggggcgggggctgtattaaccacaaggatacttttttccagaacccgcagtacatattcgaggtgaagaagccagaagacgaggtgctgatctgtatacaacagagacccaagcgttcaactcgcagggagggtaaaggggagaatctagctattgggtttgatatatacaaggtggaagaaaatagacaatacagaatgcattcattgcagcacaaagcagctagttccatatatattaattcacgcagtgtgtttctcaggacagaccagcccgaaggccggtatgtgataatcccaacaaccttcgaaccaggacatacaggagaatttctgctgcgcgtttttaccgacgttccaagcaattgccgcgagctccgtcttgacgagcccccccatacctgttggtcctcactctgcgggtacccccagtggtag

SEQ ID NO: 342435 - DNA, 1923 bp, Artificial Sequence
  derived and/or modified sequence
atgttttcctgtgtgaaaccatatgaagatcaaaattatagtgcactgaggagggactgccggaggcgtaaggtcttgtttgaggatccacttttccccgctacggacgattctctctattacaaaggaacgccaggaccggcagttaggtggaaacggcctaaggggatttgcgaagacccgaggttgttcgtggatggcataagttcacacgacctgcaccaaggacaggttggtaactgctggttcgtggcagcatgctcaagcctggctagccgggaatccctctggcaaaaggtgattcctgattggaaggagcaggagtgggaccccgaaaagcctaacgcctacgctggtatctttcactttcatttttggcggttcggtgagtgggtggacgtggtgattgacgatcggctccctaccgttaacaaccagctgatatactgccattctaattcaagaaacgagttttggtgtgcactcgttgagaaggcttatgcgaaactggcgggatgttaccaagccctggatggcggaaatacagccgatgctttggtagattttaccggtggcgtgagtgaacctattgatctgaccgaaggggactttgcaaacgacgaaacaaaaagaaatcagcttttcgaacggatgttgaaggtgcacagcaggggaggactgatatccgcttctatcaaggcagtcactgccgctgatatggaagccaggctcgcctgtggactcgtgaaaggacacgcatatgccgtcacggacgtgcgaaaagtgcggctgggacatggactgttagcattcttcaaatcagagaagctagatatgatccgattacggaatccttggggcgagagggagtggaacgggccttggtcagacacttctgaggaatggcaaaaggtgagcaagtccgagcgtgagaagatgggggtcactgtgcaggacgatggagaattttggatgactttcgaagacgtgtgcaggtactttaccgacatcataaagtgtagggtgataaatacaagccatctgagcatacacaagacatgggaggaagccaggctgcatggggcttggacactgcatgaagaccctaggcagaacagaggcggtggctgcatcaaccacaaggacacattttttcagaatccccagtatatattcgaagtaaagaagcctgaggacgaagtgcttatttgtatccagcagcgccctaagcgcagcacaagaagagaaggtaagggagagaacttggcaatcggctttgatatttataaagtggaagaaaacaggcagtaccgcatgcactcactccagcataaggcggcaagttcaatctatatcaattcccgcagcgtgttccttaggactgatcagcctgaaggtcgatatgtgattataccaaccaccttcgagccaggtcacacaggagaatttctgctaagggtattcactgacgtcccaagcaattgtagagaactccgactcgatgagccaccccacacatgctggtcatcactgtgtggctatccccagctcgtgacgcaggttcacgttctgggcgctgcgggactcaaggactcccccactggtgctaacagctacgtgattattaagtgcgaaggggataaagtgcgcagcgcagttcagaaggggaccagtacccccgagtacaatgttaaggggatcttctaccggaaaaagctgtcgcaacctatcactgtgcaagtgtggaaccaccgagttctcaaagatgagttccttgggcaggtgcatcttaaggccgatccagacaacctgcaggcacttcataccctccatctgcgcgacagaaacagcaggcaacccagcaatctccccggtaccgtcgccgttcacatcctgagttctacatccttgatggcggtttag

SEQ ID NO: 342436 - DNA, 2043 bp, Artificial Sequence
  derived and/or modified sequence
atgtcttgtacggggaccccatcgtgtatctacctcctctctgcactgagcttacaggacctggtactggattgggaacctcggggagtgccacctccactgcccggtgcagccgcaacgatgttcagctgtgtgaagccatatgaagatcagaactactccgccctgcgaagagactgcagacgcagaaaggttctatttgaggatccgctttttccagcaacggacgactcactttactacaagggcaccccaggccctgctgtgcgctggaaacggcctaaagggatttgcgaggacccacgcctgttcgtggacgggatatcatctcacgacctgcatcaggggcaggtgggaaactgttggttcgtggccgcttgtagtagcctggcttcccgggaatccctttggcagaaggtgatccccgattggaaggagcaggagtgggatcctgagaagccaaacgcctacgccggtatattccatttccacttttggcggtttggagaatgggttgacgtagtcattgatgatcggctgccgacggtcaacaatcagctgatatattgccactctaactcgagaaacgagttctggtgtgccttggtggagaaggcctacgctaagttggctgggtgttatcaagctttagacggcggtaacactgcggacgctctcgtcgatttcacaggcggagttagcgaaccaatcgacctgaccgaaggggacttcgctaatgatgaaaccaagagaaatcaactatttgagcgaatgctcaaggtccacagtcgcggtgggctcatcagcgcaagcatcaaggcagtgacagctgctgacatggaggcgcgattagcatgtggccttgttaagggacacgcctacgccgtgacggatgttcgtaaagtccggctcggtcacggtttgctggcattctttaagtcagaaaaacttgatatgatccgccttcgcaacccctggggtgaaagggagtggaacggcccatggtccgacactagcgaggagtggcagaaagtctccaagagcgaacgtgaaaagatgggcgttactgtccaggacgatggggagttctggatgacctttgaggacgtttgtaggtacttcacagatatcattaagtgccgggtgatcaatacctcgcatctgtcaattcataagacctgggaggaggcaaggctgcacggggcatggacattgcacgaagaccccaggcaaaatagaggcggtgggtgcatcaaccataaagacacatttttccagaatcctcagtacatttttgaggtgaaaaaacccgaagatgaggtgttgatctgtatccagcaacgtcccaaaagatccacgcggagggaagggaaaggggaaaatcttgccatcgggttcgacatctacaaagtggaggaaaatcgtcaatacaggatgcatagcttacagcataaggctgccagcagcatttacataaatagcaggtccgttttcctccgaacagatcaacccgaagggaggtacgttatcatcccgaccaccttcgagcctggacacactggtgaattccttctgagagtgttcaccgatgtacctagcaattgtcgggagttgcgattagacgaacccccacatacctgttggagtagcttgtgcgggtacccccagttagtcactcaggttcacgtcctgggggctgccggtctgaaggacagtcccaccggagctaattcctacgttataatcaaatgtgagggcgacaaagtcagaagcgccgtccaaaaaggaacctctactcctgaatataacgttaaagggattttttacaggaagaagcttagtcaacccattactgtgcaggtttggaatcacagagtgctcaaagacgagttcctcgggcaggtccacttgaaggctgaccccgataacctgcaggcattacatactctccaccttcgggatagaaatagtcggcagccatccaatctccctgggaccgtggctgtgcatattctgagctccaccagcctaatggccgtgtag

SEQ ID NO: 342437 - DNA, 1923 bp, Artificial Sequence
  derived and/or modified sequence
atgttttcttgtgtcaagccctacgaagatcagaactactctgccttgagacgcgactgccggcgtagaaaagtgctattcgaggaccctctctttcccgcaacagacgactccctgtactacaaaggcacccccggtccggctgtgaggtggaagaggcccaagggaatctgtgaggacccacggctctttgtggacggaatctcctcacacgacctacatcaggggcaggtgggaaactgttggttcgtggccgcttgctcttcattggcaagcagggaaagtctctggcagaaggttattccagactggaaggaacaagagtgggatccagagaaacccaatgcatacgccggaatctttcatttccatttttggcggtttggggagtgggtcgatgtcgtcatcgacgacagactgcccaccgtgaacaatcagctgatctattgccatagtaacagcagaaacgaattttggtgcgccctagtagaaaaggcctacgctaagttggcaggttgttatcaagccctggatggcggtaacacagccgatgcgcttgtcgactttacaggaggggtgtcagagcctattgatctgactgagggcgactttgccaacgatgaaacaaagcgcaaccagttattcgaaagaatgctcaaagtgcactcccggggtggactgatctctgcaagtatcaaagctgtgacagccgcagacatggaagctcggctggcttgcggtttggtgaaggggcacgcttatgctgttacggacgtccgcaaggtccgactcgggcatggactgctggcgtttttcaagtccgaaaaactcgacatgatccggctgagaaacccgtggggggaaagggagtggaacggtccttggtctgatacctccgaggagtggcagaaggtttcaaaaagtgaacgggagaaaatgggtgtaacggttcaagacgacggcgagttctggatgacgttcgaggacgtgtgtcgctatttcaccgacataattaaatgccgggttatcaacacaagccatctgagtattcataaaacatgggaggaagcccgtttacacggggcttggaccctccacgaagatcccaggcagaatcgcggaggcggatgcatcaaccacaaggatacctttttccaaaatccacaatacatattcgaggtcaaaaagcccgaagacgaggtactgatatgcatccagcagaggcccaagcggagcacgcggcgtgaggggaaaggtgagaatctcgccattgggttcgacatctataaggtcgaggaaaataggcagtaccgcatgcactctctgcaacataaagccgcatcctctatttacatcaattccaggtccgtctttctgagaactgatcagcccgagggtaggtatgtcatcattccaacaacttttgagcctgggcacaccggagaattcctgctgcgggtgttcactgatgtaccttctaattgccgggaactgagactggacgagccccctcacacatgctggagctctctttgcgggtaccctcaactggttacccaggtccatgtgttgggagccgctggactgaaggatagcccaaccggagccaactcttatgttatcattaaatgtgagggagataaggttcgctctgcggttcagaagggaacctctacacccgagtataatgtgaagggcattttctatcgcaagaagctgagtcagcccataactgtgcaggtttggaaccatcgtgttttaaaagacgaattcctcggacaggtccacctcaaggcagatcctgataatctgcaggctctccataccctccacctgagagataggaacagtcggcaaccaagcaacctccctggcactgtcgccgtacacatcctttcctccacttctcttatggccgtttag

SEQ ID NO: 342438 - DNA, 1674 bp, Artificial Sequence
  derived and/or modified sequence
atgtttagctgcgtgaaaccatacgaagatcagaactattcggccctgcgcagggattgtaggagaaggaaggttctgtttgaggacccactgttccccgcaaccgacgactccttgtactacaaaggaaccccgggtcctgcggtccggtggaagagaccaaagtacagcgggcattctctagctcctcatagaccaggatggggggacgctcgtcgcatggagaatgttccgaggcccggatctagtggttgtcctagctcatccctgcgtgcacgcgatttgggaatttgtgaagatccacggctcttcgtggatggaataagtagccacgatttacatcagggccaggtggggaactgctggttcgtggccgcatgcagttcgctagccagcagagagagtctgtggcagaaagtaattccagattggaaagagcaggagtgggacccggagaagccaaatgcctacgccggtatcttccactttcatttttggcggttcggtgagtgggtcgacgtcgtgatcgacgatagactgcccaccgttaataatcagctcatctactgtcactccaattcccggaacgagttctggtgtgcacttgtggaaaaggcctacgcaaagctggcagggtgttatcaggctttggacggagggaataccgctgatgcactggttgatttcacgggtggtgtctctgagccaattgacctcacagagggggactttgccaacgatgagacaaagagaaaccagctcttcgagcgtatgctgaaggtacatagtagaggcggactgataagcgcaagcattaaggccgtgaccgccgctgacatggaggcccgtttggcttgcgggctagttaaaggccacgcttacgccgtgacagatgtaaggaaggtgcggctgggacacggtttgctggctttttttaagtctgaaaagctcgacatgattcgcctccgcaacccttggggggaacgtgagtggaacggcccttggtcagacacctccgaggaatggcagaaggtctcaaaaagtgaacgggagaaaatgggcgtgacggtccaggatgatggtgagttttggatgaccttcgaggatgtgtgtcgctactttactgacatcatcaagtgcagagttatcaacactagccacctgtctatccacaagacctgggaagaagccagattgcatggggcttggaccttgcatgaggatccccgtcagaatcggggtggcggttgcatcaaccataaagatacattctttcaaaatcctcagtacatctttgaggtcaagaaacctgaagacgaggtgctgatctgcattcagcaacgcccaaagaggagcacgagaagagaaggcaagggcgaaaacttagctatcggattcgatatctacaaagttgaggaaaaccgtcaatacaggatgcatagccttcaacataaggctgcgagctccatctatattaattctaggtccgtcttcctgagaaccgatcagcctgagggtagatacgtaattattcccacaaccttcgaacccggacatactggggaatttttgctgcgggtgttcaccgatgttccatccaactgccgcgagctgagactcgatgagccacctcatacttgctggtcctcactgtgcggatatccacagtggtag

SEQ ID NO: 342439 - DNA, 4397 bp, Artificial Sequence
  derived and/or modified sequence
gaatgcgagcgccagcccccgccgcaggccagtcccagctggatctccggccagagcccgaggctgctgcgccgggcggctgcagcctccgctccagcgcccgcgccgtgccctgcatcccgggagcccggctggacccgcggcggctcggccggtgttccccctcccctccctggggcagcagccaccatgttctcgtgtgtgaagccctatgaggaccagaactactcagccctgaggcgggactgccggcgcaggaaggtgctcttcgaggaccccctcttccccgccactgacgactcactctactataagggcacgccggggcccgccgtcaggtggaagcgacccaagggcatctgcgaggacccccgcctctttgtggatggcatcagctcccacgacctgcaccagggccaggtgggcaactgctggtttgtggcagcctgctcgtcacttgcctcccgggagtcgctgtggcaaaaggtcatcccagactggaaggagcaggaatgggaccccgaaaagcccaacgcctacgcgggcatcttccacttccacttctggcgcttcggggaatgggtggacgtggtcatcgatgaccggctgcccacagtcaacaaccagctcatctactgccactccaactcccgcaatgagttttggtgcgccctagtggagaaggcctatgccaaactggcaggctgttaccaggccctggatggaggcaacacagcagacgcactggtggacttcacgggtggtgtttctgagcccatcgacctgaccgagggtgactttgccaacgatgagactaagaggaaccagctctttgagcgcatgttaaaggtgcacagccggggcggcctcatcagtgcctccatcaaggcagtgacagcagctgacatggaggcccgcctggcgtgcggcctggtaaagggccacgcatacgccgtcactgatgtgcgcaaggtgcgcctgggccacggcctactggccttcttcaagtcagagaagttggacatgatccgcctgcgcaacccctggggcgagcgggagtggaacgggccctggagtgacacctcggaggagtggcagaaagtgagcaagagtgagcgggagaagatgggtgtgaccgtgcaggacgacggtgagttctggatgaccttcgaggacgtgtgccggtacttcacggacatcatcaagtgccgcgtgatcaacacatcccacctgagcatccacaagacgtgggaggaggcccggctgcatggcgcctggacgctgcatgaggacccgcgacagaaccgcggtggcggctgcatcaaccacaaggacaccttcttccagaacccacagtacatcttcgaagtcaagaagccagaagatgaagtcctgatctgcatccagcagcggccaaagcggtctacgcgccgggagggcaagggtgagaacctggccattggctttgacatctacaaggtggaggagaaccgccagtaccgcatgcacagcctgcagcacaaggccgccagctccatctacatcaactcacgcagcgtcttcctgcgcaccgaccagcccgagggccgctatgtcatcatccccacaaccttcgagccaggccacactggcgagttcctgctccgagtcttcactgatgtgccctccaactgccgggagctgcgcctggatgagcccccacacacctgctggagctccctctgtggctacccccagctggtgacccaggtacatgtcctgggagctgctggcctcaaggactccccaacaggggctaactcttatgtgatcatcaagtgtgagggagacaaagtccgctcggctgtgcagaagggcacctccacaccagagtacaatgtgaaaggcatcttctaccgcaagaagctgagccagcccatcactgtacaggtctggaaccaccgagtgctgaaggatgaatttctgggccaggtgcacctaaaggctgacccggacaacctccaggccctgcataccctccacctccgggaccgaaatagccggcagcccagcaacctgccaggcactgtggccgtgcacattctcagcagcacctccctcatggctgtctgacacctgcccacctacctggctctgaccgttcccaccaccatctgcatgtccccactgggcctgagtctagcctgggagccaggatactggggtccttttcccactcttccactgacttgctgtgtgaccttaggaagtctctgcccctctctcagcctcagtgtcccgagggccccgaagcattccattctcgtggaggagtttccttgctgagatttcaaatagtcctccccacctcaactgtcaccactgctaagggactctatccattgagcacattttcctaaggccctgctgtctgccgaggagcgccaagaagatgtcacttgtttacacacgaactgccacatccccaagctccgttcttgcccctcgtgtcctaggcccaacccagcctcccagacctcactttccccatcagcaatacctggtgttctcccaccttgaaaggactcttggctcctgccgggttcctgctcaggctggaattgggaaaatatgcaggtgacatttgttcattctctaatcccatcctctcacccatccatttcctcactcagtggagatttgccaaatgaataaacgacacctttgaggccccaggtgaagcggggccctactccggcctctgccttgggcctcgcctctgtcctcaggtcctctcagaggcagatacctaggggagctgctgctgcctgctcattctagcttccgattccattcccagcccctgcgttaaggtccctggagaggtggcgtcagtgggggtgaggaagggcatcttcctgactcctctgcccagtgctggaaggagcatgcctgggttagtgggccaggggccaggcagctgggggcctttggggaccagaaggggagatgtgctcccagagcctctctgctgtaagaccccagcttttcctggaagatgggactctggggtgtgtggtgctcaccagagtcaggccacccactgggctcggcaggagatagggagccccatcacctgaccacagccccccaccaacattcccccaaaatgcagcctaggaggccgcagtgctcttcttcctgcccagaccaaaatgttccttttagtcctcaatgttttatattctttttgttttgaaaatctcaattttaatcaggggttttaaaagaaaattgaaagcctgaacctccatttttcttcttggctccagttttgctggtcctctggagaactcttcgtgagcactggtgccgtgacccacttgggatctctgctgtgcccttctcgggcttccagaccaggtgtagcaaatgaaaaagtgcagttaattcaagaacaggaatccctgtgtccttgctgggatttccttttgggaacctgactttccgactccagatcctgctgtctggatcagtgttctggctggaggtgctggattctctgattttgcctcctcactctgtgtctggctttgctcctgggtcttggccctgggccatatgaggggccaggaaatgaacgacaaggaggataagagtgttctttcttgaaagccgggacttcccctcaagaacctgggcctggggccgggactctgcatgactgggagcaagtcacttaaacctcctgtgcctcgatttcccccttctacaaagtggggccaatgattcttgtgtgtcagcactgttactaccgagtgctgagtaagggcaaaataatacccctttctctatgtatctctgtatgcacacgcactatatatatatatatatatatatatacattcatgtaatcaccacttctcgatgtctatttcaaatcaaggctcctgagtagggggtgaagtgagccagcttgcacctcaggctaacacataggactttgctcagccatgtcccctgggatacaggggcacaccaggaccaagtggcagacctgtgggcttcagcctcggggccggggcatgcctgccaccccctgacaaaaacaggttccacagtgctacccttgcttcctgccccttgaggtgggccaggctggctcctggctatgcagggatctctggtccccaggagaccttgggggccaggcaggtaaggatcaggggtgataggggagagcaattactttgttcactgtatgcacccgcgggggcctgggagtccccatttgcaggtgggtagggcctccagcccacaccacccagacctaggcttccctcttctcaggatccaccacagggttaggggacaggaagcctgttctattctcaataaatcttacaaaattccaaaaa

SEQ ID NO: 342440 - DNA, 3397 bp, Artificial Sequence
  derived and/or modified sequence
agtcccagctggatctccggccagagcccgaggctgctgcgccgggcggctgcagcctccgctccagcgcccgcgccgtgccctgcatcccgggagcccggctggacccgcggcggctcggccggttgtctctccggtggggagtgagcgagcacacagcccccaccccaccccgggtgagagagaatgtcctgcacagggacgcccagctgtatctacctgctgtcagcactttctctgcaggacctggtgctggactgggagccccgaggtgttccccctcccctccctggggcagcagccaccatgttctcgtgtgtgaagccctatgaggaccagaactactcagccctgaggcgggactgccggcgcaggaaggtgctcttcgaggaccccctcttccccgccactgacgactcactctactataagggcacgccggggcccgccgtcaggtggaagcgacccaagggcatctgcgaggacccccgcctctttgtggatggcatcagctcccacgacctgcaccagggccaggtgggcaactgctggtttgtggcagcctgctcgtcacttgcctcccgggagtcgctgtggcaaaaggtcatcccagactggaaggagcaggaatgggaccccgaaaagcccaacgcctacgcgggcatcttccacttccacttctggcgcttcggggaatgggtggacgtggtcatcgatgaccggctgcccacagtcaacaaccagctcatctactgccactccaactcccgcaatgagttttggtgcgccctagtggagaaggcctatgccaaactggcaggctgttaccaggccctggatggaggcaacacagcagacgcactggtggacttcacgggtggtgtttctgagcccatcgacctgaccgagggtgactttgccaacgatgagactaagaggaaccagctctttgagcgcatgttaaaggtgcacagccggggcggcctcatcagtgcctccatcaaggcagtgacagcagctgacatggaggcccgcctggcgtgcggcctggtaaagggccacgcatacgccgtcactgatgtgcgcaaggtgcgcctgggccacggcctactggccttcttcaagtcagagaagttggacatgatccgcctgcgcaacccctggggcgagcgggagtggaacgggccctggagtgacacctcggaggagtggcagaaagtgagcaagagtgagcgggagaagatgggtgtgaccgtgcaggacgacggtgagttctggatgaccttcgaggacgtgtgccggtacttcacggacatcatcaagtgccgcgtgatcaacacatcccacctgagcatccacaagacgtgggaggaggcccggctgcatggcgcctggacgctgcatgaggacccgcgacagaaccgcggtggcggctgcatcaaccacaaggacaccttcttccagaacccacagtacatcttcgaagtcaagaagccagaagatgaagtcctgatctgcatccagcagcggccaaagcggtctacgcgccgggagggcaagggtgagaacctggccattggctttgacatctacaaggtggaggagaaccgccagtaccgcatgcacagcctgcagcacaaggccgccagctccatctacatcaactcacgcagcgtcttcctgcgcaccgaccagcccgagggccgctatgtcatcatccccacaaccttcgagccaggccacactggcgagttcctgctccgagtcttcactgatgtgccctccaactgccgggagctgcgcctggatgagcccccacacacctgctggagctccctctgtggctacccccagctggtgacccaggtacatgtcctgggagctgctggcctcaaggactccccaacaggggctaactcttatgtgatcatcaagtgtgagggagacaaagtccgctcggctgtgcagaagggcacctccacaccagagtacaatgtgaaaggcatcttctaccgcaagaagctgagccagcccatcactgtacaggtctggaaccaccgagtgctgaaggatgaatttctgggccaggtgcacctaaaggctgacccggacaacctccaggccctgcataccctccacctccgggaccgaaatagccggcagcccagcaacctgccaggcactgtggccgtgcacattctcagcagcacctccctcatggctgtctgacacctgcccacctacctggctctgaccgttcccaccaccatctgcatgtccccactgggcctgagtctagcctgggagccaggatactggggtccttttcccactcttccactgacttgctgtgtgaccttaggaagtctctgcccctctctcagcctcagtgtcccgagggccccgaagcattccattctcgtggaggagtttccttgctgagatttcaaatagtcctccccacctcaactgtcaccactgctaagggactctatccattgagcacattttcctaaggccctgctgtctgccgaggagcgccaagaagatgtcacttgtttacacacgaactgccacatccccaagctccgttcttgcccctcgtgtcctaggcccaacccagcctcccagacctcactttccccatcagcaatacctggtgttctcccaccttgaaaggactcttggctcctgccgggttcctgctcaggctggaattgggaaaatatgcaggtgacatttgttcattctctaatcccatcctctcacccatccatttcctcactcagtggagatttgccaaatgaataaacgacacctttgaggccccaggtgaagcggggccctactccggcctctgccttgggcctcgcctctgtcctcaggtcctctcagaggcagatacctaggggagctgctgctgcctgctcattctagcttccgattccattcccagcccctgcgttaaggtccctggagaggtggcgtcagtgggggtgaggaagggcatcttcctgactcctctgcccagtgctggaaggagcatgcctgggttagtgggccaggggccaggcagctgggggcctttggggaccagaaggggagatgtgctcccagagcctctctgctgtaagaccccagcttttcctggaagatgggactctggggtgtgtggtgctcaccagagtcaggccacccactgggctcggcaggagataggggagagcaattactttgttcactgtatgcacccgcgggggcctgggagtccccatttgcaggtgggtagggcctccagcccacaccacccagacctaggcttccctcttctcaggatccaccacagggttaggggacaggaagcctgttctattctcaataaatcttacaaaattcc

SEQ ID NO: 342441 - DNA, 597 bp, Artificial Sequence
  derived and/or modified sequence
agtcccagctggatctccggccagagcccgaggctgctgcgccgggcggctgcagcctccgctccagcgcccgcgccgtgccctgcatcccgggagcccggctggacccgcggcggctcggccggttgtctctccggtggggagtgagcgagcacacagcccccaccccaccccgggtgagagagaatgtcctgcacagggacgcccagctgtatctacctgctgtcagcactttctctgcaggacctggtgctggactgggagccccgaggtgttccccctcccctccctggggcagcagccaccatgttctcgtgtgtgaagccctatgaggaccagaactactcagccctgaggcgggactgccggcgcaggaaggtgctcttcgaggaccccctcttccccgccactgacgactcactctactataagggcacgccggggcccgccgtcaggtggaagcgacccaagggcatctgcgaggacccccgcctctttgtggatggcatcagctcccacgacctgcaccagggccaggtgggcaactgctggtttgtggcagcctgctcgtcacttgcctcccgggagtcgctgtgg

SEQ ID NO: 342442 - DNA, 2333 bp, Artificial Sequence
  derived and/or modified sequence
agctggatctccggccagagcccgaggctgctgcgccgggcggctgcagcctccgctccagcgcccgcgccgtgccctgcatcccgggagcccggctggacccgcggcggctcggccgatgagaattctgaagcacaaagaggttaactgctttgcacctcgctggcctcagtctccccatctgaggacgggtgttccccctcccctccctggggcagcagccaccatgttctcgtgtgtgaagccctatgaggaccagaactactcagccctgaggcgggactgccggcgcaggaaggtgctcttcgaggaccccctcttccccgccactgacgactcactctactataagggcacgccggggcccgccgtcaggtggaagcgacccaagggcatctgcgaggacccccgcctctttgtggatggcatcagctcccacgacctgcaccagggccaggtgggcaactgctggtttgtggcagcctgctcgtcacttgcctcccgggagtcgctgtggcaaaaggtcatcccagactggaaggagcaggaatgggaccccgaaaagcccaacgcctacgcgggcatcttccacttccacttctggcgcttcggggaatgggtggacgtggtcatcgatgaccggctgcccacagtcaacaaccagctcatctactgccactccaactcccgcaatgagttttggtgcgccctagtggagaaggcctatgccaaactggcaggctgttaccaggccctggatggaggcaacacagcagacgcactggtggacttcacgggtggtgtttctgagcccatcgacctgaccgagggtgactttgccaacgatgagactaagaggaaccagctctttgagcgcatgttaaaggtgcacagccggggcggcctcatcagtgcctccatcaaggcagtgacagcagctgacatggaggcccgcctggcgtgcggcctggtaaagggccacgcatacgccgtcactgatgtgcgcaaggtgcgcctgggccacggcctactggccttcttcaagtcagagaagttggacatgatccgcctgcgcaacccctggggcgagcgggagtggaacgggccctggagtgacacctcggaggagtggcagaaagtgagcaagagtgagcgggagaagatgggtgtgaccgtgcaggacgacggtgagttctggatgaccttcgaggacgtgtgccggtacttcacggacatcatcaagtgccgcgtgatcaacacatcccacctgagcatccacaagacgtgggaggaggcccggctgcatggcgcctggacgctgcatgaggacccgcgacagaaccgcggtggcggctgcatcaaccacaaggacaccttcttccagaacccacagtacatcttcgaagtcaagaagccagaagatgaagtcctgatctgcatccagcagcggccaaagcggtctacgcgccgggagggcaagggtgagaacctggccattggctttgacatctacaaggtggaggagaaccgccagtaccgcatgcacagcctgcagcacaaggccgccagctccatctacatcaactcacgcagcgtcttcctgcgcaccgaccagcccgagggccgctatgtcatcatccccacaaccttcgagccaggccacactggcgagttcctgctccgagtcttcactgatgtgccctccaactgccgggagctgcgcctggatgagcccccacacacctgctggagctccctctgtggctacccccagctggtgacccaggtacatgtcctgggagctgctggcctcaaggactccccaacaggggctaactcttatgtgatcatcaagtgtgagggagacaaagtccgctcggctgtgcagaagggcacctccacaccagagtacaatgtgaaaggcatcttctaccgcaagaagctgagccagcccatcactgtacaggtctggaaccaccgagtgctgaaggatgaatttctgggccaggtgcacctaaaggctgacccggacaacctccaggccctgcataccctccacctccgggaccgaaatagccggcagcccagcaacctgccaggcactgtggccgtgcacattctcagcagcacctccctcatggctgtctgacacctgcccacctacctggctctgaccgttcccaccaccatctgcatgtccccactgggcctgagtctagcctgggagccaggatactggggtccttttcccactcttccactgacttgctgtgtgaccttaggaagtctctgcccctctctcagcctcagtgtcccgagggccccgaagcatt

SEQ ID NO: 342443 - DNA, 2804 bp, Artificial Sequence
  derived and/or modified sequence
agagcccgaggctgctgcgccgggcggctgcagcctccgctccagcgcccgcgccgtgccctgcatcccgggagcccggctggacccgcggcggctcggccggtgttccccctcccctccctggggcagcagccaccatgttctcgtgtgtgaagccctatgaggaccagaactactcagccctgaggcgggactgccggcgcaggaaggtgctcttcgaggaccccctcttccccgccactgacgactcactctactataagggcacgccggggcccgccgtcaggtggaagcgacccaagtacagtggccattcgctggcccctcacaggcctggctggggagatgcacggagaatggagaatgtccccaggcctgggagctcagggtgtccgtcctcctcgctcagggcccgggacctgggcatctgcgaggacccccgcctctttgtggatggcatcagctcccacgacctgcaccagggccaggtgggcaactgctggtttgtggcagcctgctcgtcacttgcctcccgggagtcgctgtggcaaaaggtcatcccagactggaaggagcaggaatgggaccccgaaaagcccaacgcctacgcgggcatcttccacttccacttctggcgcttcggggaatgggtggacgtggtcatcgatgaccggctgcccacagtcaacaaccagctcatctactgccactccaactcccgcaatgagttttggtgcgccctagtggagaaggcctatgccaaactggcaggctgttaccaggccctggatggaggcaacacagcagacgcactggtggacttcacgggtggtgtttctgagcccatcgacctgaccgagggtgactttgccaacgatgagactaagaggaaccagctctttgagcgcatgttaaaggtgcacagccggggcggcctcatcagtgcctccatcaaggcagtgacagcagctgacatggaggcccgcctggcgtgcggcctggtaaagggccacgcatacgccgtcactgatgtgcgcaaggtgcgcctgggccacggcctactggccttcttcaagtcagagaagttggacatgatccgcctgcgcaacccctggggcgagcgggagtggaacgggccctggagtgacacctcggaggagtggcagaaagtgagcaagagtgagcgggagaagatgggtgtgaccgtgcaggacgacggtgagttctggatgaccttcgaggacgtgtgccggtacttcacggacatcatcaagtgccgcgtgatcaacacatcccacctgagcatccacaagacgtgggaggaggcccggctgcatggcgcctggacgctgcatgaggacccgcgacagaaccgcggtggcggctgcatcaaccacaaggacaccttcttccagaacccacagtacatcttcgaagtcaagaagccagaagatgaagtcctgatctgcatccagcagcggccaaagcggtctacgcgccgggagggcaagggtgagaacctggccattggctttgacatctacaaggtggaggagaaccgccagtaccgcatgcacagcctgcagcacaaggccgccagctccatctacatcaactcacgcagcgtcttcctgcgcaccgaccagcccgagggccgctatgtcatcatccccacaaccttcgagccaggccacactggcgagttcctgctccgagtcttcactgatgtgccctccaactgccgggagctgcgcctggatgagcccccacacacctgctggagctccctctgtggctacccccagtggtgacccaggtacatgtcctgggagctgctggcctcaaggactccccaacaggggctaactcttatgtgatcatcaagtgtgagggagacaaagtccgctcggctgtgcagaagggcacctccacaccagagtacaatgtgaaaggcatcttctaccgcaagaagctgagccagcccatcactgtacaggtctggaaccaccgagtgctgaaggatgaatttctgggccaggtgcacctaaaggctgacccggacaacctccaggccctgcataccctccacctccgggaccgaaatagccggcagcccagcaacctgccaggcactgtggccgtgcacattctcagcagcacctccctcatggctgtctgacacctgcccacctacctggctctgaccgttcccaccaccatctgcatgtccccactgggcctgagtctagcctgggagccaggatactggggtccttttcccactcttccactgacttgctgtgtgaccttaggaagtctctgcccctctctcagcctcagtgtcccgagggccccgaagcattccattctcgtggaggagtttccttgctgagatttcaaatagtcctccccacctcaactgtcaccactgctaagggactctatccattgagcacattttcctaaggccctgctgtctgccgaggagcgccaagaagatgtcacttgtttacacacgaactgccacatccccaagctccgttcttgcccctcgtgtcctaggcccaacccagcctcccagacctcactttccccatcagcaatacctggtgttctcccaccttgaaaggactcttggctcctgccgggttcctgctcaggctggaattgggaaaatatgcaggtgacatttgttcattctctaatcccatcctctcacccatccatttcctcactcagtggagatttgccaaatgaataaacgacacctttgaggccccaggtgaagcggggccctactccgg

SEQ ID NO: 342444 - DNA, 1923 bp, Artificial Sequence
  derived and/or modified sequence
atgttcagctgcgtgaagccctacgaggaccagaactacagcgccctgagaagagactgcagaagaagaaaggtgctgttcgaggaccccctgttccccgccaccgacgacagcctgtactacaagggcacccccggccccgccgtgagatggaagagacccaagggcatctgcgaggaccccagactgttcgtggacggcatcagcagccacgacctgcaccagggccaggtgggcaactgctggttcgtggccgcctgcagcagcctggccagcagagagagcctgtggcagaaggtgatccccgactggaaggagcaggagtgggaccccgagaagcccaacgcctacgccggcatcttccacttccacttctggagattcggcgagtgggtggacgtggtgatcgacgacagactgcccaccgtgaacaaccagctgatctactgccacagcaacagcagaaacgagttctggtgcgccctggtggagaaggcctacgccaagctggccggctgctaccaggccctggacggcggcaacaccgccgacgccctggtggacttcaccggcggcgtgagcgagcccatcgacctgaccgagggcgacttcgccaacgacgagaccaagagaaaccagctgttcgagagaatgctgaaggtgcacagcagaggcggcctgatcagcgccagcatcaaggccgtgaccgccgccgacatggaggccagactggcctgcggcctggtgaagggccacgcctacgccgtgaccgacgtgagaaaggtgagactgggccacggcctgctggccttcttcaagagcgagaagctggacatgatcagactgagaaacccctggggcgagagagagtggaacggcccctggagcgacaccagcgaggagtggcagaaggtgagcaagagcgagagagagaagatgggcgtgaccgtgcaggacgacggcgagttctggatgaccttcgaggacgtgtgcagatacttcaccgacatcatcaagtgcagagtgatcaacaccagccacctgagcatccacaagacctgggaggaggccagactgcacggcgcctggaccctgcacgaggaccccagacagaacagaggcggcggctgcatcaaccacaaggacaccttcttccagaacccccagtacatcttcgaggtgaagaagcccgaggacgaggtgctgatctgcatccagcagagacccaagagaagcaccagaagagagggcaagggcgagaacctggccatcggcttcgacatctacaaggtggaggagaacagacagtacagaatgcacagcctgcagcacaaggccgccagcagcatctacatcaacagcagaagcgtgttcctgagaaccgaccagcccgagggcagatacgtgatcatccccaccaccttcgagcccggccacaccggcgagttcctgctgagagtgttcaccgacgtgcccagcaactgcagagagctgagactggacgagcccccccacacctgctggagcagcctgtgcggctacccccagctggtgacccaggtgcacgtgctgggcgccgccggcctgaaggacagccccaccggcgccaacagctacgtgatcatcaagtgcgagggcgacaaggtgagaagcgccgtgcagaagggcaccagcacccccgagtacaacgtgaagggcatcttctacagaaagaagctgagccagcccatcaccgtgcaggtgtggaaccacagagtgctgaaggacgagttcctgggccaggtgcacctgaaggccgaccccgacaacctgcaggccctgcacaccctgcacctgagagacagaaacagcagacagcccagcaacctgcccggcaccgtggccgtgcacatcctgagcagcaccagcctgatggccgtgtag

SEQ ID NO: 342445 - DNA, 2043 bp, Artificial Sequence
  derived and/or modified sequence
atgagctgcaccggcacccccagctgcatctacctgctgagcgccctgagcctgcaggacctggtgctggactgggagcccagaggcgtgcccccccccctgcccggcgccgccgccaccatgttcagctgcgtgaagccctacgaggaccagaactacagcgccctgagaagagactgcagaagaagaaaggtgctgttcgaggaccccctgttccccgccaccgacgacagcctgtactacaagggcacccccggccccgccgtgagatggaagagacccaagggcatctgcgaggaccccagactgttcgtggacggcatcagcagccacgacctgcaccagggccaggtgggcaactgctggttcgtggccgcctgcagcagcctggccagcagagagagcctgtggcagaaggtgatccccgactggaaggagcaggagtgggaccccgagaagcccaacgcctacgccggcatcttccacttccacttctggagattcggcgagtgggtggacgtggtgatcgacgacagactgcccaccgtgaacaaccagctgatctactgccacagcaacagcagaaacgagttctggtgcgccctggtggagaaggcctacgccaagctggccggctgctaccaggccctggacggcggcaacaccgccgacgccctggtggacttcaccggcggcgtgagcgagcccatcgacctgaccgagggcgacttcgccaacgacgagaccaagagaaaccagctgttcgagagaatgctgaaggtgcacagcagaggcggcctgatcagcgccagcatcaaggccgtgaccgccgccgacatggaggccagactggcctgcggcctggtgaagggccacgcctacgccgtgaccgacgtgagaaaggtgagactgggccacggcctgctggccttcttcaagagcgagaagctggacatgatcagactgagaaacccctggggcgagagagagtggaacggcccctggagcgacaccagcgaggagtggcagaaggtgagcaagagcgagagagagaagatgggcgtgaccgtgcaggacgacggcgagttctggatgaccttcgaggacgtgtgcagatacttcaccgacatcatcaagtgcagagtgatcaacaccagccacctgagcatccacaagacctgggaggaggccagactgcacggcgcctggaccctgcacgaggaccccagacagaacagaggcggcggctgcatcaaccacaaggacaccttcttccagaacccccagtacatcttcgaggtgaagaagcccgaggacgaggtgctgatctgcatccagcagagacccaagagaagcaccagaagagagggcaagggcgagaacctggccatcggcttcgacatctacaaggtggaggagaacagacagtacagaatgcacagcctgcagcacaaggccgccagcagcatctacatcaacagcagaagcgtgttcctgagaaccgaccagcccgagggcagatacgtgatcatccccaccaccttcgagcccggccacaccggcgagttcctgctgagagtgttcaccgacgtgcccagcaactgcagagagctgagactggacgagcccccccacacctgctggagcagcctgtgcggctacccccagctggtgacccaggtgcacgtgctgggcgccgccggcctgaaggacagccccaccggcgccaacagctacgtgatcatcaagtgcgagggcgacaaggtgagaagcgccgtgcagaagggcaccagcacccccgagtacaacgtgaagggcatcttctacagaaagaagctgagccagcccatcaccgtgcaggtgtggaaccacagagtgctgaaggacgagttcctgggccaggtgcacctgaaggccgaccccgacaacctgcaggccctgcacaccctgcacctgagagacagaaacagcagacagcccagcaacctgcccggcaccgtggccgtgcacatcctgagcagcaccagcctgatggccgtgtag
